(19) United States
(12) Patent Application Publication
(10) Pub. No.: US 2004/0005560 A1
(43) Pub. Date: Jan. 8, 2004

(54) Novel full-length cDNA

(75) Inventors: Takao Isogai, Ibaraki (JP); Tomoyasu Sugiyama, Tokyo (JP); Tetsuji Otsuki, Chiba (JP); Ai Wakamatsu, Chiba (JP); Hiroyuki Sato, Osaka (JP); Shizuko Ishii, Chiba (JP); Jun-Ichi Yamamoto, Chiba (JP); Yuuko Isono, Chiba (JP); Yuri Hio, Chiba (JP); Kaoru Otsuka, Saitama (JP); Keiichi Nagai, Tokyo (JP); Ryotaro Irie, Chiba (JP); Ichiro Tamechika, Osaka (JP); Naohiko Seki, Chiba (JP); Tsutomu Yoshikawa, Chiba (JP); Motoyuki Otsuka, Tokyo (JP); Kenji Nagahari, Tokyo (JP); Yasuhiko Masuho, Tokyo (JP)

Correspondence Address: FOLEY AND LARDNER, SUITE 500, 3000 K STREET NW, WASHINGTON, DC, 20007, US

(73) Assignee: Helix Research Institute

(21) Appl. No.: 10/108,260

(22) Filed: Mar. 28, 2002

(30) Foreign Application Priority Data
Mar. 22, 2002 (JP) 2002-137785

(51) Int. Cl. C12Q 1/68; G06F 19/00; G01N 33/48; G01N 33/50; C12P 21/02; C12N 5/06; C07K 14/47; C07K 16/18; C07H 21/04

(52) U.S. Cl. 435/6; 435/69.1; 435/183; 435/320.1; 435/325; 530/388.1; 530/350; 536/23.5

(57) ABSTRACT

Novel full-length cDNAs are provided.

2443 cDNA derived from human have been isolated. The full-length nucleotide sequences of the cDNA and amino acid sequences encoded by the nucleotide sequences have been determined. Because the cDNA of the present invention are full-length and contain the translation start site, they provide information useful for analyzing the functions of the polypeptide.

### FIELD OF THE INVENTION

[0001] The present invention relates to polynucleotides encoding novel polypeptides, polypeptides encoded by the polynucleotides, and new uses of these.

### BACKGROUND OF THE INVENTION

[0002] Currently, the sequencing projects, the determination and analysis of the genomic DNA of various living organisms have been in progress all over the world. The whole genomic sequences of more than 40 species of prokaryotes, a lower eukaryote, yeast, a multicellular eukaryote, C. elegans, and a higher plants, arabidopsis, etc. are already determined. For human genome, presumably having 3 billion base pairs, the analysis was advanced under global cooperative organization, and a draft sequence was disclosed in 2001. Moreover, all the structures are to be clear and to be disclosed in 2002-2003. The aim of the determination of genomic sequence is to reveal the functions of all genes and their regulation and to understand living organisms as a network of interactions between genes, proteins, cells or individuals through deducing the information in a genome, which is a blueprint of the highly complicated living organisms. To understand living organisms by utilizing the genomic information from various species is not only important as an academic subject, but also socially significant from the viewpoint of industrial application.

[0003] However, determination of genomic sequences itself cannot identify the functions of all genes. For example, as for yeast, only the function of approximately half of the 6000 genes, which is predicted based on the genomic sequence, was able to be deduced. On the other hand, the human genome has been estimated to contain about 30,000-40,000 genes. Further, 100,000 or more types of mRNAs are said to exist when variants produced by alternative splicing are taken into consideration. Therefore, it is desirable to establish “a high throughput analysis system of the gene functions” which allows us to identify rapidly and efficiently the functions of vast amounts of the genes obtained by the genomic sequencing.

[0004] Many genes in the eukaryotic genome are split by introns into multiple exons. Thus, it is difficult to predict correctly the structure of encoded protein solely based on genomic information. In contrast, cDNA, which is produced from mRNA that lacks introns, encodes a protein as a single continuous amino acid sequence and allows us to identify the primary structure of the protein easily. In human cDNA research, to date, more than three million ESTs (Expression Sequence Tags) are publicly available, and the ESTs presumably cover not less than 80% of all human genes.

[0005] The information of ESTs is utilized for analyzing the structure of human genome, or for predicting the exon-regions of genomic sequences or their expression profile. However, many human ESTs have been derived from proximal regions to the 3′-end of cDNA, and information around the 5′-end of mRNA is extremely little. Among human cDNAs, the number of the corresponding mRNAs whose encoding full-length protein sequences are deduced is approximately 13,000.

[0006] It is possible to identify the transcription start site of mRNA on the genomic sequence based on the 5′-end sequence of a full-length cDNA, and to analyze factors involved in the stability of mRNA that is contained in the cDNA, or in its regulation of expression at the translation stage. Also, since a full-length cDNA contains atg codon, the translation start site, in the 5′-region, it can be translated into a protein in a correct frame. Therefore, it is possible to produce a large amount of the protein encoded by the CDNA or to analyze biological activity of the expressed protein by utilizing an appropriate expression system. Thus, analysis of a full-length cDNA provides valuable information which complements the information from genome sequencing. Also, full-length cDNA clones that can be expressed are extremely valuable in empirical analysis of gene function and in industrial application.

[0007] Therefore, if a novel human full-length cDNA is isolated, it can be used for developing medicines for diseases in which the gene is involved. The protein encoded by the gene can be used as a drug by itself. Thus, it has great significance to obtain a full-length cDNA encoding a novel human protein.

[0008] In particular, human secretory proteins or membrane proteins would be useful by itself as a medicine like tissue plasminogen activator (TPA), or as a target of medicines like membrane receptors. In addition, genes for signal transduction-related proteins (protein kinases, etc.), glycoprotein-related proteins, transcription-related proteins, etc. are genes whose relationships to human diseases have been elucidated. Moreover, genes for disease-related proteins form a gene group rich in genes whose relationships to human diseases have been elucidated.

[0009] Therefore, it has great significance to isolate novel full-length cDNA clones of human, only few of which has been isolated. Especially, isolation of a novel cDNA clone encoding a secretory protein or membrane protein is desired since the protein itself would be useful as a medicine, and also the clones potentially include a gene involved in diseases. In addition, genes encoding proteins that are involved in signal transduction, glycoprotein, transcription, or diseases are expected to be useful as target molecules for therapy, or as medicines themselves. These genes form a gene group predicted to be strongly involved in diseases. Thus, identification of the full-length cDNA clones encoding those proteins has great significance.

### SUMMARY OF THE INVENTION

[0010] An objective of the present invention is to provide polynucleotides encoding novel polypeptides, polypeptides encoded by the polynucleotides, and novel usages of these.

[0011] The inventors have developed a method for efficiently cloning, from a cDNA library having very high fullness-ratio, a human full-length cDNA that is predicted to be a full-length cDNA clone, where the CDNA library is synthesized by an improved method (WO 01/04286) of the oligo-capping method (K. Maruyama and S. Sugano, Gene, 138: 171-174 (1994); Y. Suzuki et al., Gene, 200: 149-156 (1997)). Then, the nucleotide sequences of cDNA clones whose fullness ratio is high, obtained by this method, were determined mainly from their 5′-ends, and, if required, from 3′-ends.

[0012] Further, representative clones, which were estimated to be novel and full-length, among the clones obtained, were analyzed for their full-length nucleotide sequences. The determined full-length nucleotide sequences were analyzed by BLAST homology search of the databases shown below. Because the homology search of the present invention is carried out based on the information of full-length cDNAs including the entire coding regions, homology to every part of a polypeptide can be analyzed. Thus, in the present invention, the reliability of homology search has been greatly improved.

[0013] [1] SwissProt (http://www.ebi.ac.uk/ebi_docsSwissProt_db/swisshome.html),

[0014] [2] GenBank (http://www.ncbi.nlm.nih.gov/web/GenBank),

[0015] [3] UniGene (Human) (http://www.ncbi.nlm.nih.gov/UniGene), and

[0016] [4] nr (a protein database, which has been constructed by combining data of coding sequences (CDS) in nucleotide sequences deposited in GenBank, and data of SwissProt, PDB (http://www.rcsb.org/pdb/index.html), PIR (http://pir.georgetown.edu/pirwww/pirhome.shtml), and PRF (http://www.prf.or.jp/en/); overlapping sequences have been removed.)

[0017] Further, the gene expression profiles of cDNA clones whose full-length nucleotide sequence had been determined were studied by analyzing the large-scale cDNA database constructed based on the 5′-end nucleotide sequences of cDNAs obtained. In addition to the analysis for the expression profile by computer, the profiles of gene expression in living cells were also determined by PCR. The present inventors revealed the usefulness of the genes of the present invention based on these analysis results.

[0018] In the present invention, gene functions were revealed by the analysis of expression profiles in silico based on the information of full-length nucleotide sequences. The expression profiles used in the expression frequency analysis were studied based on the database containing sufficient amount of fragment sequence data. The expression frequency analysis was carried out by referring, for these expression profiles, to the full-length nucleotide sequences of many cDNA clones obtained in the present invention. Thus, a highly reliable analysis can be achieved by referring to the full-length nucleotide sequences of a wide variety of genes for the sufficiently large population for analysis (expression profiles). Namely, the results of expression frequency analysis using the full-length sequences of the present invention more precisely reflect the gene expression frequency in tissues and cells from which a certain cDNA library was derived. In other words, the information of full-length cDNA nucleotide sequence of the present invention made it possible to achieve- the highly reliable expression frequency analysis.

[0019] The full-length cDNA clones of this invention were obtained by the method comprising the steps of [1] preparing libraries containing cDNAs with the high fullness ratio by oligo-capping, and [2] assembling 5′-end sequences and selecting one with the highest probability of completeness in length in the cluster formed (there are many clones longer in the 5′-end direction) However, the uses of -primers designed based on the 5′- and 3′-end sequences of polynucleotides provided by the present invention enable readily obtaining full-length cDNAs without such a special technique. The primer, which is designed to be used for obtaining cDNAs capable of being expressed, is not limited to the 5′- and 3′-end sequences of polynucleotide.

[0020] Specifically, the present invention relates to a polynucleotide selected from the group consisting of the following (a) to (g):

[0021] (a) a polynucleotide comprising a protein-coding region of the nucleotide sequence of any one of SEQ ID NOs shown in Table 1;

[0022] (b) a polynucleotide encoding a polypeptide comprising the amino acid sequence of any one of SEQ ID NOs shown in Table 1;

[0023] (c) a polynucleotide comprising a nucleotide sequence encoding a polypeptide comprising the amino acid sequence of any one of SEQ ID NOs shown in Table 1, wherein, in said amino acid sequence, one or more amino acids have been substituted, deleted, inserted, and/or added, and wherein said nucleotide sequence encodes a polypeptide functionally equivalent to a polypeptide comprising the selected amino acid sequence;

[0024] (d) a polynucleotide hybridizing under stringent conditions to a polynucleotide comprising the nucleotide sequence of any one of SEQ ID NOs shown in Table 1, wherein said nucleotide sequence encodes a polypeptide functionally equivalent to a polypeptide encoded by the selected nucleotide sequence;

[0025] (e) a polynucleotide comprising a nucleotide sequence encoding a partial amino acid sequence of a polypeptide encoded by the polynucleotide according to any one of (a) to (d);

[0026] (f) a polynucleotide comprising a nucleotide sequence having at least 70% identity to the nucleotide sequence of (a); and

[0027] (g) a polynucleotide comprising a nucleotide sequence having at least 90% identity to the nucleotide sequence of (a).

[0028] The present invention also relates to a polypeptide encoded by the above-mentioned polynucleotide or a partial peptide thereof, an antibody binding to the polypeptide or the peptide, and a method for immunologically assaying the polypeptide or the peptide, which comprises the steps of contacting the polypeptide or the peptide with the antibody, and observing the binding between the two.

[0029] Furthermore, the present invention features a vector comprising the above-mentioned polynucleotide, a transformant carrying the polynucleotide or the vector, a transformant carrying the polynucleotide or the vector in an expressible manner, and a method for producing the polypeptide or the peptide, which comprises the steps of culturing the transformant and recovering an expression product.

[0030] Another feature of the present invention is an oligonucleotide comprising at least 15 nucleotides, said oligonucleotide comprising a nucleotide sequence complementary to the nucleotide sequence of any one of SEQ ID NOs: 1 to 2443 or to a complementary strand thereof. This oligonucleotide can be used as a primer for synthesizing the above-mentioned polynucleotide or used as a probe for detecting the polynucleotide. The present invention includes an antisense polynucleotide against the polynucleotide or a part thereof, and a method for detecting the polynucleotide, which comprises the following steps of:

[0031] a) incubating a target polynucleotide with the oligonucleotide under hybridizable conditions, and

[0032] b) detecting hybridization of the target polynucleotide with the oligonucleotide.

[0033] Still another feature of the present invention is a database of polynucleotides and/or polypeptides, said database comprising information on at least one of the nucleotide sequences of SEQ ID NOs: 1 to 2443 and/or on at least one of the amino acid sequences of SEQ ID NOs: 2444 to 4886.

[0034] Herein, “polynucleotide” is defined as a molecule, such as DNA and RNA, in which multiple nucleotides are polymerized. There are no limitations on the number of the polymerized nucleotides. In case that the polymer contains relatively low number of nucleotides, it is also described as an “oligonucleotide”, which is included in the “polynucleotide” of the present invention. The polynucleotide or the oligonucleotide of the present invention can be a natural or chemically synthesized product. Alternatively, it can be synthesized using a template polynucleotide by an enzymatic reaction such as PCR. Furthermore, the polynucleotide of the present invention may be modified chemically. Moreover, not only a single-strand polynucleotide but also a double-strand polynucleotide is included in the present invention. In this specification, especially in claims, when the polynucleotide is described merely as “polynucleotide”, it means not only a single-strand polynucleotide but also a double-strand polynucleotide. When it means double-strand polynucleotide, the nucleotide sequence of only one chain is indicated. However, based on the nucleotide sequence of a sense chain, the nucleotide sequence of the complementary strand thereof is essentially determined.

[0035] As used herein, an “isolated polynucleotide” is a polynucleotide the structure of which is not identical to that of any naturally occurring polynucleotide or to that of any fragment of a naturally occurring genomic polynucleotide spanning more than three separate genes. The term therefore includes, for example, (a) a DNA which has the sequence of part of a naturally occurring genomic DNA molecule in the genome of the organism in which it naturally occurs; (b) a polynucleotide incorporated into a vector or into the genomic DNA of a prokaryote or eukaryote in a manner such that the resulting molecule is not identical to any naturally occurring vector or genomic DNA; (c) a separate molecule such as a cDNA, a genomic fragment, a fragment produced by polymerase chain reaction (PCR), or a restriction fragment; and (d) a recombinant nucleotide sequence that is part of a hybrid gene, i.e., a gene encoding a fusion polypeptide. Specifically excluded from this definition are polynucleotides of DNA molecules present in mixtures of different (i) DNA molecules, (ii) transfected cells, or (iii) cell clones; e.g., as these occur in a DNA library such as a cDNA or genomic DNA library.

[0036] The term “substantially pure” as used herein in reference to a given protein or polypeptide means that the protein or polypeptide is substantially free from other biological macromolecules. For example, the substantially pure protein or polypeptide is at least 75%, 80%, 85%, 95%, or 99% pure by dry weight. Purity can be measured by any appropriate standard method known in the art, for example, by column chromatography, polyacrylamide gel electrophoresis, or HPLC analysis.

[0037] All the cDNAs provided by the present invention are full-length cDNAs. The “full-length cDNA” herein means that the cDNA contains the ATG codon, which is the start point of translation therein. The untranslated regions upstream and downstream of the protein-coding region, both of which are naturally contained in natural mRNAs, are not indispensable. It is preferable that the full-length cDNAs of the present invention contain the stop codon.

### BRIEF DESCRIPTION OF THE DRAWINGS

[0038] FIG. 1 shows the restriction map of the vector pME18SFL3.

### DETAILED DESCRIPTION OF THE INVENTION

[0039] All the clones (2443 clones) of the present invention are novel and encode the full-length polypeptides. Further, all the clones are cDNAs with the high fullness ratio, which were obtained by oligo-capping method, and also clones which are not identical to any of known human mRNAs (namely, novel clones) selected by searching, for the 5′-end sequences, mRNA sequences with the annotation of “complete cds” in the GenBank and UniGene databases by using the BLAST homology search [S. F. Altschul, W. Gish, W. Miller, E. W. Myers & D. J. Lipman, J. Mol. Biol., 215: 403-410 (1990); W. Gish & D. J. States, Nature Genet., 3: 266-272 (1993)]; they are also clones that were assumed to have higher fullness ratio among the members in the cluster formed by assembling. Most of the clones assessed to have high fullness ratio in the cluster had the nucleotide sequences longer in the 5′-end direction.

[0040] All the full-length cDNAs of the present invention can be synthesized by a method such as PCR (Current protocols in Molecular Biology edit. Ausubel et al. (1987) Publish. John Wiley & Sons Section 6.1-6.4) using primer sets designed based on the 5′-end and 3′-end sequences or using primer sets of primers designed based on the 5′-end sequences and a primer of oligo dT sequence corresponding to poly A sequence. Table 1 contains the clone names of full-length cDNA of 2443 clones of the present invention, SEQ ID NOs of the full-length nucleotide sequences, CDS portions deduced from the full-length nucleotide sequences, and SEQ ID NOs of the translated amino acids. The positions of CDS are shown according to the rule of “DDBJ/EMBL/GenBank Feature Table Definition” (http://www.ncbi.nlm.nih.gov/collab/FT/index.html). The start position number corresponds to the first letter of “ATG” that is the nucleotide triplet encoding methionine; the termination position number corresponds to the third letter of the stop codon. These are indicated being flanked with the mark “..”. However, with respect to the clones having no stop codon, the termination position is indicated by the mark “>” according to the above rule.

TABLE 1

| | SEQ ID NO. | | SEQ ID NO. |
|---|---|---|---|
| Clone | of nucleotide | Position | of amino acid |
| name | sequence | of CDS | sequence |
| 3NB6910001910 | 1 | 30 . . . 1661 | 2444 |
| 3NB6920014080 | 2 | 80 . . . 922 | 2445 |
| 3NB6920014590 | 3 | 1 . . . 693 | 2446 |
| ADIPS10000640 | 4 | 127 . . . 1098 | 2447 |
| ADIPS20004250 | 5 | 170 . . . 2212 | 2448 |
| ADRGL10001470 | 6 | 368 . . . 829 | 2449 |
| ADRGL20000640 | 7 | 599 . . . 1345 | 2450 |
| ADRGL20011190 | 8 | 61 . . . >2254 | 2451 |
| ADRGL20012870 | 9 | 827 . . . 1300 | 2452 |
| ADRGL20013010 | 10 | 1127 . . . 1444 | 2453 |
| ADRGL20013520 | 11 | 226 . . . 837 | 2454 |
| ADRGL20018300 | 12 | 320 . . . 2233 | 2455 |
| ADRGL20018540 | 13 | 55 . . . 363 | 2456 |
| ADRGL20028570 | 14 | 218 . . . 976 | 2457 |
| ADRGL20035850 | 15 | 55 . . . 522 | 2458 |
| ADRGL20044590 | 16 | 692 . . . 1042 | 2459 |
| ADRGL20048330 | 17 | 189 . . . 2204 | 2460 |
| ADRGL20061930 | 18 | 293 . . . >1899 | 2461 |
| ADRGL20067670 | 19 | 108 . . . 512 | 2462 |
| ADRGL20068170 | 20 | 217 . . . 615 | 2463 |
| ADRGL20068460 | 21 | 576 . . . 1280 | 2464 |
| ADRGL20073570 | 22 | 556 . . . 891 | 2465 |
| ADRGL20076360 | 23 | 159 . . . 515 | 2466 |
| ADRGL20078100 | 24 | 418 . . . 1563 | 2467 |
| ADRGL20083310 | 25 | 871 . . . 1368 | 2468 |
| ASTRO10001650 | 26 | 369 . . . 2168 | 2469 |
| ASTRO20001410 | 27 | 319 . . . 744 | 2470 |
| ASTRO20005330 | 28 | 196 . . . 642 | 2471 |
| ASTRO20008010 | 29 | 735 . . . 1169 | 2472 |
| ASTRO20012490 | 30 | 286 . . . 783 | 2473 |
| ASTRO20027430 | 31 | 129 . . . 848 | 2474 |
| ASTRO20032120 | 32 | 860 . . . 1189 | 2475 |
| ASTRO20033160 | 33 | 139 . . . 1014 | 2476 |
| ASTRO20055750 | 34 | 16 . . . 2007 | 2477 |
| ASTRO20058630 | 35 | 28 . . . 957 | 2478 |
| ASTRO20064750 | 36 | 1381 . . . >2654 | 2479 |
| ASTRO20072210 | 37 | 274 . . . >1868 | 2480 |
| ASTRO20084250 | 38 | 35 . . . 1381 | 2481 |
| ASTRO20100720 | 39 | 394 . . . 714 | 2482 |
| ASTRO20105820 | 40 | 205 . . . 1368 | 2483 |
| ASTRO20106150 | 41 | 138 . . . 1811 | 2484 |
| ASTRO20108190 | 42 | 791 . . . 2539 | 2485 |
| ASTRO20111490 | 43 | 517 . . . 921 | 2486 |
| ASTRO20114370 | 44 | 145 . . . 1782 | 2487 |
| ASTRO20114610 | 45 | 53 . . . 433 | 2488 |
| ASTRO20125520 | 46 | 1674 . . . 2456 | 2489 |
| ASTRO20130500 | 47 | 15 . . . 2417 | 2490 |
| ASTRO20136710 | 48 | 319 . . . 657 | 2491 |
| ASTRO20138020 | 49 | 285 . . . 995 | 2492 |
| ASTRO20141350 | 50 | 394 . . . 1767 | 2493 |
| ASTRO20143630 | 51 | 103 . . . 1305 | 2494 |
| ASTRO20145760 | 52 | 347 . . . 2008 | 2495 |
| ASTRO20152140 | 53 | 760 . . . 1233 | 2496 |
| ASTRO20155290 | 54 | 208 . . . 2298 | 2497 |
| ASTRO20166810 | 55 | 7 . . . 381 | 2498 |
| ASTRO20168470 | 56 | 334 . . . 1329 | 2499 |
| ASTRO20173480 | 57 | 119 . . . 724 | 2500 |
| ASTRO20181690 | 58 | 84 . . . 1967 | 2501 |
| ASTRO20190390 | 59 | 2282 . . . 2662 | 2502 |
| BEAST20004540 | 60 | 1022 . . . 1513 | 2503 |
| BGGI110000240 | 61 | 123 . . . 1649 | 2504 |
| BGGI110001930 | 62 | 81 . . . 1307 | 2505 |
| BGGI120006160 | 63 | 6 . . . 680 | 2506 |
| BLADE20003400 | 64 | 71 . . . 1876 | 2507 |
| BLADE20003890 | 65 | 555 . . . 2405 | 2508 |
| BLADE20004630 | 66 | 58 . . . 405 | 2509 |
| BNGH420088500 | 67 | 2 . . . 1270 | 2510 |
| BRACE20003070 | 68 | 310 . . . 1563 | 2511 |
| BRACE20006400 | 69 | 32 . . . 364 | 2512 |
| BRACE20011070 | 70 | 21 . . . 1553 | 2513 |
| BRACE20019540 | 71 | 538 . . . 993 | 2514 |
| BRACE20027620 | 72 | 24 . . . 1289 | 2515 |
| BRACE20037660 | 73 | 143 . . . 469 | 2516 |
| BRACE20038000 | 74 | 646 . . . 2187 | 2517 |
| BRACE20038470 | 75 | 963 . . . 1307 | 2518 |
| BRACE20038480 | 76 | 1838 . . . 2626 | 2519 |
| BRACE20038850 | 77 | 1099 . . . 1413 | 2520 |
| BRACE20039040 | 78 | 1273 . . . 1671 | 2521 |
| BRACE20039440 | 79 | 216 . . . 797 | 2522 |
| BRACE20039540 | 80 | 1153 . . . 1905 | 2523 |
| BRACE20050900 | 81 | 115 . . . 1788 | 2524 |
| BRACE20051380 | 82 | 1433 . . . 1783 | 2525 |
| BRACE20051690 | 83 | 380 . . . 742 | 2526 |
| BRACE20052160 | 84 | 20 . . . 1024 | 2527 |
| BRACE20053280 | 85 | 736 . . . 1524 | 2528 |
| BRACE20053480 | 86 | 24 . . . 875 | 2529 |
| BRACE20053630 | 87 | 81 . . . 950 | 2530 |
| BRACE20054500 | 88 | 364 . . . 669 | 2531 |
| BRACE20055180 | 89 | 156 . . . 656 | 2532 |
| BRACE20056810 | 90 | 338 . . . 940 | 2533 |
| BRACE20057190 | 91 | 1016 . . . 1660 | 2534 |
| BRACE20057420 | 92 | 539 . . . 856 | 2535 |
| BRACE20057620 | 93 | 1226 . . . 1588 | 2536 |
| BRACE20057730 | 94 | 819 . . . 1592 | 2537 |
| BRACE20058580 | 95 | 146 . . . 1330 | 2538 |
| BRACE20058810 | 96 | 40 . . . 345 | 2539 |
| BRACE20059370 | 97 | 192 . . . 1574 | 2540 |
| BRACE20060550 | 98 | 197 . . . 1687 | 2541 |
| BRACE20060720 | 99 | 220 . . . 618 | 2542 |
| BRACE20060840 | 100 | 37 . . . 927 | 2543 |
| BRACE20060890 | 101 | 170 . . . 964 | 2544 |
| BRACE20061050 | 102 | 1130 . . . 1573 | 2545 |
| BRACE20061740 | 103 | 434 . . . 865 | 2546 |
| BRACE20062400 | 104 | 1310 . . . 1732 | 2547 |
| BRACE20062640 | 105 | 278 . . . 2089 | 2548 |
| BRACE20062740 | 106 | 753 . . . 1151 | 2549 |
| BRACE20063630 | 107 | 414 . . . 800 | 2550 |
| BRACE20063780 | 108 | 11 . . . 892 | 2551 |
| BRACE20063800 | 109 | 70 . . . 435 | 2552 |
| BRACE20063930 | 110 | 1795 . . . 2433 | 2553 |
| BRACE20064880 | 111 | 365 . . . 1420 | 2554 |
| BRACE20067430 | 112 | 875 . . . 1189 | 2555 |
| BRACE20068590 | 113 | 260 . . . 1759 | 2556 |
| BRACE20069090 | 114 | 1484 . . . 1960 | 2557 |
| BRACE20081720 | 115 | 1182 . . . 1565 | 2558 |
| BRACE20082950 | 116 | 1713 . . . 2018 | 2559 |
| BRACE20090440 | 117 | 58 . . . 444 | 2560 |
| BRACE20096200 | 118 | 168 . . . 1130 | 2561 |
| BRACE20096540 | 119 | 43 . . . 729 | 2562 |
| BRACE20097320 | 120 | 51 . . . 509 | 2563 |
| BRACE20099570 | 121 | 3 . . . 425 | 2564 |
| BRACE20101700 | 122 | 579 . . . 968 | 2565 |
| BRACE20101710 | 123 | 187 . . . 681 | 2566 |
| BRACE20106690 | 124 | 335 . . . 691 | 2567 |
| BRACE20106840 | 125 | 19 . . . 402 | 2568 |
| BRACE20107530 | 126 | 437 . . . 1063 | 2569 |
| BRACE20108130 | 127 | 927 . . . 1229 | 2570 |
| BRACE20108880 | 128 | 417 . . . 782 | 2571 |
| BRACE20109370 | 129 | 1197 . . . 1778 | 2572 |
| BRACE20109830 | 130 | 747 . . . 1382 | 2573 |
| BRACE20111830 | 131 | 366 . . . 737 | 2574 |
| BRACE20114780 | 132 | 515 . . . 886 | 2575 |
| BRACE20115450 | 133 | 399 . . . 764 | 2576 |
| BRACE20115920 | 134 | 41 . . . 937 | 2577 |
| BRACE20116110 | 135 | 830 . . . 1150 | 2578 |
| BRACE20116460 | 136 | 84 . . . 509 | 2579 |
| BRACE20118380 | 137 | 657 . . . 1421 | 2580 |
| BRACE20121850 | 138 | 474 . . . 857 | 2581 |
| BRACE20136240 | 139 | 111 . . . 518 | 2582 |
| BRACE20141080 | 140 | 148 . . . 534 | 2583 |
| BRACE20142320 | 141 | 164 . . . 499 | 2584 |
| BRACE20142570 | 142 | 591 . . . 926 | 2585 |
| BRACE20147800 | 143 | 133 . . . 513 | 2586 |
| BRACE20148210 | 144 | 1101 . . . 1541 | 2587 |
| BRACE20148240 | 145 | 713 . . . 2128 | 2588 |
| BRACE20150310 | 146 | 94 . . . 408 | 2589 |
| BRACE20151320 | 147 | 137 . . . 1189 | 2590 |
| BRACE20152870 | 148 | 207 . . . 653 | 2591 |
| BRACE20153680 | 149 | 87 . . . 956 | 2592 |
| BRACE20154120 | 150 | 351 . . . 989 | 2593 |
| BRACE20163150 | 151 | 699 . . . 1085 | 2594 |
| BRACE20163350 | 152 | 443 . . . 1597 | 2595 |
| BRACE20165830 | 153 | 401 . . . 709 | 2596 |
| BRACE20171240 | 154 | 62 . . . 439 | 2597 |
| BRACE20172980 | 155 | 20 . . . 445 | 2598 |
| BRACE20175870 | 156 | 67 . . . 396 | 2599 |
| BRACE20177200 | 157 | 1178 . . . 1675 | 2600 |
| BRACE20179340 | 158 | 47 . . . 1171 | 2601 |
| BRACE20185680 | 159 | 880 . . . 1341 | 2602 |
| BRACE20188470 | 160 | 1247 . . . 2926 | 2603 |
| BRACE20190040 | 161 | 6 . . . 464 | 2604 |
| BRACE20190440 | 162 | 382 . . . 1287 | 2605 |
| BRACE20192440 | 163 | 1199 . . . 2062 | 2606 |
| BRACE20195100 | 164 | 251 . . . 736 | 2607 |
| BRACE20201570 | 165 | 661 . . . 1056 | 2608 |
| BRACE20210140 | 166 | 248 . . . 550 | 2609 |
| BRACE20220300 | 167 | 1057 . . . 1392 | 2610 |
| BRACE20223280 | 168 | 6 . . . 1976 | 2611 |
| BRACE20223330 | 169 | 97 . . . 2373 | 2612 |
| BRACE20224480 | 170 | 1568 . . . 1924 | 2613 |
| BRACE20224500 | 171 | 1674 . . . 2081 | 2614 |
| BRACE20228480 | 172 | 1268 . . . 2176 | 2615 |
| BRACE20229280 | 173 | 239 . . . 700 | 2616 |
| BRACE20230700 | 174 | 354 . . . 752 | 2617 |
| BRACE20232840 | 175 | 79 . . . 2019 | 2618 |
| BRACE20235400 | 176 | 213 . . . 593 | 2619 |
| BRACE20237270 | 177 | 3 . . . 494 | 2620 |
| BRACE20238000 | 178 | 135 . . . 437 | 2621 |
| BRACE20240740 | 179 | 83 . . . 1546 | 2622 |
| BRACE20248260 | 180 | 682 . . . 1533 | 2623 |
| BRACE20253160 | 181 | 26 . . . 559 | 2624 |
| BRACE20253330 | 182 | 220 . . . 1041 | 2625 |
| BRACE20257100 | 183 | 1638 . . . 2021 | 2626 |
| BRACE20262930 | 184 | 256 . . . 681 | 2627 |
| BRACE20262940 | 185 | 259 . . . 591 | 2628 |
| BRACE20266750 | 186 | 58 . . . 1143 | 2629 |
| BRACE20267250 | 187 | 139 . . . 612 | 2630 |
| BRACE20269200 | 188 | 4 . . . 408 | 2631 |
| BRACE20269710 | 189 | 338 . . . 1063 | 2632 |
| BRACE20273890 | 190 | 1365 . . . 1766 | 2633 |
| BRACE20274080 | 191 | 350 . . . 655 | 2634 |
| BRACE20276430 | 192 | 232 . . . >2028 | 2635 |
| BRACE20283920 | 193 | 717 . . . 1025 | 2636 |
| BRACE20284100 | 194 | 1026 . . . 1865 | 2637 |
| BRACE20286360 | 195 | 170 . . . 727 | 2638 |
| BRACE20287410 | 196 | 603 . . . 956 | 2639 |
| BRALZ20013500 | 197 | 215 . . . 640 | 2640 |
| BRALZ20014450 | 198 | 6 . . . 374 | 2641 |
| BRALZ20017430 | 199 | 232 . . . 747 | 2642 |
| BRALZ20018340 | 200 | 879 . . . 1481 | 2643 |
| BRALZ20019660 | 201 | 180 . . . 773 | 2644 |
| BRALZ20054710 | 202 | 135 . . . 1223 | 2645 |
| BRALZ20058880 | 203 | 102 . . . 1607 | 2646 |
| BRALZ20059500 | 204 | 722 . . . 1081 | 2647 |
| BRALZ20064740 | 205 | 24 . . . 350 | 2648 |
| BRALZ20065600 | 206 | 25 . . . 624 | 2649 |
| BRALZ20069760 | 207 | 14 . . . 319 | 2650 |
| BRALZ20073760 | 208 | 576 . . . 1124 | 2651 |
| BRALZ20075450 | 209 | 775 . . . 1200 | 2652 |
| BRALZ20075760 | 210 | 148 . . . 726 | 2653 |
| BRALZ20077900 | 211 | 1900 . . . 2529 | 2654 |
| BRALZ20077930 | 212 | 50 . . . 2077 | 2655 |
| BRALZ20080310 | 213 | 1304 . . . 2005 | 2656 |
| BRALZ20088690 | 214 | 104 . . . 661 | 2657 |
| BRAMY10001300 | 215 | 2352 . . . 2795 | 2658 |
| BRAMY10001570 | 216 | 696 . . . 1604 | 2659 |
| BRAMY20000520 | 217 | 329 . . . 1204 | 2660 |
| BRAMY20000860 | 218 | 246 . . . 548 | 2661 |
| BRAMY20002770 | 219 | 76 . . . 447 | 2662 |
| BRAMY20004110 | 220 | 145 . . . 540 | 2663 |
| BRAMY20011140 | 221 | 2661 . . . 3011 | 2664 |
| BRAMY20025840 | 222 | 1058 . . . 2002 | 2665 |
| BRAMY20039260 | 223 | 101 . . . 424 | 2666 |
| BRAMY20045240 | 224 | 662 . . . 1792 | 2667 |
| BRAMY20054880 | 225 | 508 . . . 981 | 2668 |
| BRAMY20060920 | 226 | 110 . . . 439 | 2669 |
| BRAMY20063970 | 227 | 246 . . . 551 | 2670 |
| BRAMY20071850 | 228 | 178 . . . 705 | 2671 |
| BRAMY20102080 | 229 | 513 . . . 1136 | 2672 |
| BRAMY20103570 | 230 | 114 . . . 1001 | 2673 |
| BRAMY20104640 | 231 | 334 . . . 1410 | 2674 |
| BRAMY20110640 | 232 | 1400 . . . 1735 | 2675 |
| BRAMY20111960 | 233 | 534 . . . 854 | 2676 |
| BRAMY20112800 | 234 | 31 . . . 606 | 2677 |
| BRAMY20116790 | 235 | 2348 . . . 2794 | 2678 |
| BRAMY20120910 | 236 | 182 . . . 976 | 2679 |
| BRAMY20121190 | 237 | 81 . . . 398 | 2680 |
| BRAMY20121620 | 238 | 51 . . . 1688 | 2681 |
| BRAMY20124260 | 239 | 95 . . . 1759 | 2682 |
| BRAMY20134140 | 240 | 1 . . . 510 | 2683 |
| BRAMY20135900 | 241 | 4 . . . 1053 | 2684 |
| BRAMY20136210 | 242 | 1810 . . . 2145 | 2685 |
| BRAMY20137560 | 243 | 2220 . . . 2795 | 2686 |
| BRAMY20144620 | 244 | 892 . . . 1326 | 2687 |
| BRAMY20147540 | 245 | 147 . . . 611 | 2688 |
| BRAMY20148130 | 246 | 204 . . . 2138 | 2689 |
| BRAMY20152110 | 247 | 1257 . . . 1580 | 2690 |
| BRAMY20153110 | 248 | 11 . . . 763 | 2691 |
| BRAMY20157820 | 249 | 94 . . . 1740 | 2692 |
| BRAMY20160700 | 250 | 1686 . . . 2015 | 2693 |
| BRAMY20162510 | 251 | 186 . . . 1757 | 2694 |
| BRAMY20163250 | 252 | 96 . . . 719 | 2695 |
| BRAMY20163270 | 253 | 531 . . . 1010 | 2696 |
| BRAMY20167060 | 254 | 347 . . . 865 | 2697 |
| BRAMY20167710 | 255 | 900 . . . 1532 | 2698 |
| BRAMY20168920 | 256 | 91 . . . 1275 | 2699 |
| BRAMY20170140 | 257 | 115 . . . 681 | 2700 |
| BRAMY20174550 | 258 | 74 . . . 2179 | 2701 |
| BRAMY20178640 | 259 | 226 . . . 2025 | 2702 |
| BRAMY20181220 | 260 | 678 . . . 980 | 2703 |
| BRAMY20182730 | 261 | 208 . . . 738 | 2704 |
| BRAMY20183080 | 262 | 213 . . . 653 | 2705 |
| BRAMY20184670 | 263 | 871 . . . 1548 | 2706 |
| BRAMY20195090 | 264 | 2087 . . . 2476 | 2707 |
| BRAMY20196000 | 265 | 50 . . . 439 | 2708 |
| BRAMY20204450 | 266 | 34 . . . 462 | 2709 |
| BRAMY20205740 | 267 | 177 . . . 554 | 2710 |
| BRAMY20210400 | 268 | 131 . . . 703 | 2711 |
| BRAMY20211390 | 269 | 1407 . . . 2303 | 2712 |
| BRAMY20211420 | 270 | 131 . . . 2407 | 2713 |
| BRAMY20213100 | 271 | 245 . . . 2026 | 2714 |
| BRAMY20215230 | 272 | 207 . . . 515 | 2715 |
| BRAMY20217460 | 273 | 612 . . . 1217 | 2716 |
| BRAMY20218250 | 274 | 161 . . . 2167 | 2717 |
| BRAMY20218670 | 275 | 338 . . . 652 | 2718 |
| BRAMY20229800 | 276 | 1270 . . . 1662 | 2719 |
| BRAMY20229840 | 277 | 1022 . . . 1678 | 2720 |
| BRAMY20230600 | 278 | 614 . . . 1840 | 2721 |
| BRAMY20231720 | 279 | 429 . . . 773 | 2722 |
| BRAMY20240040 | 280 | 693 . . . 2660 | 2723 |
| BRAMY20242470 | 281 | 1527 . . . 2243 | 2724 |
| BRAMY20245300 | 282 | 59 . . . 2482 | 2725 |
| BRAMY20247110 | 283 | 321 . . . 1382 | 2726 |
| BRAMY20247280 | 284 | 611 . . . 925 | 2727 |
| BRAMY20248490 | 285 | 1723 . . . 2079 | 2728 |
| BRAMY20250240 | 286 | 1179 . . . 1619 | 2729 |
| BRAMY20250320 | 287 | 18 . . . 323 | 2730 |
| BRAMY20252180 | 288 | 1150 . . . 1506 | 2731 |
| BRAMY20252720 | 289 | 595 . . . 1113 | 2732 |
| BRAMY20260910 | 290 | 67 . . . 2646 | 2733 |
| BRAMY20261680 | 291 | 298 . . . 1041 | 2734 |
| BRAMY20266850 | 292 | 26 . . . 685 | 2735 |
| BRAMY20267130 | 293 | 235 . . . 708 | 2736 |
| BRAMY20268990 | 294 | 137 . . . 460 | 2737 |
| BRAMY20270730 | 295 | 124 . . . 2118 | 2738 |
| BRAMY20271400 | 296 | 177 . . . >3011 | 2739 |
| BRAMY20273960 | 297 | 48 . . . 1826 | 2740 |
| BRAMY20277140 | 298 | 1135 . . . 1485 | 2741 |
| BRAMY20277170 | 299 | 545 . . . 2221 | 2742 |
| BRAMY20280720 | 300 | 103 . . . 489 | 2743 |
| BRAMY20284910 | 301 | 1059 . . . 1415 | 2744 |
| BRAMY20285160 | 302 | 1483 . . . 1977 | 2745 |
| BRAMY20285930 | 303 | 811 . . . 1143 | 2746 |
| BRAMY20286820 | 304 | 1463 . . . 1777 | 2747 |
| BRAWH10000930 | 305 | 843 . . . 1454 | 2748 |
| BRAWH20002320 | 306 | 162 . . . 716 | 2749 |
| BRAWH20004600 | 307 | 66 . . . 1361 | 2750 |
| BRAWH20011710 | 308 | 229 . . . 1872 | 2751 |
| BRAWH20012390 | 309 | 71 . . . 562 | 2752 |
| BRAWH20012410 | 310 | 291 . . . 593 | 2753 |
| BRAWH20014920 | 311 | 353 . . . 1378 | 2754 |
| BRAWH20015350 | 312 | 1285 . . . 1641 | 2755 |
| BRAWH20015890 | 313 | 806 . . . 1837 | 2756 |
| BRAWH20016620 | 314 | 1721 . . . 2254 | 2757 |
| BRAWH20016660 | 315 | 51 . . . 1205 | 2758 |
| BRAWH20016860 | 316 | 548 . . . 877 | 2759 |
| BRAWH20017010 | 317 | 155 . . . 628 | 2760 |
| BRAWH20018730 | 318 | 56 . . . 1570 | 2761 |
| BRAWH20028110 | 319 | 123 . . . 1718 | 2762 |
| BRAWH20029630 | 320 | 929 . . . 1276 | 2763 |
| BRAWH20030250 | 321 | 264 . . . 1421 | 2764 |
| BRAWH20064050 | 322 | 272 . . . 1591 | 2765 |
| BRAWH20075700 | 323 | 349 . . . 1407 | 2766 |
| BRAWH20096780 | 324 | 272 . . . 1840 | 2767 |
| BRAWH20100690 | 325 | 1430 . . . 1849 | 2768 |
| BRAWH20101360 | 326 | 163 . . . 852 | 2769 |
| BRAWH20103180 | 327 | 1081 . . . 1659 | 2770 |
| BRAWH20103290 | 328 | 71 . . . 2626 | 2771 |
| BRAWH20105840 | 329 | 139 . . . 1083 | 2772 |
| BRAWH20106180 | 330 | 628 . . . 933 | 2773 |
| BRAWH20107540 | 331 | 1 . . . 540 | 2774 |
| BRAWH20110660 | 332 | 156 . . . 578 | 2775 |
| BRAWH20110790 | 333 | 1994 . . . 2338 | 2776 |
| BRAWH20110960 | 334 | 74 . . . 1210 | 2777 |
| BRAWH20111550 | 335 | 569 . . . 949 | 2778 |
| BRAWH20112940 | 336 | 850 . . . 1968 | 2779 |
| BRAWH20113430 | 337 | 135 . . . 869 | 2780 |
| BRAWH20114000 | 338 | 72 . . . 1619 | 2781 |
| BRAWH20117950 | 339 | 465 . . . 1568 | 2782 |
| BRAWH20118230 | 340 | 146 . . . 565 | 2783 |
| BRAWH20121640 | 341 | 98 . . . 1516 | 2784 |
| BRAWH20122580 | 342 | 104 . . . 721 | 2785 |
| BRAWH20122770 | 343 | 1283 . . . 1612 | 2786 |
| BRAWH20125380 | 344 | 382 . . . 918 | 2787 |
| BRAWH20126190 | 345 | 154 . . . 459 | 2788 |
| BRAWH20126980 | 346 | 222 . . . 686 | 2789 |
| BRAWH20128270 | 347 | 295 . . . 1020 | 2790 |
| BRAWH20132190 | 348 | 157 . . . 561 | 2791 |
| BRAWH20137480 | 349 | 273 . . . 1313 | 2792 |
| BRAWH20138660 | 350 | 261 . . . 1376 | 2793 |
| BRAWH20139410 | 351 | 13 . . . 354 | 2794 |
| BRAWH20142340 | 352 | 99 . . . 413 | 2795 |
| BRAWH20147290 | 353 | 460 . . . 810 | 2796 |
| BRAWH20149340 | 354 | 442 . . . 1620 | 2797 |
| BRAWH20155950 | 355 | 8 . . . 2074 | 2798 |
| BRAWH20158530 | 356 | 138 . . . 1136 | 2799 |
| BRAWH20160280 | 357 | 2093 . . . 2587 | 2800 |
| BRAWH20162690 | 358 | 33 . . . 1085 | 2801 |
| BRAWH20164460 | 359 | 345 . . . >2067 | 2802 |
| BRAWH20166790 | 360 | 224 . . . 571 | 2803 |
| BRAWH20171030 | 361 | 152 . . . 1996 | 2804 |
| BRAWH20173050 | 362 | 1272 . . . 1604 | 2805 |
| BRAWH20182060 | 363 | 118 . . . 1740 | 2806 |
| BRAWH20185060 | 364 | 248 . . . 607 | 2807 |
| BRCAN10001490 | 365 | 60 . . . 452 | 2808 |
| BRCAN20003460 | 366 | 239 . . . 1030 | 2809 |
| BRCAN20006200 | 367 | 908 . . . 1234 | 2810 |
| BRCAN20006390 | 368 | 252 . . . 743 | 2811 |
| BRCAN20054490 | 369 | 345 . . . 1067 | 2812 |
| BRCAN20060190 | 370 | 206 . . . 595 | 2813 |
| BRCAN20064010 | 371 | 134 . . . 685 | 2814 |
| BRCAN20071190 | 372 | 192 . . . 1586 | 2815 |
| BRCAN20091560 | 373 | 190 . . . 2004 | 2816 |
| BRCAN20103740 | 374 | 207 . . . 530 | 2817 |
| BRCAN20124080 | 375 | 187 . . . 2079 | 2818 |
| BRCAN20126130 | 376 | 580 . . . 897 | 2819 |
| BRCAN20143700 | 377 | 14 . . . 817 | 2820 |
| BRCAN20147880 | 378 | 121 . . . 519 | 2821 |
| BRCAN20216690 | 379 | 66 . . . 383 | 2822 |
| BRCAN20224720 | 380 | 549 . . . 1544 | 2823 |
| BRCAN20237240 | 381 | 23 . . . 796 | 2824 |
| BRCAN20263400 | 382 | 316 . . . 729 | 2825 |
| BRCAN20273100 | 383 | 76 . . . 468 | 2826 |
| BRCAN20273340 | 384 | 50 . . . 352 | 2827 |
| BRCAN20273550 | 385 | 652 . . . 1848 | 2828 |
| BRCAN20273640 | 386 | 131 . . . 1201 | 2829 |
| BRCAN20275130 | 387 | 374 . . . 847 | 2830 |
| BRCAN20279700 | 388 | 2372 . . . 2839 | 2831 |
| BRCAN20280210 | 389 | 644 . . . 1393 | 2832 |
| BRCAN20280360 | 390 | 265 . . . 1548 | 2833 |
| BRCAN20280400 | 391 | 1280 . . . 1618 | 2834 |
| BRCAN20283190 | 392 | 416 . . . 1321 | 2835 |
| BRCAN20283380 | 393 | 93 . . . 533 | 2836 |
| BRCAN20284600 | 394 | 97 . . . 549 | 2837 |
| BRCAN20285450 | 395 | 118 . . . 567 | 2838 |
| BRCOC10000870 | 396 | 186 . . . 602 | 2839 |
| BRCOC20001860 | 397 | 1061 . . . 2179 | 2840 |
| BRCOC20004040 | 398 | 383 . . . 1171 | 2841 |
| BRCOC20004870 | 399 | 199 . . . 765 | 2842 |
| BRCOC20006370 | 400 | 21 . . . 455 | 2843 |
| BRCOC20008160 | 401 | 166 . . . >2490 | 2844 |
| BRCOC20008500 | 402 | 151 . . . >2854 | 2845 |
| BRCOC20020850 | 403 | 1371 . . . 1820 | 2846 |
| BRCOC20021550 | 404 | 1121 . . . 2110 | 2847 |
| BRCOC20023230 | 405 | 682 . . . 1500 | 2848 |
| BRCOC20026640 | 406 | 148 . . . 516 | 2849 |
| BRCOC20027510 | 407 | 369 . . . 1088 | 2850 |
| BRCOC20031000 | 408 | 207 . . . 581 | 2851 |
| BRCOC20031250 | 409 | 799 . . . 1122 | 2852 |
| BRCOC20031870 | 410 | 375 . . . 1031 | 2853 |
| BRCOC20035130 | 411 | 171 . . . 527 | 2854 |
| BRCOC20037320 | 412 | 547 . . . 3384 | 2855 |
| BRCOC20037400 | 413 | 152 . . . 493 | 2856 |
| BRCOC20041750 | 414 | 230 . . . 535 | 2857 |
| BRCOC20055420 | 415 | 99 . . . 1556 | 2858 |
| BRCOC20059510 | 416 | 199 . . . 582 | 2859 |
| BRCOC20074760 | 417 | 10 . . . >1918 | 2860 |
| BRCOC20077690 | 418 | 867 . . . 1202 | 2861 |
| BRCOC20078640 | 419 | 849 . . . 1208 | 2862 |
| BRCOC20090520 | 420 | 1157 . . . 1663 | 2863 |
| BRCOC20091960 | 421 | 1371 . . . 1895 | 2864 |
| BRCOC20093800 | 422 | 204 . . . 590 | 2865 |
| BRCOC20099370 | 423 | 1 . . . 1890 | 2866 |
| BRCOC20101230 | 424 | 94 . . . 810 | 2867 |
| BRCOC20105100 | 425 | 2393 . . . 2716 | 2868 |
| BRCOC20107300 | 426 | 709 . . . 1086 | 2869 |
| BRCOC20110100 | 427 | 369 . . . 713 | 2870 |
| BRCOC20114180 | 428 | 167 . . . 487 | 2871 |
| BRCOC20117690 | 429 | 152 . . . 781 | 2872 |
| BRCOC20119960 | 430 | 147 . . . 500 | 2873 |
| BRCOC20121720 | 431 | 26 . . . 2983 | 2874 |
| BRCOC20122290 | 432 | 92 . . . 448 | 2875 |
| BRCOC20128130 | 433 | 150 . . . 1364 | 2876 |
| BRCOC20134480 | 434 | 587 . . . 1060 | 2877 |
| BRCOC20135730 | 435 | 1603 . . . 2064 | 2878 |
| BRCOC20136750 | 436 | 2876 . . . 3229 | 2879 |
| BRCOC20144000 | 437 | 64 . . . 459 | 2880 |
| BRCOC20147480 | 438 | 228 . . . 578 | 2881 |
| BRCOC20148330 | 439 | 169 . . . 1290 | 2882 |
| BRCOC20155970 | 440 | 111 . . . 632 | 2883 |
| BRCOC20158240 | 441 | 1357 . . . 2178 | 2884 |
| BRCOC20176520 | 442 | 185 . . . 1153 | 2885 |
| BRCOC20178270 | 443 | 244 . . . 1257 | 2886 |
| BRCOC20178560 | 444 | 65 . . . 1000 | 2887 |
| BRHIP10001290 | 445 | 838 . . . 1731 | 2888 |
| BRHIP10001740 | 446 | 148 . . . 594 | 2889 |
| BRHIP20000870 | 447 | 1235 . . . 1540 | 2890 |
| BRHIP20001630 | 448 | 287 . . . 1486 | 2891 |
| BRHIP20003120 | 449 | 170 . . . 1951 | 2892 |
| BRHIP20005340 | 450 | 597 . . . 1853 | 2893 |
| BRHIP20005530 | 451 | 30 . . . 1052 | 2894 |
| BRHIP20096170 | 452 | 119 . . . 817 | 2895 |
| BRHIP20096850 | 453 | 311 . . . 1582 | 2896 |
| BRHIP20103090 | 454 | 1345 . . . 1737 | 2897 |
| BRHIP20104440 | 455 | 166 . . . 576 | 2898 |
| BRHIP20105710 | 456 | 1056 . . . 1466 | 2899 |
| BRHIP20106100 | 457 | 314 . . . 1060 | 2900 |
| BRHIP20107440 | 458 | 827 . . . 1528 | 2901 |
| BRHIP20110800 | 459 | 577 . . . 1083 | 2902 |
| BRHIP20111200 | 460 | 261 . . . 578 | 2903 |
| BRHIP20115080 | 461 | 762 . . . 1751 | 2904 |
| BRHIP20115760 | 462 | 877 . . . 1182 | 2905 |
| BRHIP20118380 | 463 | 2 . . . 316 | 2906 |
| BRHIP20118910 | 464 | 82 . . . 426 | 2907 |
| BRHIP20119330 | 465 | 420 . . . 2564 | 2908 |
| BRHIP20121410 | 466 | 68 . . . 505 | 2909 |
| BRHIP20123140 | 467 | 73 . . . 432 | 2910 |
| BRHIP20129720 | 468 | 934 . . . 1809 | 2911 |
| BRHIP20132860 | 469 | 1 . . . 897 | 2912 |
| BRHIP20135100 | 470 | 423 . . . 743 | 2913 |
| BRHIP20137230 | 471 | 71 . . . 1180 | 2914 |
| BRHIP20139720 | 472 | 33 . . . 3254 | 2915 |
| BRHIP20140630 | 473 | 3521 . . . 3922 | 2916 |
| BRHIP20142850 | 474 | 259 . . . 612 | 2917 |
| BRHIP20143730 | 475 | 229 . . . 1638 | 2918 |
| BRHIP20143860 | 476 | 1159 . . . 1638 | 2919 |
| BRHIP20149540 | 477 | 155 . . . 544 | 2920 |
| BRHIP20153560 | 478 | 1134 . . . 1445 | 2921 |
| BRHIP20153600 | 479 | 40 . . . 675 | 2922 |
| BRHIP20167880 | 480 | 183 . . . 656 | 2923 |
| BRHIP20169680 | 481 | 27 . . . 347 | 2924 |
| BRHIP20169900 | 482 | 68 . . . 502 | 2925 |
| BRHIP20170100 | 483 | 166 . . . 936 | 2926 |
| BRHIP20173150 | 484 | 494 . . . 820 | 2927 |
| BRHIP20174040 | 485 | 71 . . . 2923 | 2928 |
| BRHIP20175420 | 486 | 3 . . . 872 | 2929 |
| BRHIP20176420 | 487 | 914 . . . 1756 | 2930 |
| BRHIP20179200 | 488 | 2532 . . . 2870 | 2931 |
| BRHIP20180140 | 489 | 1028 . . . 1345 | 2932 |
| BRHIP20183690 | 490 | 148 . . . 1620 | 2933 |
| BRHIP20186120 | 491 | 322 . . . 723 | 2934 |
| BRHIP20186500 | 492 | 3089 . . . 3727 | 2935 |
| BRHIP20189980 | 493 | 247 . . . 1002 | 2936 |
| BRHIP20190070 | 494 | 65 . . . 433 | 2937 |
| BRHIP20191490 | 495 | 1929 . . . 2270 | 2938 |
| BRHIP20191770 | 496 | 191 . . . 502 | 2939 |
| BRHIP20191860 | 497 | 282 . . . 2084 | 2940 |
| BRHIP20194940 | 498 | 119 . . . 1312 | 2941 |
| BRHIP20195890 | 499 | 1002 . . . 1376 | 2942 |
| BRHIP20196410 | 500 | 2371 . . . 2706 | 2943 |
| BRHIP20198190 | 501 | 2979 . . . 3407 | 2944 |
| BRHIP20205090 | 502 | 270 . . . 593 | 2945 |
| BRHIP20207430 | 503 | 370 . . . 687 | 2946 |
| BRHIP20207990 | 504 | 90 . . . 1628 | 2947 |
| BRHIP20208270 | 505 | 967 . . . 1353 | 2948 |
| BRHIP20208420 | 506 | 103 . . . 462 | 2949 |
| BRHIP20208590 | 507 | 212 . . . 607 | 2950 |
| BRHIP20214950 | 508 | 1637 . . . 2020 | 2951 |
| BRHIP20217620 | 509 | 2731 . . . 3087 | 2952 |
| BRHIP20218580 | 510 | 1930 . . . 2589 | 2953 |
| BRHIP20222280 | 511 | 269 . . . 1768 | 2954 |
| BRHIP20227080 | 512 | 1613 . . . 2011 | 2955 |
| BRHIP20230710 | 513 | 198 . . . 554 | 2956 |
| BRHIP20232290 | 514 | 110 . . . 502 | 2957 |
| BRHIP20233090 | 515 | 1782 . . . 2105 | 2958 |
| BRHIP20234380 | 516 | 15 . . . 1079 | 2959 |
| BRHIP20236950 | 517 | 29 . . . >2580 | 2960 |
| BRHIP20238600 | 518 | 154 . . . 729 | 2961 |
| BRHIP20238690 | 519 | 51 . . . 383 | 2962 |
| BRHIP20238880 | 520 | 13 . . . 2625 | 2963 |
| BRHIP20240460 | 521 | 2151 . . . 2540 | 2964 |
| BRHIP20243470 | 522 | 2929 . . . 3579 | 2965 |
| BRHIP20249110 | 523 | 134 . . . 2887 | 2966 |
| BRHIP20252450 | 524 | 123 . . . >3738 | 2967 |
| BRHIP20253660 | 525 | 255 . . . 1031 | 2968 |
| BRHIP20254480 | 526 | 362 . . . 994 | 2969 |
| BRHIP20277620 | 527 | 124 . . . 1074 | 2970 |
| BRHIP20283030 | 528 | 219 . . . 4088 | 2971 |
| BRHIP20284800 | 529 | 217 . . . 606 | 2972 |
| BRHIP20285830 | 530 | 611 . . . 1321 | 2973 |
| BRHIP20285930 | 531 | 105 . . . 779 | 2974 |
| BRHIP30001110 | 532 | 1740 . . . 2294 | 2975 |
| BRHIP30004570 | 533 | 189 . . . 1034 | 2976 |
| BRHIP30004880 | 534 | 191 . . . 2902 | 2977 |
| BRSSN10000920 | 535 | 1850 . . . 2215 | 2978 |
| BRSSN20003120 | 536 | 359 . . . >2933 | 2979 |
| BRSSN20006340 | 537 | 937 . . . 1401 | 2980 |
| BRSSN20013420 | 538 | 111 . . . 2741 | 2981 |
| BRSSN20014260 | 539 | 167 . . . 1069 | 2982 |
| BRSSN20015030 | 540 | 105 . . . 458 | 2983 |
| BRSSN20015790 | 541 | 542 . . . 1639 | 2984 |
| BRSSN20018690 | 542 | 110 . . . 463 | 2985 |
| BRSSN20021600 | 543 | 13 . . . 1497 | 2986 |
| BRSSN20028570 | 544 | 424 . . . 726 | 2987 |
| BRSSN20038200 | 545 | 86 . . . 1555 | 2988 |
| BRSSN20038410 | 546 | 187 . . . 852 | 2989 |
| BRSSN20039370 | 547 | 900 . . . 1628 | 2990 |
| BRSSN20043040 | 548 | 1959 . . . 2342 | 2991 |
| BRSSN20046570 | 549 | 18 . . . 368 | 2992 |
| BRSSN20046790 | 550 | 253 . . . 1014 | 2993 |
| BRSSN20046860 | 551 | 406 . . . 1461 | 2994 |
| BRSSN20066110 | 552 | 725 . . . 1165 | 2995 |
| BRSSN20097020 | 553 | 1352 . . . 2092 | 2996 |
| BRSSN20101100 | 554 | 1851 . . . 2330 | 2997 |
| BRSSN20105870 | 555 | 8 . . . 3064 | 2998 |
| BRSSN20105960 | 556 | 183 . . . 497 | 2999 |
| BRSSN20108300 | 557 | 92 . . . 415 | 3000 |
| BRSSN20117990 | 558 | 733 . . . 1428 | 3001 |
| BRSSN20120810 | 559 | 770 . . . 1687 | 3002 |
| BRSSN20121030 | 560 | 18 . . . 890 | 3003 |
| BRSSN20137020 | 561 | 1097 . . . 1429 | 3004 |
| BRSSN20142940 | 562 | 1411 . . . 1803 | 3005 |
| BRSSN20146100 | 563 | 181 . . . 2376 | 3006 |
| BRSSN20151990 | 564 | 15 . . . 401 | 3007 |
| BRSSN20152380 | 565 | 17 . . . 418 | 3008 |
| BRSSN20159070 | 566 | 393 . . . 728 | 3009 |
| BRSSN20159820 | 567 | 867 . . . 1661 | 3010 |
| BRSSN20169050 | 568 | 118 . . . 636 | 3011 |
| BRSSN20176820 | 569 | 13 . . . 1917 | 3012 |
| BRSSN20177570 | 570 | 303 . . . 2651 | 3013 |
| BRSSN20187310 | 571 | 163 . . . 1332 | 3014 |
| BRSTN10000830 | 572 | 216 . . . 959 | 3015 |
| BRSTN20000580 | 573 | 617 . . . 1672 | 3016 |
| BRSTN20002200 | 574 | 159 . . . 515 | 3017 |
| BRSTN20005360 | 575 | 43 . . . 1173 | 3018 |
| BRTHA20000570 | 576 | 641 . . . 988 | 3019 |
| BRTHA20004740 | 577 | 192 . . . 1082 | 3020 |
| BRTHA20046290 | 578 | 1657 . . . 2298 | 3021 |
| BRTHA20046390 | 579 | 191 . . . 571 | 3022 |
| BRTHA20046420 | 580 | 446 . . . 835 | 3023 |
| CD34C30001250 | 581 | 59 . . . >3188 | 3024 |
| CD34C30003140 | 582 | 458 . . . 2803 | 3025 |
| CD34C30004240 | 583 | 430 . . . 1290 | 3026 |
| CD34C30004940 | 584 | 970 . . . 1299 | 3027 |
| COLON10001350 | 585 | 18 . . . 1544 | 3028 |
| COLON20043180 | 586 | 451 . . . 867 | 3029 |
| COLON20093370 | 587 | 1261 . . . 1779 | 3030 |
| CTONG10000100 | 588 | 90 . . . 1118 | 3031 |
| CTONG10000220 | 589 | 191 . . . 847 | 3032 |
| CTONG10000620 | 590 | 94 . . . 2943 | 3033 |
| CTONG10000930 | 591 | 18 . . . 2621 | 3034 |
| CTONG10000940 | 592 | 182 . . . 868 | 3035 |
| CTONG10001650 | 593 | 1916 . . . 2512 | 3036 |
| CTONG10002770 | 594 | 182 . . . >3049 | 3037 |
| CTONG20002180 | 595 | 90 . . . 554 | 3038 |
| CTONG20004690 | 596 | 301 . . . 885 | 3039 |
| CTONG20009770 | 597 | 321 . . . 3287 | 3040 |
| CTONG20014280 | 598 | 176 . . . 1723 | 3041 |
| CTONG20027090 | 599 | 280 . . . 2370 | 3042 |
| CTONG20028410 | 600 | 600 . . . 2936 | 3043 |
| CTONG20038890 | 601 | 961 . . . 1371 | 3044 |
| CTONG20049410 | 602 | 157 . . . 669 | 3045 |
| CTONG20050280 | 603 | 157 . . . 1944 | 3046 |
| CTONG20052650 | 604 | 1210 . . . 1647 | 3047 |
| CTONG20052900 | 605 | 130 . . . 1548 | 3048 |
| CTONG20075860 | 606 | 63 . . . 1391 | 3049 |
| CTONG20076130 | 607 | 11 . . . 994 | 3050 |
| CTONG20077790 | 608 | 270 . . . 635 | 3051 |
| CTONG20082690 | 609 | 75 . . . 896 | 3052 |
| CTONG20085950 | 610 | 905 . . . 2125 | 3053 |
| CTONG20091080 | 611 | 166 . . . 717 | 3054 |
| CTONG20091320 | 612 | 1223 . . . 1627 | 3055 |
| CTONG20092570 | 613 | 690 . . . 1601 | 3056 |
| CTONG20092580 | 614 | 1555 . . . 1920 | 3057 |
| CTONG20092680 | 615 | 365 . . . 823 | 3058 |
| CTONG20092700 | 616 | 224 . . . 928 | 3059 |
| CTONG20093950 | 617 | 205 . . . 2388 | 3060 |
| CTONG20095270 | 618 | 1147 . . . 1611 | 3061 |
| CTONG20095290 | 619 | 312 . . . 749 | 3062 |
| CTONG20095340 | 620 | 109 . . . 2631 | 3063 |
| CTONG20096430 | 621 | 311 . . . 1384 | 3064 |
| CTONG20096750 | 622 | 738 . . . 1184 | 3065 |
| CTONG20097660 | 623 | 133 . . . 876 | 3066 |
| CTONG20098440 | 624 | 206 . . . 1132 | 3067 |
| CTONG20099380 | 625 | 1417 . . . 1806 | 3068 |
| CTONG20099550 | 626 | 74 . . . 1939 | 3069 |
| CTONG20099630 | 627 | 99 . . . 2060 | 3070 |
| CTONG20100240 | 628 | 620 . . . 2155 | 3071 |
| CTONG20101480 | 629 | 13 . . . 411 | 3072 |
| CTONG20103480 | 630 | 30 . . . 356 | 3073 |
| CTONG20105080 | 631 | 28 . . . 1260 | 3074 |
| CTONG20105660 | 632 | 75 . . . 674 | 3075 |
| CTONG20106230 | 633 | 2015 . . . >3067 | 3076 |
| CTONG20106520 | 634 | 1693 . . . 3147 | 3077 |
| CTONG20108210 | 635 | 234 . . . 1319 | 3078 |
| CTONG20114290 | 636 | 388 . . . 3225 | 3079 |
| CTONG20114740 | 637 | 1191 . . . 1832 | 3080 |
| CTONG20118150 | 638 | 144 . . . 2831 | 3081 |
| CTONG20118250 | 639 | 52 . . . 840 | 3082 |
| CTONG20119200 | 640 | 2128 . . . 2637 | 3083 |
| CTONG20120770 | 641 | 2946 . . . 3341 | 3084 |
| CTONG20121010 | 642 | 143 . . . 1732 | 3085 |
| CTONG20121580 | 643 | 97 . . . >2930 | 3086 |
| CTONG20124010 | 644 | 206 . . . 1369 | 3087 |
| CTONG20124220 | 645 | 177 . . . 2477 | 3088 |
| CTONG20124470 | 646 | 701 . . . 1237 | 3089 |
| CTONG20124730 | 647 | 894 . . . 1280 | 3090 |
| CTONG20125540 | 648 | 616 . . . 1071 | 3091 |
| CTONG20125640 | 649 | 756 . . . 1688 | 3092 |
| CTONG20126070 | 650 | 42 . . . 2843 | 3093 |
| CTONG20127450 | 651 | 2271 . . . 2642 | 3094 |
| CTONG20128430 | 652 | 330 . . . 2180 | 3095 |
| CTONG20128470 | 653 | 916 . . . 1479 | 3096 |
| CTONG20129960 | 654 | 118 . . . 3249 | 3097 |
| CTONG20131490 | 655 | 1191 . . . 1553 | 3098 |
| CTONG20131560 | 656 | 242 . . . >2879 | 3099 |
| CTONG20132220 | 657 | 1155 . . . 1598 | 3100 |
| CTONG20133390 | 658 | 679 . . . 2304 | 3101 |
| CTONG20133480 | 659 | 86 . . . 391 | 3102 |
| CTONG20133520 | 660 | 128 . . . 2140 | 3103 |
| CTONG20136300 | 661 | 1078 . . . 1521 | 3104 |
| CTONG20138030 | 662 | 3061 . . . 3396 | 3105 |
| CTONG20139070 | 663 | 2508 . . . 2819 | 3106 |
| CTONG20139340 | 664 | 1182 . . . 1535 | 3107 |
| CTONG20139860 | 665 | 28 . . . 2169 | 3108 |
| CTONG20140320 | 666 | 2454 . . . 2786 | 3109 |
| CTONG20140580 | 667 | 74 . . . 1180 | 3110 |
| CTONG20141650 | 668 | 190 . . . 570 | 3111 |
| CTONG20143690 | 669 | 169 . . . 2583 | 3112 |
| CTONG20146300 | 670 | 1195 . . . 1674 | 3113 |
| CTONG20146970 | 671 | 1201 . . . 1536 | 3114 |
| CTONG20147050 | 672 | 1304 . . . 1648 | 3115 |
| CTONG20149460 | 673 | 149 . . . 1942 | 3116 |
| CTONG20149950 | 674 | 42 . . . 371 | 3117 |
| CTONG20150910 | 675 | 792 . . . 1130 | 3118 |
| CTONG20153300 | 676 | 755 . . . 2338 | 3119 |
| CTONG20153580 | 677 | 488 . . . 1858 | 3120 |
| CTONG20155180 | 678 | 486 . . . >3005 | 3121 |
| CTONG20155400 | 679 | 1940 . . . 2458 | 3122 |
| CTONG20156780 | 680 | 33 . . . 3104 | 3123 |
| CTONG20158040 | 681 | 152 . . . 1297 | 3124 |
| CTONG20158150 | 682 | 66 . . . 2057 | 3125 |
| CTONG20158660 | 683 | 171 . . . 2258 | 3126 |
| CTONG20159530 | 684 | 231 . . . 1094 | 3127 |
| CTONG20160560 | 685 | 79 . . . >2796 | 3128 |
| CTONG20161850 | 686 | 27 . . . 734 | 3129 |
| CTONG20162170 | 687 | 156 . . . 734 | 3130 |
| CTONG20163550 | 688 | 772 . . . 1134 | 3131 |
| CTONG20164990 | 689 | 1343 . . . 1753 | 3132 |
| CTONG20165050 | 690 | 1575 . . . 2018 | 3133 |
| CTONG20186320 | 691 | 78 . . . 1595 | 3134 |
| CTONG20200310 | 692 | 2 . . . 2254 | 3135 |
| CTONG20265130 | 693 | 419 . . . 892 | 3136 |
| CTONG20267700 | 694 | 2046 . . . 2432 | 3137 |
| CTONG20273610 | 695 | 513 . . . 923 | 3138 |
| D3OST10001090 | 696 | 50 . . . 1462 | 3139 |
| D3OST10002670 | 697 | 77 . . . 853 | 3140 |
| D3OST10002700 | 698 | 84 . . . 461 | 3141 |
| D3OST20006180 | 699 | 148 . . . 2259 | 3142 |
| D3OST20006540 | 700 | 140 . . . 442 | 3143 |
| D3OST20007340 | 701 | 369 . . . 1220 | 3144 |
| D3OST20013280 | 702 | 756 . . . 1118 | 3145 |
| D3OST20024170 | 703 | 1373 . . . 1714 | 3146 |
| D3OST20024360 | 704 | 1984 . . . 2361 | 3147 |
| D3OST20024520 | 705 | 3 . . . 422 | 3148 |
| D3OST20036070 | 706 | 122 . . . 1039 | 3149 |
| D3OST20037970 | 707 | 256 . . . 735 | 3150 |
| D3OST20038560 | 708 | 1976 . . . 2350 | 3151 |
| D3OST30002580 | 709 | 1509 . . . 2957 | 3152 |
| D3OST30002910 | 710 | 1811 . . . 2248 | 3153 |
| D6OST20003580 | 711 | 1760 . . . 2167 | 3154 |
| D6OST20004450 | 712 | 1513 . . . 2547 | 3155 |
| D6OST20005070 | 713 | 2835 . . . 3398 | 3156 |
| D9OST20000310 | 714 | 239 . . . 637 | 3157 |
| D9OST20002780 | 715 | 644 . . . 1360 | 3158 |
| D9OST20015470 | 716 | 187 . . . 1386 | 3159 |
| D9OST20023970 | 717 | 872 . . . 1327 | 3160 |
| D9OST20026730 | 718 | 145 . . . 3159 | 3161 |
| D9OST20031370 | 719 | 616 . . . 1251 | 3162 |
| D9OST20033970 | 720 | 24 . . . 1811 | 3163 |
| D9OST20035800 | 721 | 524 . . . 1057 | 3164 |
| D9OST20035940 | 722 | 217 . . . 867 | 3165 |
| D9OST20040180 | 723 | 189 . . . 1127 | 3166 |
| DFNES10000030 | 724 | 897 . . . 1322 | 3167 |
| DFNES10001850 | 725 | 471 . . . 899 | 3168 |
| DFNES20001530 | 726 | 26 . . . 382 | 3169 |
| DFNES20010910 | 727 | 159 . . . 1136 | 3170 |
| DFNES20014040 | 728 | 148 . . . 1272 | 3171 |
| DFNES20025880 | 729 | 1080 . . . 1415 | 3172 |
| DFNES20031920 | 730 | 631 . . . 1104 | 3173 |
| DFNES20037420 | 731 | 186 . . . 2090 | 3174 |
| DFNES20055270 | 732 | 159 . . . 818 | 3175 |
| DFNES20071130 | 733 | 248 . . . 1156 | 3176 |
| DFNES20082800 | 734 | 258 . . . 698 | 3177 |
| FCBBF10000240 | 735 | 507 . . . 2942 | 3178 |
| FCBBF10000380 | 736 | 1024 . . . 1344 | 3179 |
| FCBBF10000630 | 737 | 533 . . . 1654 | 3180 |
| FCBBF10000770 | 738 | 56 . . . 1810 | 3181 |
| FCBBF10001150 | 739 | 351 . . . 2555 | 3182 |
| FCBBF10001210 | 740 | 38 . . . 1066 | 3183 |
| FCBBF10001550 | 741 | 60 . . . 653 | 3184 |
| FCBBF10001710 | 742 | 322 . . . 2133 | 3185 |
| FCBBF10001820 | 743 | 10 . . . 1032 | 3186 |
| FCBBF10002430 | 744 | 349 . . . 1158 | 3187 |
| FCBBF10002700 | 745 | 189 . . . 551 | 3188 |
| FCBBF10002800 | 746 | 485 . . . 2818 | 3189 |
| FCBBF10003220 | 747 | 479 . . . 832 | 3190 |
| FCBBF10003670 | 748 | 139 . . . 1266 | 3191 |
| FCBBF10003740 | 749 | 407 . . . 2365 | 3192 |
| FCBBF10003760 | 750 | 1044 . . . 1358 | 3193 |
| FCBBF10003770 | 751 | 242 . . . >3001 | 3194 |
| FCBBF10004120 | 752 | 142 . . . 816 | 3195 |
| FCBBF10004370 | 753 | 432 . . . 1511 | 3196 |
| FCBBF10005060 | 754 | 1340 . . . 2323 | 3197 |
| FCBBF10005460 | 755 | 179 . . . 2092 | 3198 |
| FCBBF10005500 | 756 | 1518 . . . 2123 | 3199 |
| FCBBF10005740 | 757 | 954 . . . 1667 | 3200 |
| FCBBF20006780 | 758 | 356 . . . 679 | 3201 |
| FCBBF20014270 | 759 | 49 . . . 315 | 3202 |
| FCBBF20023700 | 760 | 251 . . . 589 | 3203 |
| FCBBF20032970 | 761 | 845 . . . 1186 | 3204 |
| FCBBF20035280 | 762 | 13 . . . 393 | 3205 |
| FCBBF20042170 | 763 | 186 . . . 1337 | 3206 |
| FCBBF20042560 | 764 | 115 . . . 576 | 3207 |
| FCBBF20049300 | 765 | 32 . . . 631 | 3208 |
| FCBBF20051220 | 766 | 523 . . . 948 | 3209 |
| FCBBF20054280 | 767 | 119 . . . 535 | 3210 |
| FCBBF20056370 | 768 | 57 . . . 704 | 3211 |
| FCBBF20059090 | 769 | 928 . . . 1245 | 3212 |
| FCBBF20064520 | 770 | 368 . . . 1243 | 3213 |
| FCBBF20067810 | 771 | 68 . . . 1231 | 3214 |
| FCBBF20068820 | 772 | 74 . . . 712 | 3215 |
| FCBBF20071860 | 773 | 384 . . . 911 | 3216 |
| FCBBF20072650 | 774 | 1471 . . . 1944 | 3217 |
| FCBBF20075560 | 775 | 730 . . . 1086 | 3218 |
| FCBBF20076330 | 776 | 684 . . . 998 | 3219 |
| FCBBF30001840 | 777 | 1503 . . . 1832 | 3220 |
| FCBBF30007680 | 778 | 9 . . . 2117 | 3221 |
| FCBBF30008470 | 779 | 1157 . . . 1504 | 3222 |
| FCBBF30010810 | 780 | 149 . . . 1483 | 3223 |
| FCBBF30012350 | 781 | 419 . . . 1507 | 3224 |
| FCBBF30012810 | 782 | 372 . . . >2409 | 3225 |
| FCBBF30013770 | 783 | 375 . . . 2795 | 3226 |
| FCBBF30015940 | 784 | 24 . . . >2507 | 3227 |
| FCBBF30016320 | 785 | 990 . . . 1877 | 3228 |
| FCBBF30016570 | 786 | 574 . . . 999 | 3229 |
| FCBBF30018550 | 787 | 231 . . . >3402 | 3230 |
| FCBBF30019120 | 788 | 54 . . . 398 | 3231 |
| FCBBF30024750 | 789 | 126 . . . 560 | 3232 |
| FCBBF30025560 | 790 | 171 . . . 1301 | 3233 |
| FCBBF30028180 | 791 | 258 . . . 830 | 3234 |
| FCBBF30033050 | 792 | 7 . . . 1089 | 3235 |
| FCBBF30039020 | 793 | 955 . . . 2727 | 3236 |
| FCBBF30049550 | 794 | 222 . . . >4213 | 3237 |
| FCBBF30052180 | 795 | 2829 . . . 4214 | 3238 |
| FCBBF30054440 | 796 | 33 . . . 2822 | 3239 |
| FCBBF30057290 | 797 | 143 . . . 2068 | 3240 |
| FCBBF30062880 | 798 | 1135 . . . >3256 | 3241 |
| FCBBF30070770 | 799 | 1049 . . . 2113 | 3242 |
| FCBBF30071520 | 800 | 280 . . . 735 | 3243 |
| FCBBF30078290 | 801 | 280 . . . 1875 | 3244 |
| FCBBF30083620 | 802 | 125 . . . 1159 | 3245 |
| FCBBF30083820 | 803 | 298 . . . 774 | 3246 |
| FCBBF30086440 | 804 | 192 . . . 863 | 3247 |
| FCBBF30090690 | 805 | 545 . . . 1657 | 3248 |
| FCBBF30095260 | 806 | 204 . . . 686 | 3249 |
| FCBBF30123470 | 807 | 1084 . . . 1614 | 3250 |
| FCBBF30129630 | 808 | 257 . . . 973 | 3251 |
| FCBBF30170590 | 809 | 1313 . . . 1672 | 3252 |
| FCBBF30172550 | 810 | 1350 . . . 1703 | 3253 |
| FCBBF30175310 | 811 | 120 . . . 1280 | 3254 |
| FCBBF30178730 | 812 | 348 . . . 833 | 3255 |
| FCBBF30189490 | 813 | 1935 . . . 2468 | 3256 |
| FCBBF30190850 | 814 | 43 . . . 1560 | 3257 |
| FCBBF30195640 | 815 | 577 . . . >2751 | 3258 |
| FCBBF30199610 | 816 | 972 . . . 1391 | 3259 |
| FCBBF30215060 | 817 | 42 . . . 446 | 3260 |
| FCBBF30225660 | 818 | 231 . . . 2750 | 3261 |
| FCBBF30233680 | 819 | 28 . . . >4395 | 3262 |
| FCBBF30238870 | 820 | 587 . . . 2761 | 3263 |
| FCBBF30240020 | 821 | 248 . . . 1747 | 3264 |
| FCBBF30240960 | 822 | 465 . . . 1520 | 3265 |
| FCBBF30242250 | 823 | 271 . . . >2723 | 3266 |
| FCBBF30243640 | 824 | 339 . . . 665 | 3267 |
| FCBBF30246230 | 825 | 1893 . . . 2357 | 3268 |
| FCBBF30246630 | 826 | 19 . . . 2070 | 3269 |
| FCBBF30247930 | 827 | 558 . . . 1187 | 3270 |
| FCBBF30250730 | 828 | 116 . . . >2647 | 3271 |
| FCBBF30251420 | 829 | 2590 . . . 2904 | 3272 |
| FCBBF30252520 | 830 | 27 . . . 380 | 3273 |
| FCBBF30252800 | 831 | 139 . . . 1110 | 3274 |
| FCBBF30252850 | 832 | 45 . . . 1022 | 3275 |
| FCBBF30262360 | 833 | 51 . . . 446 | 3276 |
| FCBBF30262510 | 834 | 36 . . . 2327 | 3277 |
| FCBBF30266780 | 835 | 2080 . . . 2382 | 3278 |
| FCBBF30266920 | 836 | 5 . . . 316 | 3279 |
| FCBBF30278630 | 837 | 492 . . . 821 | 3280 |
| FCBBF30279030 | 838 | 1653 . . . 2447 | 3281 |
| FCBBF30281880 | 839 | 83 . . . 2221 | 3282 |
| FCBBF30284720 | 840 | 230 . . . 751 | 3283 |
| FCBBF30285280 | 841 | 185 . . . 3043 | 3284 |
| FCBBF40001420 | 842 | 364 . . . 681 | 3285 |
| FCBBF40001730 | 843 | 105 . . . 932 | 3286 |
| FCBBF40005480 | 844 | 119 . . . 589 | 3287 |
| FEBRA10001880 | 845 | 494 . . . 2236 | 3288 |
| FEBRA10001900 | 846 | 6 . . . 389 | 3289 |
| FEBRA20002100 | 847 | 375 . . . 1064 | 3290 |
| FEBRA20003210 | 848 | 10 . . . 414 | 3291 |
| FEBRA20004620 | 849 | 297 . . . 1568 | 3292 |
| FEBRA20007620 | 850 | 61 . . . 2400 | 3293 |
| FEBRA20009090 | 851 | 667 . . . 1032 | 3294 |
| FEBRA20010120 | 852 | 608 . . . 1216 | 3295 |
| FEBRA20017050 | 853 | 1775 . . . 2197 | 3296 |
| FEBRA20018280 | 854 | 16 . . . 678 | 3297 |
| FEBRA20018690 | 855 | 664 . . . 981 | 3298 |
| FEBRA20024100 | 856 | 68 . . . 2659 | 3299 |
| FEBRA20025270 | 857 | 116 . . . >2317 | 3300 |
| FEBRA20025520 | 858 | 669 . . . 1133 | 3301 |
| FEBRA20026110 | 859 | 233 . . . 2692 | 3302 |
| FEBRA20026280 | 860 | 54 . . . 623 | 3303 |
| FEBRA20027810 | 861 | 155 . . . 2740 | 3304 |
| FEBRA20029860 | 862 | 29 . . . 757 | 3305 |
| FEBRA20034360 | 863 | 1288 . . . 2013 | 3306 |
| FEBRA20034680 | 864 | 240 . . . 1955 | 3307 |
| FEBRA20037260 | 865 | 2376 . . . 2702 | 3308 |
| FEBRA20037500 | 866 | 10 . . . 1308 | 3309 |
| FEBRA20040530 | 867 | 76 . . . 1407 | 3310 |
| FEBRA20042190 | 868 | 1590 . . . 1925 | 3311 |
| FEBRA20052910 | 869 | 1136 . . . 1486 | 3312 |
| FEBRA20060610 | 870 | 599 . . . 1201 | 3313 |
| FEBRA20072120 | 871 | 106 . . . 2877 | 3314 |
| FEBRA20079310 | 872 | 2384 . . . 2806 | 3315 |
| FEBRA20080810 | 873 | 679 . . . 1401 | 3316 |
| FEBRA20082010 | 874 | 106 . . . 1779 | 3317 |
| FEBRA20082100 | 875 | 1042 . . . 1524 | 3318 |
| FEBRA20086620 | 876 | 215 . . . 1591 | 3319 |
| FEBRA20088360 | 877 | 2964 . . . 3521 | 3320 |
| FEBRA20090290 | 878 | 383 . . . 823 | 3321 |
| FEBRA20092890 | 879 | 198 . . . 2297 | 3322 |
| FEBRA20093520 | 880 | 651 . . . 1070 | 3323 |
| FEBRA20095140 | 881 | 264 . . . >2245 | 3324 |
| FEBRA20095880 | 882 | 1872 . . . 2186 | 3325 |
| FEBRA20097310 | 883 | 74 . . . 2101 | 3326 |
| FEBRA20098460 | 884 | 291 . . . 686 | 3327 |
| FEBRA20111460 | 885 | 859 . . . 1221 | 3328 |
| FEBRA20113560 | 886 | 22 . . . 558 | 3329 |
| FEBRA20125070 | 887 | 10 . . . 1002 | 3330 |
| FEBRA20130190 | 888 | 131 . . . 1192 | 3331 |
| FEBRA20132740 | 889 | 770 . . . 1111 | 3332 |
| FEBRA20140100 | 890 | 1664 . . . 2377 | 3333 |
| FEBRA20144170 | 891 | 342 . . . 1976 | 3334 |
| FEBRA20145780 | 892 | 1262 . . . 1564 | 3335 |
| FEBRA20161120 | 893 | 173 . . . 484 | 3336 |
| FEBRA20166540 | 894 | 101 . . . 511 | 3337 |
| FEBRA20167390 | 895 | 429 . . . 869 | 3338 |
| FEBRA20171380 | 896 | 338 . . . 2002 | 3339 |
| FEBRA20174410 | 897 | 125 . . . 2029 | 3340 |
| FEBRA20176800 | 898 | 1320 . . . 1877 | 3341 |
| FEBRA20184330 | 899 | 36 . . . 533 | 3342 |
| FEBRA20192420 | 900 | 2120 . . . 3799 | 3343 |
| FEBRA20195820 | 901 | 175 . . . 678 | 3344 |
| FEBRA20196370 | 902 | 353 . . . 2032 | 3345 |
| FEBRA20196630 | 903 | 482 . . . 2359 | 3346 |
| FEBRA20197110 | 904 | 632 . . . 1222 | 3347 |
| FEBRA20204000 | 905 | 1958 . . . 2482 | 3348 |
| FEBRA20204060 | 906 | 366 . . . 728 | 3349 |
| FEBRA20211710 | 907 | 282 . . . 929 | 3350 |
| FEBRA20214970 | 908 | 620 . . . 1264 | 3351 |
| FEBRA20215500 | 909 | 726 . . . 1256 | 3352 |
| FEBRA20216360 | 910 | 1398 . . . 1904 | 3353 |
| FEBRA20222040 | 911 | 954 . . . 1391 | 3354 |
| FEBRA20223220 | 912 | 1254 . . . 1898 | 3355 |
| FEBRA20225040 | 913 | 13 . . . 1692 | 3356 |
| FEBRA20226010 | 914 | 1439 . . . 1933 | 3357 |
| FEBRA20229560 | 915 | 37 . . . 381 | 3358 |
| FEBRA20229630 | 916 | 184 . . . 987 | 3359 |
| FEBRA20232850 | 917 | 774 . . . 1193 | 3360 |
| FEBRA20233770 | 918 | 64 . . . 636 | 3361 |
| FEBRA20235500 | 919 | 1206 . . . >2520 | 3362 |
| FEBRA20237640 | 920 | 331 . . . 933 | 3363 |
| FEHRT20003250 | 921 | 173 . . . 1243 | 3364 |
| FELNG20002410 | 922 | 1257 . . . 1577 | 3365 |
| HCASM10000500 | 923 | 300 . . . 1754 | 3366 |
| HCHON10001760 | 924 | 238 . . . 1182 | 3367 |
| HCHON20000380 | 925 | 210 . . . 644 | 3368 |
| HCHON20001560 | 926 | 565 . . . 1611 | 3369 |
| HCHON20002260 | 927 | 694 . . . 1389 | 3370 |
| HCHON20003220 | 928 | 23 . . . >2278 | 3371 |
| HCHON20003440 | 929 | 1982 . . . >2519 | 3372 |
| HCHON20007380 | 930 | 163 . . . 1248 | 3373 |
| HCHON20007510 | 931 | 189 . . . 2636 | 3374 |
| HCHON20008150 | 932 | 204 . . . >2358 | 3375 |
| HCHON20008180 | 933 | 671 . . . 1087 | 3376 |
| HCHON20008320 | 934 | 1240 . . . >2284 | 3377 |
| HCHON20008980 | 935 | 578 . . . 904 | 3378 |
| HCHON20009350 | 936 | 63 . . . 422 | 3379 |
| HCHON20009560 | 937 | 1644 . . . 2489 | 3380 |
| HCHON20010990 | 938 | 531 . . . 1085 | 3381 |
| HCHON20011160 | 939 | 839 . . . 1156 | 3382 |
| HCHON20014970 | 940 | 302 . . . 2143 | 3383 |
| HCHON20015230 | 941 | 950 . . . 1453 | 3384 |
| HCHON20015350 | 942 | 647 . . . >2887 | 3385 |
| HCHON20015980 | 943 | 100 . . . 1413 | 3386 |
| HCHON20016040 | 944 | 3 . . . 323 | 3387 |
| HCHON20016650 | 945 | 44 . . . 3418 | 3388 |
| HCHON20022470 | 946 | 1526 . . . 1978 | 3389 |
| HCHON20035130 | 947 | 1192 . . . 1614 | 3390 |
| HCHON20036420 | 948 | 356 . . . 811 | 3391 |
| HCHON20036760 | 949 | 228 . . . 647 | 3392 |
| HCHON20040020 | 950 | 257 . . . 1288 | 3393 |
| HCHON20043590 | 951 | 263 . . . 712 | 3394 |
| HCHON20059870 | 952 | 198 . . . 2297 | 3395 |
| HCHON20064590 | 953 | 66 . . . 2063 | 3396 |
| HCHON20067220 | 954 | 313 . . . 642 | 3397 |
| HCHON20067700 | 955 | 160 . . . 591 | 3398 |
| HCHON20068410 | 956 | 116 . . . >2811 | 3399 |
| HCHON20068710 | 957 | 335 . . . 688 | 3400 |
| HCHON20074820 | 958 | 19 . . . 735 | 3401 |
| HCHON20076500 | 959 | 1778 . . . 2473 | 3402 |
| HCHON20086720 | 960 | 133 . . . 864 | 3403 |
| HCHON20097490 | 961 | 1434 . . . 2819 | 3404 |
| HCHON20100740 | 962 | 138 . . . 1277 | 3405 |
| HEART20003060 | 963 | 109 . . . 1407 | 3406 |
| HEART20005410 | 964 | 302 . . . 784 | 3407 |
| HEART20017730 | 965 | 19 . . . 2064 | 3408 |
| HEART20021840 | 966 | 22 . . . 507 | 3409 |
| HEART20025980 | 967 | 293 . . . 1180 | 3410 |
| HEART20034320 | 968 | 31 . . . 2013 | 3411 |
| HEART20037810 | 969 | 803 . . . 1108 | 3412 |
| HEART20049400 | 970 | 178 . . . 549 | 3413 |
| HEART20049410 | 971 | 44 . . . 613 | 3414 |
| HEART20049800 | 972 | 15 . . . 509 | 3415 |
| HEART20061950 | 973 | 153 . . . 1961 | 3416 |
| HEART20063340 | 974 | 220 . . . 1281 | 3417 |
| HEART20067870 | 975 | 256 . . . 855 | 3418 |
| HEART20067890 | 976 | 3 . . . 338 | 3419 |
| HEART20072310 | 977 | 47 . . . 1057 | 3420 |
| HEART20074430 | 978 | 205 . . . 540 | 3421 |
| HEART20077670 | 979 | 90 . . . 1223 | 3422 |
| HEART20083640 | 980 | 192 . . . 1376 | 3423 |
| HEART20089940 | 981 | 150 . . . 1523 | 3424 |
| HEART20090000 | 982 | 197 . . . 2116 | 3425 |
| HEART20095990 | 983 | 523 . . . 1077 | 3426 |
| HHDPC10000650 | 984 | 920 . . . 1531 | 3427 |
| HHDPC10000830 | 985 | 110 . . . 520 | 3428 |
| HHDPC20001040 | 986 | 2080 . . . 2442 | 3429 |
| HHDPC20006920 | 987 | 1758 . . . 2066 | 3430 |
| HHDPC20014320 | 988 | 5 . . . 526 | 3431 |
| HHDPC20030490 | 989 | 71 . . . 529 | 3432 |
| HHDPC20031130 | 990 | 369 . . . 2249 | 3433 |
| HHDPC20034390 | 991 | 94 . . . 705 | 3434 |
| HHDPC20034720 | 992 | 167 . . . 868 | 3435 |
| HHDPC20057420 | 993 | 44 . . . 484 | 3436 |
| HHDPC20057940 | 994 | 1 . . . 393 | 3437 |
| HHDPC20064600 | 995 | 231 . . . 1493 | 3438 |
| HHDPC20068620 | 996 | 515 . . . 1816 | 3439 |
| HHDPC20084140 | 997 | 163 . . . 2109 | 3440 |
| HHDPC20091140 | 998 | 160 . . . 504 | 3441 |
| HHDPC20091780 | 999 | 49 . . . 1623 | 3442 |
| HHDPC20092080 | 1000 | 133 . . . 702 | 3443 |
| HHDPC20095280 | 1001 | 332 . . . 745 | 3444 |
| HLUNG10000550 | 1002 | 729 . . . 1058 | 3445 |
| HLUNG20016330 | 1003 | 86 . . . >1958 | 3446 |
| HLUNG20016770 | 1004 | 919 . . . 1242 | 3447 |
| HLUNG20017120 | 1005 | 644 . . . 1144 | 3448 |
| HLUNG20023340 | 1006 | 228 . . . 1181 | 3449 |
| HLUNG20033780 | 1007 | 156 . . . 2285 | 3450 |
| HLUNG20084390 | 1008 | 542 . . . 997 | 3451 |
| IMR3220002430 | 1009 | 34 . . . 1176 | 3452 |
| KIDNE20002520 | 1010 | 22 . . . 1593 | 3453 |
| KIDNE20003940 | 1011 | 187 . . . 1986 | 3454 |
| KIDNE20006780 | 1012 | 164 . . . 829 | 3455 |
| KIDNE20007210 | 1013 | 27 . . . 350 | 3456 |
| KIDNE20007770 | 1014 | 27 . . . 1415 | 3457 |
| KIDNE20008010 | 1015 | 127 . . . >1986 | 3458 |
| KIDNE20009470 | 1016 | 9 . . . >2664 | 3459 |
| KIDNE20011170 | 1017 | 347 . . . 817 | 3460 |
| KIDNE20011400 | 1018 | 1798 . . . 2334 | 3461 |
| KIDNE20013730 | 1019 | 373 . . . 777 | 3462 |
| KIDNE20017130 | 1020 | 226 . . . 1740 | 3463 |
| KIDNE20018730 | 1021 | 35 . . . 631 | 3464 |
| KIDNE20018970 | 1022 | 232 . . . 546 | 3465 |
| KIDNE20020150 | 1023 | 215 . . . 1645 | 3466 |
| KIDNE20021680 | 1024 | 140 . . . 1096 | 3467 |
| KIDNE20021910 | 1025 | 15 . . . 2018 | 3468 |
| KIDNE20021980 | 1026 | 1578 . . . 1910 | 3469 |
| KIDNE20022620 | 1027 | 112 . . . 2277 | 3470 |
| KIDNE20024830 | 1028 | 1912 . . . >2715 | 3471 |
| KIDNE20027250 | 1029 | 359 . . . 955 | 3472 |
| KIDNE20027950 | 1030 | 97 . . . 543 | 3473 |
| KIDNE20028390 | 1031 | 31 . . . 519 | 3474 |
| KIDNE20028720 | 1032 | 70 . . . 1122 | 3475 |
| KIDNE20028830 | 1033 | 107 . . . 1258 | 3476 |
| KIDNE20029800 | 1034 | 1056 . . . 1358 | 3477 |
| KIDNE20067330 | 1035 | 930 . . . 1865 | 3478 |
| KIDNE20079440 | 1036 | 192 . . . 539 | 3479 |
| KIDNE20096280 | 1037 | 266 . . . 1354 | 3480 |
| KIDNE20096470 | 1038 | 31 . . . 639 | 3481 |
| KIDNE20100070 | 1039 | 471 . . . 2204 | 3482 |
| KIDNE20100840 | 1040 | 167 . . . 778 | 3483 |
| KIDNE20101370 | 1041 | 9 . . . 503 | 3484 |
| KIDNE20101510 | 1042 | 62 . . . 1795 | 3485 |
| KIDNE20102650 | 1043 | 322 . . . 1614 | 3486 |
| KIDNE20102710 | 1044 | 791 . . . 1501 | 3487 |
| KIDNE20104300 | 1045 | 188 . . . >1957 | 3488 |
| KIDNE20106740 | 1046 | 55 . . . 411 | 3489 |
| KIDNE20107390 | 1047 | 85 . . . 399 | 3490 |
| KIDNE20107500 | 1048 | 180 . . . 641 | 3491 |
| KIDNE20107620 | 1049 | 222 . . . 2213 | 3492 |
| KIDNE20109730 | 1050 | 57 . . . 1121 | 3493 |
| KIDNE20109890 | 1051 | 254 . . . >2578 | 3494 |
| KIDNE20112000 | 1052 | 430 . . . 750 | 3495 |
| KIDNE20115080 | 1053 | 76 . . . 1092 | 3496 |
| KIDNE20118580 | 1054 | 962 . . . 1387 | 3497 |
| KIDNE20120090 | 1055 | 1334 . . . 1813 | 3498 |
| KIDNE20121880 | 1056 | 192 . . . 866 | 3499 |
| KIDNE20122910 | 1057 | 1623 . . . 2006 | 3500 |
| KIDNE20124400 | 1058 | 532 . . . 2499 | 3501 |
| KIDNE20125630 | 1059 | 67 . . . 504 | 3502 |
| KIDNE20126010 | 1060 | 991 . . . 1407 | 3503 |
| KIDNE20126130 | 1061 | 285 . . . 701 | 3504 |
| KIDNE20127100 | 1062 | 265 . . . 1944 | 3505 |
| KIDNE20127450 | 1063 | 570 . . . 1088 | 3506 |
| KIDNE20127750 | 1064 | 175 . . . 1488 | 3507 |
| KIDNE20130450 | 1065 | 177 . . . 512 | 3508 |
| KIDNE20131580 | 1066 | 194 . . . 1912 | 3509 |
| KIDNE20132180 | 1067 | 894 . . . 1256 | 3510 |
| KIDNE20137340 | 1068 | 889 . . . 1710 | 3511 |
| KIDNE20138010 | 1069 | 1564 . . . 2046 | 3512 |
| KIDNE20141190 | 1070 | 71 . . . 856 | 3513 |
| KIDNE20144890 | 1071 | 385 . . . 738 | 3514 |
| KIDNE20148900 | 1072 | 487 . . . 981 | 3515 |
| KIDNE20163880 | 1073 | 327 . . . 1364 | 3516 |
| KIDNE20180710 | 1074 | 379 . . . 855 | 3517 |
| KIDNE20181660 | 1075 | 1109 . . . 1564 | 3518 |
| KIDNE20182690 | 1076 | 553 . . . 2019 | 3519 |
| KIDNE20186780 | 1077 | 837 . . . 1541 | 3520 |
| KIDNE20190740 | 1078 | 321 . . . 653 | 3521 |
| LIVER10001260 | 1079 | 1413 . . . 1748 | 3522 |
| LIVER10004790 | 1080 | 112 . . . 1113 | 3523 |
| LIVER20002160 | 1081 | 79 . . . 1944 | 3524 |
| LIVER20011130 | 1082 | 898 . . . 1569 | 3525 |
| LIVER20011910 | 1083 | 27 . . . 425 | 3526 |
| LIVER20028420 | 1084 | 1305 . . . 1724 | 3527 |
| LIVER20035110 | 1085 | 551 . . . 940 | 3528 |
| LIVER20035680 | 1086 | 873 . . . 1283 | 3529 |
| LIVER20038540 | 1087 | 6 . . . 308 | 3530 |
| LIVER20045650 | 1088 | 2359 . . . 2886 | 3531 |
| LIVER20055200 | 1089 | 82 . . . 618 | 3532 |
| LIVER20055440 | 1090 | 1611 . . . 2240 | 3533 |
| LIVER20059810 | 1091 | 1597 . . . 1899 | 3534 |
| LIVER20062510 | 1092 | 631 . . . 999 | 3535 |
| LIVER20064100 | 1093 | 279 . . . 785 | 3536 |
| LIVER20064690 | 1094 | 172 . . . 1161 | 3537 |
| LIVER20075680 | 1095 | 2568 . . . 2939 | 3538 |
| LIVER20080530 | 1096 | 44 . . . 1426 | 3539 |
| LIVER20084730 | 1097 | 240 . . . 788 | 3540 |
| LIVER20085800 | 1098 | 99 . . . 416 | 3541 |
| LIVER20087060 | 1099 | 140 . . . 2056 | 3542 |
| LIVER20087510 | 1100 | 478 . . . 1200 | 3543 |
| LIVER20091180 | 1101 | 18 . . . 374 | 3544 |
| MAMGL10000830 | 1102 | 40 . . . 1551 | 3545 |
| MESAN10001260 | 1103 | 80 . . . 2137 | 3546 |
| MESAN20004570 | 1104 | 354 . . . >2589 | 3547 |
| MESAN20014500 | 1105 | 78 . . . 1976 | 3548 |
| MESAN20025190 | 1106 | 1679 . . . 2323 | 3549 |
| MESAN20027090 | 1107 | 144 . . . 653 | 3550 |
| MESAN20029400 | 1108 | 210 . . . >2998 | 3551 |
| MESAN20031900 | 1109 | 138 . . . 2348 | 3552 |
| MESAN20035290 | 1110 | 99 . . . 797 | 3553 |
| MESAN20036460 | 1111 | 1203 . . . 1844 | 3554 |
| MESAN20038510 | 1112 | 639 . . . 1016 | 3555 |
| MESAN20089360 | 1113 | 386 . . . 802 | 3556 |
| MESAN20101140 | 1114 | 250 . . . 504 | 3557 |
| MESAN20103120 | 1115 | 143 . . . 1201 | 3558 |
| MESAN20106640 | 1116 | 71 . . . 712 | 3559 |
| MESAN20115970 | 1117 | 234 . . . 644 | 3560 |
| MESAN20121130 | 1118 | 7 . . . 942 | 3561 |
| MESAN20125860 | 1119 | 1396 . . . 1875 | 3562 |
| MESAN20127350 | 1120 | 297 . . . 1724 | 3563 |
| MESAN20130220 | 1121 | 106 . . . 1626 | 3564 |
| MESAN20132110 | 1122 | 1363 . . . 2433 | 3565 |
| MESAN20136110 | 1123 | 188 . . . 1582 | 3566 |
| MESAN20138450 | 1124 | 249 . . . 647 | 3567 |
| MESAN20139360 | 1125 | 195 . . . 611 | 3568 |
| MESAN20141920 | 1126 | 250 . . . 2724 | 3569 |
| MESAN20152770 | 1127 | 64 . . . 585 | 3570 |
| MESAN20153910 | 1128 | 141 . . . 443 | 3571 |
| MESAN20154010 | 1129 | 24 . . . 620 | 3572 |
| MESAN20157080 | 1130 | 1336 . . . 1677 | 3573 |
| MESAN20161590 | 1131 | 767 . . . 1081 | 3574 |
| MESAN20164090 | 1132 | 273 . . . 2471 | 3575 |
| MESAN20171520 | 1133 | 103 . . . 774 | 3576 |
| MESAN20174170 | 1134 | 1375 . . . 1743 | 3577 |
| MESAN20182090 | 1135 | 5 . . . >2440 | 3578 |
| MESAN20186700 | 1136 | 1333 . . . >3058 | 3579 |
| NESOP10001080 | 1137 | 149 . . . 1489 | 3580 |
| NOVAR10000150 | 1138 | 1470 . . . 1895 | 3581 |
| NOVAR10000910 | 1139 | 247 . . . 1482 | 3582 |
| NOVAR10001020 | 1140 | 136 . . . 519 | 3583 |
| NOVAR20000380 | 1141 | 422 . . . 844 | 3584 |
| NOVAR20003520 | 1142 | 898 . . . 1377 | 3585 |
| NT2NE20003740 | 1143 | 28 . . . 555 | 3586 |
| NT2NE20010050 | 1144 | 1240 . . . 1725 | 3587 |
| NT2NE20010210 | 1145 | 231 . . . 626 | 3588 |
| NT2NE20010400 | 1146 | 923 . . . 1546 | 3589 |
| NT2NE20010490 | 1147 | 105 . . . 1499 | 3590 |
| NT2NE20015240 | 1148 | 251 . . . 646 | 3591 |
| NT2NE20021620 | 1149 | 785 . . . 2266 | 3592 |
| NT2NE20043780 | 1150 | 815 . . . 1285 | 3593 |
| NT2NE20053580 | 1151 | 9 . . . 413 | 3594 |
| NT2NE20068130 | 1152 | 237 . . . 1601 | 3595 |
| NT2NE20072200 | 1153 | 94 . . . 855 | 3596 |
| NT2NE20074250 | 1154 | 9 . . . 377 | 3597 |
| NT2NE20080170 | 1155 | 129 . . . 2219 | 3598 |
| NT2NE20089610 | 1156 | 1976 . . . 2329 | 3599 |
| NT2NE20089970 | 1157 | 150 . . . 488 | 3600 |
| NT2NE20108540 | 1158 | 504 . . . 806 | 3601 |
| NT2NE20110360 | 1159 | 44 . . . 415 | 3602 |
| NT2NE20118960 | 1160 | 197 . . . 2044 | 3603 |
| NT2NE20122430 | 1161 | 1474 . . . 2016 | 3604 |
| NT2NE20124480 | 1162 | 135 . . . 482 | 3605 |
| NT2NE20125050 | 1163 | 59 . . . 1462 | 3606 |
| NT2NE20130190 | 1164 | 728 . . . 1438 | 3607 |
| NT2NE20131890 | 1165 | 2276 . . . 2611 | 3608 |
| NT2NE20132170 | 1166 | 585 . . . 1694 | 3609 |
| NT2NE20142210 | 1167 | 177 . . . 2585 | 3610 |
| NT2NE20146810 | 1168 | 387 . . . 707 | 3611 |
| NT2NE20152750 | 1169 | 190 . . . 726 | 3612 |
| NT2NE20155110 | 1170 | 486 . . . 893 | 3613 |
| NT2NE20156260 | 1171 | 286 . . . 633 | 3614 |
| NT2NE20157470 | 1172 | 222 . . . 1199 | 3615 |
| NT2NE20158600 | 1173 | 348 . . . 749 | 3616 |
| NT2NE20159740 | 1174 | 68 . . . 664 | 3617 |
| NT2NE20172590 | 1175 | 799 . . . 1131 | 3618 |
| NT2NE20174800 | 1176 | 525 . . . 860 | 3619 |
| NT2NE20174920 | 1177 | 53 . . . 538 | 3620 |
| NT2NE20177520 | 1178 | 636 . . . 2108 | 3621 |
| NT2NE20181650 | 1179 | 496 . . . 1605 | 3622 |
| NT2NE20183760 | 1180 | 1087 . . . 1548 | 3623 |
| NT2NE20184900 | 1181 | 2947 . . . >3371 | 3624 |
| NT2NE20187390 | 1182 | 170 . . . 580 | 3625 |
| NT2RI20001330 | 1183 | 84 . . . 1901 | 3626 |
| NT2RI20003480 | 1184 | 166 . . . 1905 | 3627 |
| NT2RI20005750 | 1185 | 66 . . . 1088 | 3628 |
| NT2RI20009870 | 1186 | 127 . . . 1053 | 3629 |
| NT2RI20022600 | 1187 | 1040 . . . 1621 | 3630 |
| NT2RI20023160 | 1188 | 165 . . . 947 | 3631 |
| NT2RI20023590 | 1189 | 666 . . . 1058 | 3632 |
| NT2RI20023910 | 1190 | 546 . . . 2945 | 3633 |
| NT2RI20025400 | 1191 | 315 . . . 902 | 3634 |
| NT2RI20025640 | 1192 | 989 . . . 1660 | 3635 |
| NT2RI20028470 | 1193 | 140 . . . 1297 | 3636 |
| NT2RI20036670 | 1194 | 334 . . . 852 | 3637 |
| NT2RI20040930 | 1195 | 362 . . . 1075 | 3638 |
| NT2RI20040990 | 1196 | 124 . . . 2169 | 3639 |
| NT2RI20041880 | 1197 | 79 . . . 1368 | 3640 |
| NT2RI20046080 | 1198 | 36 . . . 824 | 3641 |
| NT2RI20048840 | 1199 | 330 . . . 1349 | 3642 |
| NT2RI20050960 | 1200 | 223 . . . 1701 | 3643 |
| NT2RI20054050 | 1201 | 172 . . . 2154 | 3644 |
| NT2RI20055790 | 1202 | 489 . . . 1178 | 3645 |
| NT2RI20056700 | 1203 | 115 . . . 1491 | 3646 |
| NT2RI20069730 | 1204 | 607 . . . 1209 | 3647 |
| NT2RI20076290 | 1205 | 145 . . . 1197 | 3648 |
| NT2RI20086220 | 1206 | 67 . . . 1068 | 3649 |
| NT2RI20091730 | 1207 | 113 . . . >2585 | 3650 |
| NT2RI20091940 | 1208 | 699 . . . 1181 | 3651 |
| NT2RI20198260 | 1209 | 70 . . . 372 | 3652 |
| NT2RI20203900 | 1210 | 176 . . . 481 | 3653 |
| NT2RI20207030 | 1211 | 33 . . . 1181 | 3654 |
| NT2RI20216250 | 1212 | 812 . . . 1312 | 3655 |
| NT2RI20240080 | 1213 | 176 . . . 1090 | 3656 |
| NT2RI20244600 | 1214 | 195 . . . 1010 | 3657 |
| NT2RI20244960 | 1215 | 161 . . . 595 | 3658 |
| NT2RI20250750 | 1216 | 263 . . . 1186 | 3659 |
| NT2RI20252550 | 1217 | 927 . . . 1622 | 3660 |
| NT2RI20273230 | 1218 | 40 . . . 1215 | 3661 |
| NT2RP60000770 | 1219 | 1147 . . . 2223 | 3662 |
| NT2RP60000850 | 1220 | 44 . . . >2927 | 3663 |
| NT2RP70010740 | 1221 | 23 . . . 466 | 3664 |
| NT2RP70027380 | 1222 | 86 . . . 3466 | 3665 |
| NT2RP70032610 | 1223 | 1348 . . . 2514 | 3666 |
| NT2RP70036880 | 1224 | 145 . . . 1491 | 3667 |
| NT2RP70037240 | 1225 | 221 . . . 2002 | 3668 |
| NT2RP70043480 | 1226 | 134 . . . 1912 | 3669 |
| NT2RP70044280 | 1227 | 91 . . . 1506 | 3670 |
| NT2RP70045590 | 1228 | 29 . . . 877 | 3671 |
| NT2RP70056750 | 1229 | 177 . . . 3578 | 3672 |
| NT2RP70062230 | 1230 | 310 . . . 2748 | 3673 |
| NT2RP70063950 | 1231 | 499 . . . 3750 | 3674 |
| NT2RP70072690 | 1232 | 1108 . . . 1545 | 3675 |
| NT2RP70075240 | 1233 | 308 . . . 814 | 3676 |
| NT2RP70077660 | 1234 | 2025 . . . 2441 | 3677 |
| NT2RP70078420 | 1235 | 622 . . . 2025 | 3678 |
| NT2RP70080850 | 1236 | 59 . . . 4003 | 3679 |
| NT2RP70081610 | 1237 | 41 . . . 730 | 3680 |
| NT2RP70085440 | 1238 | 1856 . . . 2317 | 3681 |
| NT2RP70102350 | 1239 | 225 . . . 1043 | 3682 |
| NT2RP70105210 | 1240 | 132 . . . 1880 | 3683 |
| NT2RP70110860 | 1241 | 803 . . . 1129 | 3684 |
| NT2RP70111320 | 1242 | 271 . . . 627 | 3685 |
| NT2RP70122910 | 1243 | 789 . . . 1112 | 3686 |
| NT2RP70125160 | 1244 | 10 . . . 624 | 3687 |
| NT2RP70130020 | 1245 | 372 . . . 692 | 3688 |
| NT2RP70133740 | 1246 | 109 . . . 972 | 3689 |
| NT2RP70134990 | 1247 | 24 . . . 392 | 3690 |
| NT2RP70137290 | 1248 | 10 . . . 381 | 3691 |
| NT2RP70137640 | 1249 | 315 . . . >2113 | 3692 |
| NT2RP70143480 | 1250 | 482 . . . 1177 | 3693 |
| NT2RP70147210 | 1251 | 258 . . . 566 | 3694 |
| NT2RP70150800 | 1252 | 32 . . . 445 | 3695 |
| NT2RP70157890 | 1253 | 170 . . . 1006 | 3696 |
| NT2RP70159960 | 1254 | 308 . . . 967 | 3697 |
| NT2RP70169110 | 1255 | 123 . . . 485 | 3698 |
| NT2RP70175670 | 1256 | 89 . . . 421 | 3699 |
| NT2RP70179710 | 1257 | 94 . . . 2604 | 3700 |
| NT2RP70181970 | 1258 | 59 . . . 364 | 3701 |
| NT2RP70188020 | 1259 | 380 . . . 796 | 3702 |
| NT2RP70188710 | 1260 | 491 . . . 1024 | 3703 |
| NT2RP70190640 | 1261 | 72 . . . 1880 | 3704 |
| NT2RP70192730 | 1262 | 180 . . . 1253 | 3705 |
| NT2RP70194450 | 1263 | 1074 . . . 1901 | 3706 |
| NT2RP70195430 | 1264 | 201 . . . 1256 | 3707 |
| NT2RP70198350 | 1265 | 131 . . . 832 | 3708 |
| NT2RP70203790 | 1266 | 2156 . . . >2479 | 3709 |
| NTONG20009770 | 1267 | 124 . . . 1947 | 3710 |
| NTONG20013620 | 1268 | 1798 . . . 2325 | 3711 |
| NTONG20015870 | 1269 | 65 . . . 1627 | 3712 |
| NTONG20028070 | 1270 | 9 . . . 545 | 3713 |
| NTONG20029480 | 1271 | 318 . . . 1898 | 3714 |
| NTONG20029700 | 1272 | 242 . . . 1693 | 3715 |
| NTONG20046140 | 1273 | 308 . . . 1108 | 3716 |
| NTONG20048060 | 1274 | 1488 . . . 1961 | 3717 |
| NTONG20049910 | 1275 | 47 . . . 679 | 3718 |
| NTONG20050620 | 1276 | 141 . . . 521 | 3719 |
| NTONG20050860 | 1277 | 59 . . . 877 | 3720 |
| NTONG20051530 | 1278 | 78 . . . 1697 | 3721 |
| NTONG20052650 | 1279 | 84 . . . >2351 | 3722 |
| NTONG20056570 | 1280 | 226 . . . 1326 | 3723 |
| NTONG20061870 | 1281 | 100 . . . 996 | 3724 |
| NTONG20063010 | 1282 | 219 . . . 1856 | 3725 |
| NTONG20064400 | 1283 | 11 . . . 1330 | 3726 |
| NTONG20064840 | 1284 | 1500 . . . 2447 | 3727 |
| NTONG20065010 | 1285 | 156 . . . 494 | 3728 |
| NTONG20066460 | 1286 | 121 . . . 1458 | 3729 |
| NTONG20067090 | 1287 | 1046 . . . 1513 | 3730 |
| NTONG20067830 | 1288 | 17 . . . 1006 | 3731 |
| NTONG20070200 | 1289 | 318 . . . 1418 | 3732 |
| NTONG20070340 | 1290 | 284 . . . 1228 | 3733 |
| NTONG20075220 | 1291 | 242 . . . >2591 | 3734 |
| NTONG20076930 | 1292 | 26 . . . 1534 | 3735 |
| NTONG20077560 | 1293 | 241 . . . 567 | 3736 |
| NTONG20083650 | 1294 | 242 . . . 1711 | 3737 |
| NTONG20088620 | 1295 | 60 . . . >2536 | 3738 |
| NTONG20090600 | 1296 | 517 . . . 1134 | 3739 |
| NTONG20090680 | 1297 | 673 . . . 1389 | 3740 |
| NTONG20092290 | 1298 | 307 . . . 1539 | 3741 |
| NTONG20092330 | 1299 | 229 . . . 2235 | 3742 |
| OCBBF10000540 | 1300 | 858 . . . 1916 | 3743 |
| OCBBF10001750 | 1301 | 245 . . . 1144 | 3744 |
| OCBBF10001850 | 1302 | 419 . . . 2233 | 3745 |
| OCBBF20005230 | 1303 | 56 . . . 640 | 3746 |
| OCBBF20006770 | 1304 | 29 . . . 2275 | 3747 |
| OCBBF20013890 | 1305 | 1978 . . . 2289 | 3748 |
| OCBBF20019380 | 1306 | 69 . . . 1364 | 3749 |
| OCBBF20019830 | 1307 | 325 . . . 1536 | 3750 |
| OCBBF20020150 | 1308 | 2507 . . . 2917 | 3751 |
| OCBBF20020830 | 1309 | 92 . . . 2869 | 3752 |
| OCBBF20022900 | 1310 | 88 . . . 1779 | 3753 |
| OCBBF20023570 | 1311 | 47 . . . 1276 | 3754 |
| OCBBF20026630 | 1312 | 18 . . . 455 | 3755 |
| OCBBF20028050 | 1313 | 128 . . . 1108 | 3756 |
| OCBBF20028650 | 1314 | 706 . . . 2286 | 3757 |
| OCBBF20029800 | 1315 | 334 . . . 699 | 3758 |
| OCBBF20030280 | 1316 | 263 . . . 898 | 3759 |
| OCBBF20030910 | 1317 | 383 . . . 1258 | 3760 |
| OCBBF20032460 | 1318 | 347 . . . 805 | 3761 |
| OCBBF20035930 | 1319 | 65 . . . 895 | 3762 |
| OCBBF20037440 | 1320 | 413 . . . 1024 | 3763 |
| OCBBF20039250 | 1321 | 24 . . . 821 | 3764 |
| OCBBF20041680 | 1322 | 967 . . . 1278 | 3765 |
| OCBBF20045330 | 1323 | 1407 . . . 1886 | 3766 |
| OCBBF20046120 | 1324 | 82 . . . 1641 | 3767 |
| OCBBF20046470 | 1325 | 400 . . . 1137 | 3768 |
| OCBBF20046690 | 1326 | 156 . . . 1730 | 3769 |
| OCBBF20047570 | 1327 | 182 . . . 577 | 3770 |
| OCBBF20048660 | 1328 | 292 . . . 663 | 3771 |
| OCBBF20049300 | 1329 | 721 . . . 2553 | 3772 |
| OCBBF20049840 | 1330 | 246 . . . >2607 | 3773 |
| OCBBF20050770 | 1331 | 724 . . . >2679 | 3774 |
| OCBBF20051610 | 1332 | 41 . . . 493 | 3775 |
| OCBBF20053430 | 1333 | 586 . . . 2478 | 3776 |
| OCBBF20053490 | 1334 | 736 . . . 1068 | 3777 |
| OCBBF20053730 | 1335 | 87 . . . 2090 | 3778 |
| OCBBF20054200 | 1336 | 315 . . . 869 | 3779 |
| OCBBF20054760 | 1337 | 195 . . . 1016 | 3780 |
| OCBBF20059560 | 1338 | 224 . . . >3045 | 3781 |
| OCBBF20060300 | 1339 | 1389 . . . 2171 | 3782 |
| OCBBF20061720 | 1340 | 711 . . . 1139 | 3783 |
| OCBBF20062140 | 1341 | 444 . . . 749 | 3784 |
| OCBBF20062410 | 1342 | 1920 . . . 2240 | 3785 |
| OCBBF20063320 | 1343 | 145 . . . 519 | 3786 |
| OCBBF20066390 | 1344 | 2159 . . . 2713 | 3787 |
| OCBBF20068490 | 1345 | 15 . . . 2702 | 3788 |
| OCBBF20071210 | 1346 | 2029 . . . 3486 | 3789 |
| OCBBF20071840 | 1347 | 45 . . . 1670 | 3790 |
| OCBBF20071960 | 1348 | 1294 . . . 1698 | 3791 |
| OCBBF20072240 | 1349 | 335 . . . 1432 | 3792 |
| OCBBF20072320 | 1350 | 1749 . . . 2087 | 3793 |
| OCBBF20073540 | 1351 | 56 . . . 1132 | 3794 |
| OCBBF20074140 | 1352 | 81 . . . >3793 | 3795 |
| OCBBF20076220 | 1353 | 1552 . . . 2013 | 3796 |
| OCBBF20078920 | 1354 | 849 . . . 1340 | 3797 |
| OCBBF20079310 | 1355 | 240 . . . 1349 | 3798 |
| OCBBF20079460 | 1356 | 12 . . . 2099 | 3799 |
| OCBBF20080050 | 1357 | 159 . . . 2150 | 3800 |
| OCBBF20080410 | 1358 | 122 . . . 1672 | 3801 |
| OCBBF20081380 | 1359 | 742 . . . 1140 | 3802 |
| OCBBF20082830 | 1360 | 139 . . . 1209 | 3803 |
| OCBBF20084660 | 1361 | 74 . . . 1621 | 3804 |
| OCBBF20085200 | 1362 | 659 . . . 1207 | 3805 |
| OCBBF20086400 | 1363 | 63 . . . 797 | 3806 |
| OCBBF20086910 | 1364 | 541 . . . 2304 | 3807 |
| OCBBF20087010 | 1365 | 325 . . . 633 | 3808 |
| OCBBF20088140 | 1366 | 1575 . . . 1916 | 3809 |
| OCBBF20088220 | 1367 | 2505 . . . 2915 | 3810 |
| OCBBF20091150 | 1368 | 256 . . . 648 | 3811 |
| OCBBF20094240 | 1369 | 82 . . . 1122 | 3812 |
| OCBBF20097720 | 1370 | 471 . . . 815 | 3813 |
| OCBBF20100400 | 1371 | 407 . . . 3043 | 3814 |
| OCBBF20103130 | 1372 | 114 . . . 1439 | 3815 |
| OCBBF20104040 | 1373 | 310 . . . 612 | 3816 |
| OCBBF20105570 | 1374 | 2404 . . . 2874 | 3817 |
| OCBBF20107090 | 1375 | 127 . . . 1935 | 3818 |
| OCBBF20107920 | 1376 | 1692 . . . 2018 | 3819 |
| OCBBF20108190 | 1377 | 278 . . . 1591 | 3820 |
| OCBBF20108430 | 1378 | 832 . . . 1851 | 3821 |
| OCBBF20108580 | 1379 | 1152 . . . 2354 | 3822 |
| OCBBF20108630 | 1380 | 249 . . . 1133 | 3823 |
| OCBBF20109310 | 1381 | 34 . . . 2355 | 3824 |
| OCBBF20111770 | 1382 | 291 . . . 629 | 3825 |
| OCBBF20116850 | 1383 | 117 . . . 2354 | 3826 |
| OCBBF20118970 | 1384 | 361 . . . 855 | 3827 |
| OCBBF20120390 | 1385 | 129 . . . 2282 | 3828 |
| OCBBF20121390 | 1386 | 524 . . . 2254 | 3829 |
| OCBBF20122620 | 1387 | 990 . . . 1544 | 3830 |
| OCBBF20124360 | 1388 | 1223 . . . 1951 | 3831 |
| OCBBF20125530 | 1389 | 379 . . . 2310 | 3832 |
| OCBBF20126780 | 1390 | 1270 . . . 1599 | 3833 |
| OCBBF20127040 | 1391 | 177 . . . 2327 | 3834 |
| OCBBF20127140 | 1392 | 1018 . . . 1530 | 3835 |
| OCBBF20127550 | 1393 | 103 . . . >2362 | 3836 |
| OCBBF20128120 | 1394 | 118 . . . 1311 | 3837 |
| OCBBF20129360 | 1395 | 378 . . . >3283 | 3838 |
| OCBBF20130110 | 1396 | 132 . . . 452 | 3839 |
| OCBBF20130910 | 1397 | 2527 . . . 2892 | 3840 |
| OCBBF20132850 | 1398 | 1172 . . . 3331 | 3841 |
| OCBBF20139260 | 1399 | 772 . . . 2592 | 3842 |
| OCBBF20140640 | 1400 | 241 . . . 894 | 3843 |
| OCBBF20140890 | 1401 | 39 . . . >4369 | 3844 |
| OCBBF20145760 | 1402 | 894 . . . 1757 | 3845 |
| OCBBF20148280 | 1403 | 87 . . . 1787 | 3846 |
| OCBBF20148730 | 1404 | 50 . . . 1855 | 3847 |
| OCBBF20149280 | 1405 | 1385 . . . 2035 | 3848 |
| OCBBF20151150 | 1406 | 135 . . . 2216 | 3849 |
| OCBBF20153340 | 1407 | 135 . . . >2621 | 3850 |
| OCBBF20153350 | 1408 | 1616 . . . 1942 | 3851 |
| OCBBF20155060 | 1409 | 102 . . . 3245 | 3852 |
| OCBBF20164050 | 1410 | 50 . . . 370 | 3853 |
| OCBBF20164670 | 1411 | 40 . . . 1077 | 3854 |
| OCBBF20170690 | 1412 | 159 . . . 503 | 3855 |
| OCBBF20173060 | 1413 | 63 . . . 383 | 3856 |
| OCBBF20173250 | 1414 | 315 . . . 692 | 3857 |
| OCBBF20173980 | 1415 | 262 . . . 1857 | 3858 |
| OCBBF20178150 | 1416 | 1245 . . . 2231 | 3859 |
| OCBBF20178880 | 1417 | 2740 . . . 3207 | 3860 |
| OCBBF20178990 | 1418 | 1328 . . . 1819 | 3861 |
| OCBBF20180120 | 1419 | 218 . . . 1780 | 3862 |
| OCBBF20180840 | 1420 | 1169 . . . 1540 | 3863 |
| OCBBF20186870 | 1421 | 1278 . . . 1736 | 3864 |
| OCBBF20188730 | 1422 | 320 . . . 766 | 3865 |
| OCBBF20189560 | 1423 | 1512 . . . 2165 | 3866 |
| PANCR10000910 | 1424 | 1219 . . . >1943 | 3867 |
| PEBLM10000240 | 1425 | 306 . . . 674 | 3868 |
| PEBLM10000710 | 1426 | 1719 . . . 1940 | 3869 |
| PEBLM20013120 | 1427 | 26 . . . 952 | 3870 |
| PEBLM20024320 | 1428 | 612 . . . 1406 | 3871 |
| PEBLM20024550 | 1429 | 1179 . . . 1499 | 3872 |
| PEBLM20040150 | 1430 | 1731 . . . 2165 | 3873 |
| PEBLM20042900 | 1431 | 226 . . . >2439 | 3874 |
| PEBLM20044520 | 1432 | 922 . . . 1974 | 3875 |
| PEBLM20052820 | 1433 | 411 . . . 782 | 3876 |
| PEBLM20060310 | 1434 | 1731 . . . >2083 | 3877 |
| PEBLM20060360 | 1435 | 58 . . . 330 | 3878 |
| PEBLM20060490 | 1436 | 431 . . . 892 | 3879 |
| PEBLM20071880 | 1437 | 497 . . . 814 | 3880 |
| PEBLM20072960 | 1438 | 128 . . . 1093 | 3881 |
| PEBLM20074370 | 1439 | 60 . . . 458 | 3882 |
| PEBLM20075980 | 1440 | 53 . . . 1153 | 3883 |
| PEBLM20078320 | 1441 | 5 . . . 1672 | 3884 |
| PEBLM20085760 | 1442 | 122 . . . 763 | 3885 |
| PERIC10000250 | 1443 | 689 . . . 1516 | 3886 |
| PERIC20002140 | 1444 | 151 . . . 1239 | 3887 |
| PERIC20003860 | 1445 | 33 . . . 359 | 3888 |
| PERIC20003870 | 1446 | 40 . . . 2817 | 3889 |
| PERIC20004220 | 1447 | 130 . . . 1935 | 3890 |
| PERIC20004780 | 1448 | 132 . . . 956 | 3891 |
| PLACE50000660 | 1449 | 329 . . . 2527 | 3892 |
| PLACE60003480 | 1450 | 35 . . . 877 | 3893 |
| PLACE60004630 | 1451 | 216 . . . 533 | 3894 |
| PLACE60060420 | 1452 | 34 . . . 246 | 3895 |
| PLACE60079250 | 1453 | 336 . . . >3307 | 3896 |
| PLACE60086400 | 1454 | 279 . . . 764 | 3897 |
| PLACE60119750 | 1455 | 28 . . . 570 | 3898 |
| PLACE60121080 | 1456 | 769 . . . 1182 | 3899 |
| PLACE60136500 | 1457 | 1900 . . . 2241 | 3900 |
| PLACE60136720 | 1458 | 78 . . . 2519 | 3901 |
| PLACE60138830 | 1459 | 750 . . . 1202 | 3902 |
| PLACE60153220 | 1460 | 247 . . . 561 | 3903 |
| PLACE60155130 | 1461 | 833 . . . 1171 | 3904 |
| PLACE60161600 | 1462 | 77 . . . 1099 | 3905 |
| PLACE60169420 | 1463 | 165 . . . 1097 | 3906 |
| PLACE60177140 | 1464 | 1321 . . . 2190 | 3907 |
| PLACE60181070 | 1465 | 1355 . . . 1708 | 3908 |
| PLACE60187690 | 1466 | 1606 . . . 1941 | 3909 |
| PLACE60188340 | 1467 | 430 . . . 1224 | 3910 |
| PROST10003220 | 1468 | 187 . . . 933 | 3911 |
| PROST10004800 | 1469 | 87 . . . 419 | 3912 |
| PROST20005050 | 1470 | 673 . . . 1164 | 3913 |
| PROST20005670 | 1471 | 1132 . . . >2293 | 3914 |
| PROST20021010 | 1472 | 612 . . . 926 | 3915 |
| PROST20024890 | 1473 | 14 . . . 514 | 3916 |
| PROST20029270 | 1474 | 1016 . . . 1363 | 3917 |
| PROST20047270 | 1475 | 1300 . . . 2250 | 3918 |
| PROST20047390 | 1476 | 163 . . . 2283 | 3919 |
| PROST20050670 | 1477 | 1622 . . . 2074 | 3920 |
| PROST20052280 | 1478 | 326 . . . 634 | 3921 |
| PROST20057930 | 1479 | 237 . . . >2116 | 3922 |
| PROST20059040 | 1480 | 1047 . . . 1355 | 3923 |
| PROST20066880 | 1481 | 1937 . . . 2521 | 3924 |
| PROST20079500 | 1482 | 863 . . . 1957 | 3925 |
| PROST20083600 | 1483 | 209 . . . 1087 | 3926 |
| PROST20087700 | 1484 | 481 . . . 1287 | 3927 |
| PROST20097950 | 1485 | 91 . . . 405 | 3928 |
| PROST20100460 | 1486 | 63 . . . 1796 | 3929 |
| PROST20104000 | 1487 | 1059 . . . 2012 | 3930 |
| PROST20107820 | 1488 | 304 . . . 1524 | 3931 |
| PROST20111050 | 1489 | 772 . . . 1281 | 3932 |
| PROST20112970 | 1490 | 66 . . . 671 | 3933 |
| PROST20114390 | 1491 | 1291 . . . 1749 | 3934 |
| PROST20116600 | 1492 | 4 . . . 339 | 3935 |
| PROST20120050 | 1493 | 176 . . . 589 | 3936 |
| PROST20120160 | 1494 | 283 . . . 597 | 3937 |
| PROST20121900 | 1495 | 68 . . . 385 | 3938 |
| PROST20123530 | 1496 | 1619 . . . 2044 | 3939 |
| PROST20127400 | 1497 | 1156 . . . 1524 | 3940 |
| PROST20127800 | 1498 | 942 . . . 2120 | 3941 |
| PROST20130530 | 1499 | 416 . . . 1588 | 3942 |
| PROST20132600 | 1500 | 1447 . . . 2040 | 3943 |
| PROST20133270 | 1501 | 2 . . . 529 | 3944 |
| PROST20144220 | 1502 | 1011 . . . 1367 | 3945 |
| PROST20146010 | 1503 | 298 . . . 1953 | 3946 |
| PROST20149160 | 1504 | 1677 . . . 1991 | 3947 |
| PROST20149250 | 1505 | 635 . . . 1201 | 3948 |
| PROST20151240 | 1506 | 300 . . . 938 | 3949 |
| PROST20152460 | 1507 | 1542 . . . 2084 | 3950 |
| PROST20153320 | 1508 | 184 . . . 540 | 3951 |
| PROST20159240 | 1509 | 286 . . . 612 | 3952 |
| PROST20161950 | 1510 | 90 . . . 716 | 3953 |
| PROST20164440 | 1511 | 2570 . . . 3004 | 3954 |
| PROST20166680 | 1512 | 53 . . . 874 | 3955 |
| PROST20168290 | 1513 | 1757 . . . 2143 | 3956 |
| PROST20169800 | 1514 | 168 . . . 1763 | 3957 |
| PROST20170980 | 1515 | 28 . . . 1245 | 3958 |
| PROST20171280 | 1516 | 306 . . . 1493 | 3959 |
| PROST20175290 | 1517 | 1538 . . . 2323 | 3960 |
| PROST20176170 | 1518 | 998 . . . 2053 | 3961 |
| PROST20178360 | 1519 | 72 . . . 566 | 3962 |
| PROST20185830 | 1520 | 1200 . . . 2015 | 3963 |
| PROST20189770 | 1521 | 219 . . . 2018 | 3964 |
| PROST20191640 | 1522 | 318 . . . 1229 | 3965 |
| PUAEN10000850 | 1523 | 121 . . . 2040 | 3966 |
| PUAEN20003740 | 1524 | 104 . . . 409 | 3967 |
| PUAEN20011880 | 1525 | 28 . . . 2028 | 3968 |
| PUAEN20015260 | 1526 | 141 . . . 881 | 3969 |
| PUAEN20015860 | 1527 | 71 . . . 1846 | 3970 |
| PUAEN20018820 | 1528 | 41 . . . 1870 | 3971 |
| PUAEN20025680 | 1529 | 667 . . . 1584 | 3972 |
| PUAEN20027580 | 1530 | 36 . . . 512 | 3973 |
| PUAEN20030180 | 1531 | 127 . . . 978 | 3974 |
| PUAEN20040670 | 1532 | 326 . . . 2644 | 3975 |
| PUAEN20044000 | 1533 | 541 . . . 957 | 3976 |
| PUAEN20045110 | 1534 | 335 . . . 886 | 3977 |
| PUAEN20045250 | 1535 | 335 . . . 1054 | 3978 |
| PUAEN20051100 | 1536 | 228 . . . 1319 | 3979 |
| PUAEN20052470 | 1537 | 1699 . . . 2046 | 3980 |
| PUAEN20055020 | 1538 | 295 . . . 2553 | 3981 |
| PUAEN20078980 | 1539 | 6 . . . 989 | 3982 |
| PUAEN20081230 | 1540 | 62 . . . 469 | 3983 |
| PUAEN20083140 | 1541 | 104 . . . 1687 | 3984 |
| PUAEN20085150 | 1542 | 167 . . . 502 | 3985 |
| PUAEN20108240 | 1543 | 2 . . . 1993 | 3986 |
| RECTM10001410 | 1544 | 426 . . . 1631 | 3987 |
| RECTM20003490 | 1545 | 876 . . . 1193 | 3988 |
| RECTM20005100 | 1546 | 149 . . . 1273 | 3989 |
| SALGL10001710 | 1547 | 271 . . . 1722 | 3990 |
| SKMUS20001980 | 1548 | 75 . . . 1034 | 3991 |
| SKMUS20003610 | 1549 | 86 . . . 910 | 3992 |
| SKMUS20007010 | 1550 | 24 . . . 977 | 3993 |
| SKMUS20007800 | 1551 | 708 . . . >1835 | 3994 |
| SKMUS20011640 | 1552 | 16 . . . 408 | 3995 |
| SKMUS20012010 | 1553 | 300 . . . 1019 | 3996 |
| SKMUS20016220 | 1554 | 80 . . . 1267 | 3997 |
| SKMUS20018230 | 1555 | 98 . . . 442 | 3998 |
| SKMUS20018500 | 1556 | 273 . . . 1172 | 3999 |
| SKMUS20020840 | 1557 | 79 . . . 1014 | 4000 |
| SKMUS20021530 | 1558 | 432 . . . 2135 | 4001 |
| SKMUS20024750 | 1559 | 201 . . . 1208 | 4002 |
| SKMUS20028210 | 1560 | 358 . . . 753 | 4003 |
| SKMUS20028400 | 1561 | 18 . . . 644 | 4004 |
| SKMUS20029200 | 1562 | 174 . . . 1130 | 4005 |
| SKMUS20031680 | 1563 | 171 . . . 485 | 4006 |
| SKMUS20046670 | 1564 | 234 . . . 617 | 4007 |
| SKMUS20048970 | 1565 | 104 . . . 1132 | 4008 |
| SKMUS20049030 | 1566 | 191 . . . 1096 | 4009 |
| SKMUS20077400 | 1567 | 170 . . . 772 | 4010 |
| SKMUS20084740 | 1568 | 83 . . . >1516 | 4011 |
| SKNMC20006220 | 1569 | 1176 . . . 1856 | 4012 |
| SKNSH20008190 | 1570 | 490 . . . 2289 | 4013 |
| SKNSH20020540 | 1571 | 2184 . . . 2924 | 4014 |
| SKNSH20028660 | 1572 | 192 . . . 581 | 4015 |
| SKNSH20031740 | 1573 | 120 . . . 563 | 4016 |
| SKNSH20034660 | 1574 | 562 . . . 996 | 4017 |
| SKNSH20051940 | 1575 | 1006 . . . 1488 | 4018 |
| SKNSH20062340 | 1576 | 85 . . . 453 | 4019 |
| SKNSH20063040 | 1577 | 91 . . . 768 | 4020 |
| SKNSH20080430 | 1578 | 81 . . . 524 | 4021 |
| SKNSH20087770 | 1579 | 107 . . . >1808 | 4022 |
| SKNSH20089400 | 1580 | 34 . . . 1092 | 4023 |
| SKNSH20091970 | 1581 | 181 . . . 489 | 4024 |
| SMINT20001760 | 1582 | 267 . . . 1706 | 4025 |
| SMINT20005410 | 1583 | 138 . . . 557 | 4026 |
| SMINT20008240 | 1584 | 1123 . . . 1500 | 4027 |
| SMINT20009840 | 1585 | 31 . . . 750 | 4028 |
| SMINT20011140 | 1586 | 1254 . . . 1664 | 4029 |
| SMINT20011580 | 1587 | 131 . . . 811 | 4030 |
| SMINT20011990 | 1588 | 132 . . . 512 | 4031 |
| SMINT20013480 | 1589 | 87 . . . 686 | 4032 |
| SMINT20014580 | 1590 | 57 . . . 410 | 4033 |
| SMINT20015590 | 1591 | 1375 . . . 1818 | 4034 |
| SMINT20022020 | 1592 | 133 . . . 726 | 4035 |
| SMINT20023280 | 1593 | 890 . . . 1345 | 4036 |
| SMINT20024570 | 1594 | 1852 . . . 2370 | 4037 |
| SMINT20026890 | 1595 | 541 . . . 2790 | 4038 |
| SMINT20028820 | 1596 | 1240 . . . 1749 | 4039 |
| SMINT20029760 | 1597 | 236 . . . 1282 | 4040 |
| SMINT20033170 | 1598 | 539 . . . 931 | 4041 |
| SMINT20033400 | 1599 | 20 . . . 778 | 4042 |
| SMINT20035690 | 1600 | 11 . . . 1411 | 4043 |
| SMINT20040860 | 1601 | 39 . . . 1169 | 4044 |
| SMINT20042990 | 1602 | 397 . . . 750 | 4045 |
| SMINT20047810 | 1603 | 109 . . . 588 | 4046 |
| SMINT20049090 | 1604 | 99 . . . 641 | 4047 |
| SMINT20050750 | 1605 | 101 . . . 907 | 4048 |
| SMINT20051610 | 1606 | 56 . . . 1513 | 4049 |
| SMINT20053300 | 1607 | 1251 . . . 1598 | 4050 |
| SMINT20053870 | 1608 | 85 . . . 894 | 4051 |
| SMINT20056210 | 1609 | 356 . . . 754 | 4052 |
| SMINT20058000 | 1610 | 200 . . . 565 | 4053 |
| SMINT20060780 | 1611 | 18 . . . 554 | 4054 |
| SMINT20065960 | 1612 | 859 . . . 1314 | 4055 |
| SMINT20068010 | 1613 | 136 . . . 1026 | 4056 |
| SMINT20071400 | 1614 | 212 . . . 1183 | 4057 |
| SMINT20073650 | 1615 | 59 . . . 1549 | 4058 |
| SMINT20076470 | 1616 | 1678 . . . 1983 | 4059 |
| SMINT20080540 | 1617 | 1280 . . . 1606 | 4060 |
| SMINT20089170 | 1618 | 54 . . . 530 | 4061 |
| SMINT20092330 | 1619 | 169 . . . 858 | 4062 |
| SMINT20092720 | 1620 | 1640 . . . 2293 | 4063 |
| SMINT20095050 | 1621 | 733 . . . 1107 | 4064 |
| SMINT20098320 | 1622 | 112 . . . 465 | 4065 |
| SMINT20100680 | 1623 | 237 . . . 614 | 4066 |
| SMINT20101440 | 1624 | 187 . . . 2109 | 4067 |
| SMINT20102780 | 1625 | 26 . . . 1642 | 4068 |
| SMINT20103690 | 1626 | 208 . . . 960 | 4069 |
| SMINT20105000 | 1627 | 194 . . . 514 | 4070 |
| SMINT20105330 | 1628 | 1580 . . . 2020 | 4071 |
| SMINT20106290 | 1629 | 501 . . . 1802 | 4072 |
| SMINT20106720 | 1630 | 80 . . . 1498 | 4073 |
| SMINT20108530 | 1631 | 185 . . . 523 | 4074 |
| SMINT20109970 | 1632 | 1444 . . . >1974 | 4075 |
| SMINT20110330 | 1633 | 1398 . . . 2222 | 4076 |
| SMINT20110660 | 1634 | 1108 . . . 1500 | 4077 |
| SMINT20112730 | 1635 | 80 . . . 1564 | 4078 |
| SMINT20115880 | 1636 | 679 . . . 1746 | 4079 |
| SMINT20121220 | 1637 | 263 . . . >1798 | 4080 |
| SMINT20121950 | 1638 | 6 . . . 443 | 4081 |
| SMINT20122850 | 1639 | 454 . . . 777 | 4082 |
| SMINT20122910 | 1640 | 1516 . . . 2094 | 4083 |
| SMINT20127350 | 1641 | 622 . . . 1449 | 4084 |
| SMINT20127930 | 1642 | 67 . . . 1554 | 4085 |
| SMINT20130320 | 1643 | 178 . . . 2601 | 4086 |
| SMINT20131810 | 1644 | 583 . . . 1257 | 4087 |
| SMINT20132280 | 1645 | 293 . . . 655 | 4088 |
| SMINT20136130 | 1646 | 1291 . . . 1752 | 4089 |
| SMINT20138900 | 1647 | 87 . . . 1439 | 4090 |
| SMINT20144430 | 1648 | 54 . . . 647 | 4091 |
| SMINT20144800 | 1649 | 171 . . . 1394 | 4092 |
| SMINT20144890 | 1650 | 209 . . . 520 | 4093 |
| SMINT20152940 | 1651 | 386 . . . 985 | 4094 |
| SMINT20153260 | 1652 | 135 . . . 1838 | 4095 |
| SMINT20153530 | 1653 | 1186 . . . 1524 | 4096 |
| SMINT20154540 | 1654 | 107 . . . 1339 | 4097 |
| SMINT20155180 | 1655 | 20 . . . 763 | 4098 |
| SMINT20157450 | 1656 | 669 . . . 1118 | 4099 |
| SMINT20158100 | 1657 | 30 . . . 587 | 4100 |
| SMINT20161220 | 1658 | 397 . . . 1977 | 4101 |
| SMINT20162860 | 1659 | 36 . . . 494 | 4102 |
| SMINT20163960 | 1660 | 665 . . . 1036 | 4103 |
| SMINT20164400 | 1661 | 125 . . . 706 | 4104 |
| SMINT20164770 | 1662 | 529 . . . 870 | 4105 |
| SMINT20168570 | 1663 | 1593 . . . 2069 | 4106 |
| SMINT20173190 | 1664 | 251 . . . 829 | 4107 |
| SMINT20173240 | 1665 | 253 . . . 582 | 4108 |
| SMINT20174360 | 1666 | 978 . . . 1733 | 4109 |
| SMINT20177360 | 1667 | 172 . . . 771 | 4110 |
| SMINT20178550 | 1668 | 51 . . . 692 | 4111 |
| SMINT20179740 | 1669 | 78 . . . 1865 | 4112 |
| SMINT20183530 | 1670 | 1130 . . . 2530 | 4113 |
| SMINT20190170 | 1671 | 80 . . . 1567 | 4114 |
| SMINT20191420 | 1672 | 49 . . . 1365 | 4115 |
| SMINT20191530 | 1673 | 40 . . . 2040 | 4116 |
| SMINT20192000 | 1674 | 49 . . . 435 | 4117 |
| SPLEN10000830 | 1675 | 1586 . . . 2053 | 4118 |
| SPLEN20000640 | 1676 | 27 . . . 755 | 4119 |
| SPLEN20002220 | 1677 | 87 . . . 434 | 4120 |
| SPLEN20003070 | 1678 | 684 . . . 1046 | 4121 |
| SPLEN20006070 | 1679 | 78 . . . 2837 | 4122 |
| SPLEN20008390 | 1680 | 375 . . . 2378 | 4123 |
| SPLEN20008740 | 1681 | 66 . . . 1547 | 4124 |
| SPLEN20008820 | 1682 | 31 . . . 1872 | 4125 |
| SPLEN20011410 | 1683 | 199 . . . 2394 | 4126 |
| SPLEN20013540 | 1684 | 978 . . . 1310 | 4127 |
| SPLEN20016260 | 1685 | 906 . . . 1748 | 4128 |
| SPLEN20019450 | 1686 | 180 . . . 680 | 4129 |
| SPLEN20020070 | 1687 | 65 . . . 451 | 4130 |
| SPLEN20021660 | 1688 | 130 . . . 771 | 4131 |
| SPLEN20022230 | 1689 | 133 . . . 1026 | 4132 |
| SPLEN20023140 | 1690 | 1153 . . . 1605 | 4133 |
| SPLEN20026950 | 1691 | 855 . . . 3383 | 4134 |
| SPLEN20027440 | 1692 | 29 . . . 2488 | 4135 |
| SPLEN20029310 | 1693 | 70 . . . 585 | 4136 |
| SPLEN20031600 | 1694 | 1658 . . . 2083 | 4137 |
| SPLEN20032040 | 1695 | 357 . . . 746 | 4138 |
| SPLEN20032190 | 1696 | 441 . . . 785 | 4139 |
| SPLEN20033960 | 1697 | 16 . . . 1026 | 4140 |
| SPLEN20039240 | 1698 | 1177 . . . 1929 | 4141 |
| SPLEN20040600 | 1699 | 60 . . . 368 | 4142 |
| SPLEN20054290 | 1700 | 187 . . . 2421 | 4143 |
| SPLEN20076530 | 1701 | 254 . . . 586 | 4144 |
| SPLEN20077500 | 1702 | 79 . . . 1941 | 4145 |
| SPLEN20079260 | 1703 | 535 . . . 1506 | 4146 |
| SPLEN20079510 | 1704 | 1880 . . . >2197 | 4147 |
| SPLEN20084600 | 1705 | 13 . . . 1878 | 4148 |
| SPLEN20095410 | 1706 | 816 . . . 1541 | 4149 |
| SPLEN20095550 | 1707 | 193 . . . >2558 | 4150 |
| SPLEN20095810 | 1708 | 248 . . . 670 | 4151 |
| SPLEN20097330 | 1709 | 1448 . . . 1849 | 4152 |
| SPLEN20099700 | 1710 | 91 . . . >3025 | 4153 |
| SPLEN20101190 | 1711 | 1864 . . . 2250 | 4154 |
| SPLEN20103950 | 1712 | 25 . . . 507 | 4155 |
| SPLEN20106250 | 1713 | 295 . . . 711 | 4156 |
| SPLEN20117660 | 1714 | 662 . . . 1099 | 4157 |
| SPLEN20118300 | 1715 | 332 . . . 1486 | 4158 |
| SPLEN20119810 | 1716 | 526 . . . 1644 | 4159 |
| SPLEN20121750 | 1717 | 464 . . . 1021 | 4160 |
| SPLEN20126190 | 1718 | 274 . . . 2688 | 4161 |
| SPLEN20128000 | 1719 | 96 . . . 1664 | 4162 |
| SPLEN20129610 | 1720 | 207 . . . 557 | 4163 |
| SPLEN20140800 | 1721 | 387 . . . 2144 | 4164 |
| SPLEN20141360 | 1722 | 491 . . . 799 | 4165 |
| SPLEN20141990 | 1723 | 443 . . . 745 | 4166 |
| SPLEN20142100 | 1724 | 301 . . . 996 | 4167 |
| SPLEN20143180 | 1725 | 50 . . . 448 | 4168 |
| SPLEN20144520 | 1726 | 2002 . . . 2463 | 4169 |
| SPLEN20145720 | 1727 | 1205 . . . >1939 | 4170 |
| SPLEN20146450 | 1728 | 362 . . . 862 | 4171 |
| SPLEN20146690 | 1729 | 1966 . . . 2550 | 4172 |
| SPLEN20147110 | 1730 | 313 . . . 2067 | 4173 |
| SPLEN20147390 | 1731 | 169 . . . 1479 | 4174 |
| SPLEN20149110 | 1732 | 2 . . . 769 | 4175 |
| SPLEN20149190 | 1733 | 26 . . . 364 | 4176 |
| SPLEN20149240 | 1734 | 787 . . . 2490 | 4177 |
| SPLEN20150940 | 1735 | 79 . . . 2385 | 4178 |
| SPLEN20151210 | 1736 | 66 . . . 1715 | 4179 |
| SPLEN20152610 | 1737 | 986 . . . 1453 | 4180 |
| SPLEN20152760 | 1738 | 284 . . . 628 | 4181 |
| SPLEN20157300 | 1739 | 426 . . . 728 | 4182 |
| SPLEN20157880 | 1740 | 35 . . . 769 | 4183 |
| SPLEN20158900 | 1741 | 1643 . . . 2032 | 4184 |
| SPLEN20158990 | 1742 | 843 . . . 1172 | 4185 |
| SPLEN20160450 | 1743 | 552 . . . 1115 | 4186 |
| SPLEN20160690 | 1744 | 734 . . . 1099 | 4187 |
| SPLEN20160980 | 1745 | 124 . . . 456 | 4188 |
| SPLEN20162680 | 1746 | 646 . . . 2007 | 4189 |
| SPLEN20163560 | 1747 | 86 . . . 2173 | 4190 |
| SPLEN20165310 | 1748 | 80 . . . 1492 | 4191 |
| SPLEN20166270 | 1749 | 1134 . . . 1814 | 4192 |
| SPLEN20167200 | 1750 | 223 . . . 570 | 4193 |
| SPLEN20169220 | 1751 | 160 . . . 576 | 4194 |
| SPLEN20169720 | 1752 | 72 . . . 2492 | 4195 |
| SPLEN20170310 | 1753 | 125 . . . 1039 | 4196 |
| SPLEN20171210 | 1754 | 7 . . . 837 | 4197 |
| SPLEN20171470 | 1755 | 41 . . . 2272 | 4198 |
| SPLEN20171890 | 1756 | 1312 . . . 1716 | 4199 |
| SPLEN20172120 | 1757 | 138 . . . 500 | 4200 |
| SPLEN20173510 | 1758 | 235 . . . 1785 | 4201 |
| SPLEN20174260 | 1759 | 99 . . . 428 | 4202 |
| SPLEN20176200 | 1760 | 36 . . . 431 | 4203 |
| SPLEN20179180 | 1761 | 173 . . . 1201 | 4204 |
| SPLEN20179810 | 1762 | 1374 . . . 3224 | 4205 |
| SPLEN20181810 | 1763 | 641 . . . 1183 | 4206 |
| SPLEN20186430 | 1764 | 80 . . . 979 | 4207 |
| SPLEN20193110 | 1765 | 1744 . . . 2118 | 4208 |
| SPLEN20194050 | 1766 | 1351 . . . 2331 | 4209 |
| SPLEN20198110 | 1767 | 1260 . . . 1562 | 4210 |
| SPLEN20204170 | 1768 | 202 . . . 594 | 4211 |
| SPLEN20211220 | 1769 | 601 . . . 1500 | 4212 |
| SPLEN20211570 | 1770 | 174 . . . 521 | 4213 |
| SPLEN20211940 | 1771 | 241 . . . 1155 | 4214 |
| SPLEN20212730 | 1772 | 979 . . . 1830 | 4215 |
| SPLEN20212950 | 1773 | 283 . . . 2055 | 4216 |
| SPLEN20213830 | 1774 | 137 . . . 460 | 4217 |
| SPLEN20214400 | 1775 | 28 . . . 387 | 4218 |
| SPLEN20214580 | 1776 | 300 . . . 602 | 4219 |
| SPLEN20222270 | 1777 | 241 . . . 927 | 4220 |
| SPLEN20225220 | 1778 | 672 . . . 1199 | 4221 |
| SPLEN20242320 | 1779 | 136 . . . 522 | 4222 |
| SPLEN20242730 | 1780 | 2343 . . . 2732 | 4223 |
| SPLEN20243830 | 1781 | 197 . . . 556 | 4224 |
| SPLEN20245300 | 1782 | 945 . . . 1529 | 4225 |
| SPLEN20249560 | 1783 | 889 . . . 1584 | 4226 |
| SPLEN20250170 | 1784 | 457 . . . 3012 | 4227 |
| SPLEN20250390 | 1785 | 1327 . . . 1788 | 4228 |
| SPLEN20252190 | 1786 | 1413 . . . 2609 | 4229 |
| SPLEN20261440 | 1787 | 511 . . . 894 | 4230 |
| SPLEN20264110 | 1788 | 1195 . . . 1662 | 4231 |
| SPLEN20267650 | 1789 | 39 . . . 1331 | 4232 |
| SPLEN20273950 | 1790 | 608 . . . 1222 | 4233 |
| SPLEN20279950 | 1791 | 1874 . . . 2518 | 4234 |
| SPLEN20280660 | 1792 | 1286 . . . 1612 | 4235 |
| SPLEN20283650 | 1793 | 13 . . . 621 | 4236 |
| SPLEN20284240 | 1794 | 282 . . . 1175 | 4237 |
| SPLEN20292950 | 1795 | 9 . . . 2456 | 4238 |
| SPLEN20293800 | 1796 | 73 . . . 858 | 4239 |
| SPLEN20303970 | 1797 | 778 . . . 1104 | 4240 |
| SPLEN20304950 | 1798 | 7 . . . 1011 | 4241 |
| SPLEN20305620 | 1799 | 1356 . . . 1853 | 4242 |
| SPLEN20329240 | 1800 | 5 . . . 361 | 4243 |
| STOMA20001830 | 1801 | 81 . . . 1574 | 4244 |
| STOMA20005390 | 1802 | 59 . . . 1567 | 4245 |
| STOMA20005670 | 1803 | 81 . . . 1478 | 4246 |
| STOMA20006400 | 1804 | 80 . . . 1687 | 4247 |
| STOMA20006780 | 1805 | 41 . . . 1975 | 4248 |
| STOMA20006860 | 1806 | 1272 . . . 1988 | 4249 |
| STOMA20008880 | 1807 | 112 . . . 1485 | 4250 |
| STOMA20010250 | 1808 | 66 . . . 419 | 4251 |
| STOMA20013890 | 1809 | 2151 . . . 2486 | 4252 |
| STOMA20026880 | 1810 | 548 . . . 874 | 4253 |
| STOMA20032890 | 1811 | 1710 . . . 2600 | 4254 |
| STOMA20034770 | 1812 | 81 . . . 1583 | 4255 |
| STOMA20036460 | 1813 | 311 . . . 772 | 4256 |
| STOMA20046680 | 1814 | 768 . . . 1154 | 4257 |
| STOMA20048520 | 1815 | 160 . . . 663 | 4258 |
| STOMA20048840 | 1816 | 936 . . . 1487 | 4259 |
| STOMA20051200 | 1817 | 140 . . . 619 | 4260 |
| STOMA20056640 | 1818 | 49 . . . 555 | 4261 |
| STOMA20056670 | 1819 | 81 . . . 1556 | 4262 |
| STOMA20057820 | 1820 | 60 . . . 1226 | 4263 |
| STOMA20062130 | 1821 | 35 . . . 427 | 4264 |
| STOMA20062290 | 1822 | 289 . . . 693 | 4265 |
| STOMA20063250 | 1823 | 109 . . . 438 | 4266 |
| STOMA20063980 | 1824 | 97 . . . 480 | 4267 |
| STOMA20064470 | 1825 | 78 . . . 1118 | 4268 |
| STOMA20067800 | 1826 | 35 . . . 397 | 4269 |
| STOMA20069040 | 1827 | 364 . . . 792 | 4270 |
| STOMA20072690 | 1828 | 351 . . . 701 | 4271 |
| STOMA20076800 | 1829 | 311 . . . 784 | 4272 |
| STOMA20077450 | 1830 | 780 . . . 2300 | 4273 |
| STOMA20080500 | 1831 | 59 . . . 1735 | 4274 |
| STOMA20083610 | 1832 | 80 . . . 1564 | 4275 |
| STOMA20086140 | 1833 | 201 . . . 746 | 4276 |
| STOMA20088380 | 1834 | 48 . . . 1535 | 4277 |
| STOMA20092530 | 1835 | 80 . . . 1501 | 4278 |
| STOMA20092560 | 1836 | 68 . . . 439 | 4279 |
| STOMA20092890 | 1837 | 105 . . . 1223 | 4280 |
| SYNOV20001520 | 1838 | 25 . . . 735 | 4281 |
| SYNOV20001730 | 1839 | 56 . . . 1480 | 4282 |
| SYNOV20002510 | 1840 | 79 . . . 1629 | 4283 |
| SYNOV20002790 | 1841 | 59 . . . 1480 | 4284 |
| SYNOV20002970 | 1842 | 56 . . . 1471 | 4285 |
| SYNOV20003970 | 1843 | 357 . . . 881 | 4286 |
| SYNOV20004260 | 1844 | 80 . . . 1489 | 4287 |
| SYNOV20007000 | 1845 | 55 . . . 1485 | 4288 |
| SYNOV20008240 | 1846 | 61 . . . 1494 | 4289 |
| SYNOV20009230 | 1847 | 40 . . . 1515 | 4290 |
| SYNOV20010880 | 1848 | 61 . . . 1479 | 4291 |
| SYNOV20011110 | 1849 | 56 . . . 1468 | 4292 |
| SYNOV20013000 | 1850 | 30 . . . 1433 | 4293 |
| SYNOV20013560 | 1851 | 79 . . . 1494 | 4294 |
| SYNOV20013900 | 1852 | 81 . . . 1499 | 4295 |
| SYNOV20017080 | 1853 | 466 . . . 1905 | 4296 |
| SYNOV30001840 | 1854 | 146 . . . 2443 | 4297 |
| TBAES20000590 | 1855 | 1697 . . . >2237 | 4298 |
| TBAES20002550 | 1856 | 16 . . . 1896 | 4299 |
| TBAES20003150 | 1857 | 42 . . . 1064 | 4300 |
| TBAES20003770 | 1858 | 117 . . . 3437 | 4301 |
| TCOLN20001390 | 1859 | 237 . . . 1106 | 4302 |
| TESOP20000900 | 1860 | 110 . . . 448 | 4303 |
| TESOP20003120 | 1861 | 42 . . . 929 | 4304 |
| TESOP20004000 | 1862 | 295 . . . 1125 | 4305 |
| TESOP20005270 | 1863 | 568 . . . 921 | 4306 |
| TESOP20005690 | 1864 | 230 . . . 574 | 4307 |
| TESTI10000940 | 1865 | 127 . . . 1752 | 4308 |
| TESTI20001000 | 1866 | 129 . . . 944 | 4309 |
| TESTI20001170 | 1867 | 107 . . . 1291 | 4310 |
| TESTI20001720 | 1868 | 204 . . . 722 | 4311 |
| TESTI20002720 | 1869 | 92 . . . >2187 | 4312 |
| TESTI20002780 | 1870 | 821 . . . 1471 | 4313 |
| TESTI20004890 | 1871 | 140 . . . 1231 | 4314 |
| TESTI20011200 | 1872 | 1615 . . . 1968 | 4315 |
| TESTI20017950 | 1873 | 62 . . . 2023 | 4316 |
| TESTI20018230 | 1874 | 506 . . . 1024 | 4317 |
| TESTI20023510 | 1875 | 100 . . . 1935 | 4318 |
| TESTI20029930 | 1876 | 597 . . . 1847 | 4319 |
| TESTI20030310 | 1877 | 1362 . . . 1757 | 4320 |
| TESTI20030890 | 1878 | 1736 . . . 2167 | 4321 |
| TESTI20031270 | 1879 | 820 . . . 1332 | 4322 |
| TESTI20031810 | 1880 | 235 . . . 1926 | 4323 |
| TESTI20035960 | 1881 | 80 . . . 1327 | 4324 |
| TESTI20036380 | 1882 | 125 . . . 2110 | 4325 |
| TESTI20037560 | 1883 | 16 . . . 1986 | 4326 |
| TESTI20038270 | 1884 | 42 . . . 347 | 4327 |
| TESTI20039400 | 1885 | 63 . . . 1430 | 4328 |
| TESTI20041690 | 1886 | 194 . . . 2320 | 4329 |
| TESTI20044230 | 1887 | 76 . . . 1308 | 4330 |
| TESTI20044310 | 1888 | 307 . . . 1899 | 4331 |
| TESTI20046750 | 1889 | 56 . . . 871 | 4332 |
| TESTI20057750 | 1890 | 154 . . . 495 | 4333 |
| TESTI20060400 | 1891 | 102 . . . 1754 | 4334 |
| TESTI20061110 | 1892 | 102 . . . 1574 | 4335 |
| TESTI20063830 | 1893 | 186 . . . 1793 | 4336 |
| TESTI20066670 | 1894 | 345 . . . 1823 | 4337 |
| TESTI20066770 | 1895 | 867 . . . 1937 | 4338 |
| TESTI20067200 | 1896 | 25 . . . 1149 | 4339 |
| TESTI20076850 | 1897 | 864 . . . 1307 | 4340 |
| TESTI20082330 | 1898 | 12 . . . 2249 | 4341 |
| TESTI20083200 | 1899 | 80 . . . 967 | 4342 |
| TESTI20083940 | 1900 | 60 . . . 1973 | 4343 |
| TESTI20086210 | 1901 | 65 . . . 1465 | 4344 |
| TESTI20087620 | 1902 | 116 . . . 2191 | 4345 |
| TESTI20088220 | 1903 | 318 . . . 2435 | 4346 |
| TESTI20094020 | 1904 | 341 . . . 1885 | 4347 |
| TESTI20094120 | 1905 | 402 . . . 1184 | 4348 |
| TESTI20094230 | 1906 | 1397 . . . 2158 | 4349 |
| TESTI20094470 | 1907 | 428 . . . 1540 | 4350 |
| TESTI20098350 | 1908 | 137 . . . 1849 | 4351 |
| TESTI20098530 | 1909 | 220 . . . 564 | 4352 |
| TESTI20102800 | 1910 | 278 . . . 640 | 4353 |
| TESTI20105720 | 1911 | 1542 . . . 1901 | 4354 |
| TESTI20108720 | 1912 | 101 . . . 1123 | 4355 |
| TESTI20110280 | 1913 | 212 . . . 1396 | 4356 |
| TESTI20112940 | 1914 | 579 . . . 899 | 4357 |
| TESTI20114070 | 1915 | 1575 . . . 1937 | 4358 |
| TESTI20116650 | 1916 | 43 . . . 387 | 4359 |
| TESTI20116830 | 1917 | 825 . . . 1208 | 4360 |
| TESTI20121550 | 1918 | 191 . . . 1900 | 4361 |
| TESTI20122310 | 1919 | 149 . . . 826 | 4362 |
| TESTI20123080 | 1920 | 432 . . . 767 | 4363 |
| TESTI20123560 | 1921 | 249 . . . >816 | 4364 |
| TESTI20127760 | 1922 | 149 . . . 1141 | 4365 |
| TESTI20128350 | 1923 | 178 . . . 591 | 4366 |
| TESTI20129150 | 1924 | 241 . . . 969 | 4367 |
| TESTI20129220 | 1925 | 366 . . . 773 | 4368 |
| TESTI20130010 | 1926 | 866 . . . 1420 | 4369 |
| TESTI20130120 | 1927 | 119 . . . 748 | 4370 |
| TESTI20135660 | 1928 | 961 . . . 1374 | 4371 |
| TESTI20136100 | 1929 | 71 . . . 406 | 4372 |
| TESTI20136710 | 1930 | 14 . . . >1826 | 4373 |
| TESTI20136990 | 1931 | 1903 . . . 2292 | 4374 |
| TESTI20137370 | 1932 | 37 . . . 339 | 4375 |
| TESTI20137670 | 1933 | 181 . . . 561 | 4376 |
| TESTI20143240 | 1934 | 486 . . . 908 | 4377 |
| TESTI20143390 | 1935 | 52 . . . 1068 | 4378 |
| TESTI20143620 | 1936 | 970 . . . 1332 | 4379 |
| TESTI20148000 | 1937 | 250 . . . 2004 | 4380 |
| TESTI20152460 | 1938 | 222 . . . 1499 | 4381 |
| TESTI20155900 | 1939 | 1095 . . . 1499 | 4382 |
| TESTI20156100 | 1940 | 31 . . . 1200 | 4383 |
| TESTI20157100 | 1941 | 481 . . . 1149 | 4384 |
| TESTI20157520 | 1942 | 55 . . . >1880 | 4385 |
| TESTI20159140 | 1943 | 424 . . . >1611 | 4386 |
| TESTI20161970 | 1944 | 138 . . . 1658 | 4387 |
| TESTI20164100 | 1945 | 60 . . . 470 | 4388 |
| TESTI20168480 | 1946 | 91 . . . 1341 | 4389 |
| TESTI20168630 | 1947 | 1219 . . . 1608 | 4390 |
| TESTI20168960 | 1948 | 37 . . . 570 | 4391 |
| TESTI20169960 | 1949 | 801 . . . 1139 | 4392 |
| TESTI20170350 | 1950 | 1106 . . . 1429 | 4393 |
| TESTI20171020 | 1951 | 11 . . . >2194 | 4394 |
| TESTI20178160 | 1952 | 1084 . . . 1452 | 4395 |
| TESTI20179320 | 1953 | 191 . . . 664 | 4396 |
| TESTI20183370 | 1954 | 190 . . . 870 | 4397 |
| TESTI20184620 | 1955 | 123 . . . 2417 | 4398 |
| TESTI20185650 | 1956 | 75 . . . 1904 | 4399 |
| TESTI20185810 | 1957 | 243 . . . 587 | 4400 |
| TESTI20189410 | 1958 | 16 . . . >1759 | 4401 |
| TESTI20192280 | 1959 | 10 . . . 906 | 4402 |
| TESTI20192800 | 1960 | 193 . . . >2366 | 4403 |
| TESTI20193360 | 1961 | 66 . . . 854 | 4404 |
| TESTI20194300 | 1962 | 70 . . . 576 | 4405 |
| TESTI20194810 | 1963 | 78 . . . 473 | 4406 |
| TESTI20197940 | 1964 | 771 . . . >1987 | 4407 |
| TESTI20199170 | 1965 | 244 . . . 558 | 4408 |
| TESTI20199750 | 1966 | 92 . . . 1957 | 4409 |
| TESTI20200260 | 1967 | 307 . . . 846 | 4410 |
| TESTI20200710 | 1968 | 190 . . . 1749 | 4411 |
| TESTI20202650 | 1969 | 55 . . . 1299 | 4412 |
| TESTI20203440 | 1970 | 1109 . . . 1600 | 4413 |
| TESTI20204450 | 1971 | 417 . . . 1916 | 4414 |
| TESTI20208400 | 1972 | 1027 . . . 1782 | 4415 |
| TESTI20208710 | 1973 | 70 . . . 2046 | 4416 |
| TESTI20209460 | 1974 | 1035 . . . 1400 | 4417 |
| TESTI20209810 | 1975 | 872 . . . 1405 | 4418 |
| TESTI20209990 | 1976 | 106 . . . 549 | 4419 |
| TESTI20211160 | 1977 | 627 . . . 1424 | 4420 |
| TESTI20211220 | 1978 | 1561 . . . 1944 | 4421 |
| TESTI20211240 | 1979 | 150 . . . >1469 | 4422 |
| TESTI20213150 | 1980 | 380 . . . 1303 | 4423 |
| TESTI20213580 | 1981 | 338 . . . 697 | 4424 |
| TESTI20214250 | 1982 | 46 . . . 933 | 4425 |
| TESTI20215990 | 1983 | 428 . . . 2635 | 4426 |
| TESTI20216370 | 1984 | 572 . . . 1195 | 4427 |
| TESTI20220100 | 1985 | 539 . . . 1264 | 4428 |
| TESTI20220650 | 1986 | 164 . . . 481 | 4429 |
| TESTI20224620 | 1987 | 221 . . . 532 | 4430 |
| TESTI20226230 | 1988 | 335 . . . >1500 | 4431 |
| TESTI20226490 | 1989 | 1044 . . . 1367 | 4432 |
| TESTI20229600 | 1990 | 342 . . . 2669 | 4433 |
| TESTI20230250 | 1991 | 1310 . . . 1693 | 4434 |
| TESTI20230850 | 1992 | 246 . . . 2567 | 4435 |
| TESTI20231920 | 1993 | 949 . . . 1392 | 4436 |
| TESTI20231940 | 1994 | 382 . . . 975 | 4437 |
| TESTI20232140 | 1995 | 26 . . . 1237 | 4438 |
| TESTI20234140 | 1996 | 182 . . . 1738 | 4439 |
| TESTI20234270 | 1997 | 334 . . . 642 | 4440 |
| TESTI20234360 | 1998 | 23 . . . 460 | 4441 |
| TESTI20237520 | 1999 | 172 . . . 1734 | 4442 |
| TESTI20238000 | 2000 | 978 . . . 1322 | 4443 |
| TESTI20238610 | 2001 | 150 . . . 1373 | 4444 |
| TESTI20239470 | 2002 | 132 . . . 2294 | 4445 |
| TESTI20239510 | 2003 | 701 . . . 1333 | 4446 |
| TESTI20240090 | 2004 | 10 . . . 1179 | 4447 |
| TESTI20241530 | 2005 | 594 . . . 1985 | 4448 |
| TESTI20241920 | 2006 | 1309 . . . 1632 | 4449 |
| TESTI20242830 | 2007 | 42 . . . 2306 | 4450 |
| TESTI20242990 | 2008 | 968 . . . 1330 | 4451 |
| TESTI20244190 | 2009 | 80 . . . 1630 | 4452 |
| TESTI20244760 | 2010 | 1258 . . . 1647 | 4453 |
| TESTI20249990 | 2011 | 698 . . . 1960 | 4454 |
| TESTI20254220 | 2012 | 81 . . . 1376 | 4455 |
| TESTI20254540 | 2013 | 997 . . . 1830 | 4456 |
| TESTI20254860 | 2014 | 205 . . . >2004 | 4457 |
| TESTI20255820 | 2015 | 120 . . . 1565 | 4458 |
| TESTI20258460 | 2016 | 37 . . . 1212 | 4459 |
| TESTI20262330 | 2017 | 928 . . . 1521 | 4460 |
| TESTI20262910 | 2018 | 335 . . . 1336 | 4461 |
| TESTI20265250 | 2019 | 1751 . . . 2095 | 4462 |
| TESTI20265370 | 2020 | 46 . . . 378 | 4463 |
| TESTI20265970 | 2021 | 258 . . . 1961 | 4464 |
| TESTI20266740 | 2022 | 88 . . . 1203 | 4465 |
| TESTI20269570 | 2023 | 643 . . . 1047 | 4466 |
| TESTI20271850 | 2024 | 202 . . . 504 | 4467 |
| TESTI20272060 | 2025 | 1379 . . . 3253 | 4468 |
| TESTI20272390 | 2026 | 123 . . . 767 | 4469 |
| TESTI20272960 | 2027 | 982 . . . 1932 | 4470 |
| TESTI20275030 | 2028 | 98 . . . 583 | 4471 |
| TESTI20275620 | 2029 | 1508 . . . 1840 | 4472 |
| TESTI20277360 | 2030 | 298 . . . 1704 | 4473 |
| TESTI20278200 | 2031 | 48 . . . 698 | 4474 |
| TESTI20278400 | 2032 | 70 . . . >1856 | 4475 |
| TESTI20280980 | 2033 | 619 . . . 1071 | 4476 |
| TESTI20282540 | 2034 | 310 . . . 1356 | 4477 |
| TESTI20284880 | 2035 | 683 . . . 1114 | 4478 |
| TESTI20285830 | 2036 | 494 . . . 853 | 4479 |
| TESTI20288110 | 2037 | 234 . . . 899 | 4480 |
| TESTI20288910 | 2038 | 51 . . . 965 | 4481 |
| TESTI20289850 | 2039 | 198 . . . 698 | 4482 |
| TESTI20291310 | 2040 | 106 . . . 2034 | 4483 |
| TESTI20291620 | 2041 | 1611 . . . 2021 | 4484 |
| TESTI20291960 | 2042 | 809 . . . 1921 | 4485 |
| TESTI20294700 | 2043 | 898 . . . 1236 | 4486 |
| TESTI20297850 | 2044 | 1 . . . 837 | 4487 |
| TESTI20301360 | 2045 | 114 . . . 506 | 4488 |
| TESTI20303220 | 2046 | 288 . . . 2711 | 4489 |
| TESTI20303360 | 2047 | 767 . . . 2050 | 4490 |
| TESTI20303420 | 2048 | 34 . . . 768 | 4491 |
| TESTI20305540 | 2049 | 97 . . . 2949 | 4492 |
| TESTI20305560 | 2050 | 49 . . . 582 | 4493 |
| TESTI20307540 | 2051 | 88 . . . 513 | 4494 |
| TESTI20307700 | 2052 | 32 . . . 412 | 4495 |
| TESTI20308600 | 2053 | 72 . . . 1307 | 4496 |
| TESTI20309170 | 2054 | 722 . . . 2233 | 4497 |
| TESTI20310070 | 2055 | 205 . . . 2097 | 4498 |
| TESTI20311290 | 2056 | 940 . . . 1398 | 4499 |
| TESTI20314180 | 2057 | 1073 . . . 1744 | 4500 |
| TESTI20316870 | 2058 | 25 . . . 813 | 4501 |
| TESTI20317600 | 2059 | 107 . . . 1420 | 4502 |
| TESTI20318090 | 2060 | 1012 . . . 1644 | 4503 |
| TESTI20319190 | 2061 | 384 . . . 1481 | 4504 |
| TESTI20320440 | 2062 | 200 . . . 1861 | 4505 |
| TESTI20320670 | 2063 | 259 . . . 1257 | 4506 |
| TESTI20326810 | 2064 | 832 . . . 1377 | 4507 |
| TESTI20327680 | 2065 | 135 . . . 1730 | 4508 |
| TESTI20327740 | 2066 | 132 . . . 518 | 4509 |
| TESTI20328280 | 2067 | 87 . . . 2135 | 4510 |
| TESTI20330310 | 2068 | 315 . . . 1307 | 4511 |
| TESTI20332420 | 2069 | 682 . . . 1461 | 4512 |
| TESTI20333000 | 2070 | 366 . . . 1586 | 4513 |
| TESTI20333950 | 2071 | 76 . . . 1500 | 4514 |
| TESTI20334410 | 2072 | 167 . . . 1630 | 4515 |
| TESTI20335050 | 2073 | 340 . . . 1389 | 4516 |
| TESTI20335200 | 2074 | 612 . . . 968 | 4517 |
| TESTI20336410 | 2075 | 17 . . . 325 | 4518 |
| TESTI20337100 | 2076 | 40 . . . 384 | 4519 |
| TESTI20342430 | 2077 | 322 . . . 642 | 4520 |
| TESTI20343070 | 2078 | 530 . . . 2563 | 4521 |
| TESTI20343570 | 2079 | 900 . . . 1568 | 4522 |
| TESTI20345060 | 2080 | 15 . . . 1382 | 4523 |
| TESTI20347180 | 2081 | 3 . . . 710 | 4524 |
| TESTI20347300 | 2082 | 623 . . . 931 | 4525 |
| TESTI20347740 | 2083 | 100 . . . 1599 | 4526 |
| TESTI20347770 | 2084 | 37 . . . 351 | 4527 |
| TESTI20351830 | 2085 | 919 . . . 1773 | 4528 |
| TESTI20352620 | 2086 | 182 . . . 907 | 4529 |
| TESTI20355020 | 2087 | 8 . . . 1651 | 4530 |
| TESTI20357750 | 2088 | 547 . . . 951 | 4531 |
| TESTI20357930 | 2089 | 1148 . . . 1498 | 4532 |
| TESTI20357960 | 2090 | 363 . . . 725 | 4533 |
| TESTI20358980 | 2091 | 85 . . . 1332 | 4534 |
| TESTI20361140 | 2092 | 801 . . . 1514 | 4535 |
| TESTI20366910 | 2093 | 5 . . . 1396 | 4536 |
| TESTI20367360 | 2094 | 324 . . . 629 | 4537 |
| TESTI20368330 | 2095 | 201 . . . 1856 | 4538 |
| TESTI20369130 | 2096 | 243 . . . 611 | 4539 |
| TESTI20369220 | 2097 | 118 . . . 441 | 4540 |
| TESTI20369650 | 2098 | 633 . . . 2204 | 4541 |
| TESTI20369690 | 2099 | 306 . . . 1208 | 4542 |
| TESTI20370020 | 2100 | 346 . . . 1830 | 4543 |
| TESTI20370550 | 2101 | 160 . . . 462 | 4544 |
| TESTI20370810 | 2102 | 223 . . . 2334 | 4545 |
| TESTI20371030 | 2103 | 209 . . . 1180 | 4546 |
| TESTI20371060 | 2104 | 140 . . . 1177 | 4547 |
| TESTI20373820 | 2105 | 237 . . . 1109 | 4548 |
| TESTI20375340 | 2106 | 387 . . . 1559 | 4549 |
| TESTI20377230 | 2107 | 574 . . . 1314 | 4550 |
| TESTI20378190 | 2108 | 380 . . . 1795 | 4551 |
| TESTI20378450 | 2109 | 489 . . . >2419 | 4552 |
| TESTI20380650 | 2110 | 961 . . . 1272 | 4553 |
| TESTI20381040 | 2111 | 339 . . . 1394 | 4554 |
| TESTI20382750 | 2112 | 1159 . . . 1797 | 4555 |
| TESTI20383880 | 2113 | 419 . . . 988 | 4556 |
| TESTI20385960 | 2114 | 684 . . . 1637 | 4557 |
| TESTI20386230 | 2115 | 748 . . . 1059 | 4558 |
| TESTI20386440 | 2116 | 185 . . . 514 | 4559 |
| TESTI20388580 | 2117 | 405 . . . 788 | 4560 |
| TESTI20390260 | 2118 | 142 . . . 522 | 4561 |
| TESTI20390410 | 2119 | 1604 . . . 1969 | 4562 |
| TESTI20391130 | 2120 | 185 . . . 2224 | 4563 |
| TESTI20391210 | 2121 | 1259 . . . 1801 | 4564 |
| TESTI20391770 | 2122 | 237 . . . 1634 | 4565 |
| TESTI20392090 | 2123 | 405 . . . 881 | 4566 |
| TESTI20392250 | 2124 | 1057 . . . 1941 | 4567 |
| TESTI20392270 | 2125 | 316 . . . 1185 | 4568 |
| TESTI20392760 | 2126 | 306 . . . 2279 | 4569 |
| TESTI20393530 | 2127 | 194 . . . 1198 | 4570 |
| TESTI20396130 | 2128 | 338 . . . 682 | 4571 |
| TESTI20397760 | 2129 | 371 . . . 1129 | 4572 |
| TESTI20400940 | 2130 | 231 . . . 2705 | 4573 |
| TESTI20401020 | 2131 | 583 . . . 1281 | 4574 |
| TESTI20401280 | 2132 | 53 . . . 379 | 4575 |
| TESTI20401430 | 2133 | 340 . . . 651 | 4576 |
| TESTI20404240 | 2134 | 1110 . . . 1550 | 4577 |
| TESTI20406420 | 2135 | 186 . . . 1340 | 4578 |
| TESTI20408150 | 2136 | 195 . . . 752 | 4579 |
| TESTI20408970 | 2137 | 247 . . . 1170 | 4580 |
| TESTI20409440 | 2138 | 17 . . . 337 | 4581 |
| TESTI20409890 | 2139 | 120 . . . 1082 | 4582 |
| TESTI20413300 | 2140 | 66 . . . 503 | 4583 |
| TESTI20415170 | 2141 | 45 . . . 419 | 4584 |
| TESTI20415640 | 2142 | 1 . . . 324 | 4585 |
| TESTI20416640 | 2143 | 1092 . . . 1574 | 4586 |
| TESTI20417300 | 2144 | 107 . . . 1807 | 4587 |
| TESTI20419560 | 2145 | 5 . . . 331 | 4588 |
| TESTI20420620 | 2146 | 334 . . . 2139 | 4589 |
| TESTI20421490 | 2147 | 2188 . . . 2628 | 4590 |
| TESTI20422640 | 2148 | 974 . . . 2149 | 4591 |
| TESTI20423020 | 2149 | 252 . . . >1770 | 4592 |
| TESTI20424000 | 2150 | 339 . . . 842 | 4593 |
| TESTI20424730 | 2151 | 928 . . . 1263 | 4594 |
| TESTI20425070 | 2152 | 1145 . . . 1726 | 4595 |
| TESTI20427830 | 2153 | 42 . . . 380 | 4596 |
| TESTI20428060 | 2154 | 230 . . . 598 | 4597 |
| TESTI20429280 | 2155 | 925 . . . 1551 | 4598 |
| TESTI20429580 | 2156 | 970 . . . 1458 | 4599 |
| TESTI20432750 | 2157 | 56 . . . 1399 | 4600 |
| TESTI20432820 | 2158 | 18 . . . 1232 | 4601 |
| TESTI20433130 | 2159 | 247 . . . 549 | 4602 |
| TESTI20436560 | 2160 | 103 . . . 1578 | 4603 |
| TESTI20438570 | 2161 | 1252 . . . 1719 | 4604 |
| TESTI20438660 | 2162 | 2227 . . . 2622 | 4605 |
| TESTI20441940 | 2163 | 613 . . . 1596 | 4606 |
| TESTI20442760 | 2164 | 82 . . . >2054 | 4607 |
| TESTI20443090 | 2165 | 201 . . . 1019 | 4608 |
| TESTI20444130 | 2166 | 79 . . . 417 | 4609 |
| TESTI20444180 | 2167 | 26 . . . 547 | 4610 |
| TESTI20447540 | 2168 | 184 . . . 516 | 4611 |
| TESTI20449200 | 2169 | 672 . . . 1766 | 4612 |
| TESTI20451710 | 2170 | 429 . . . 731 | 4613 |
| TESTI20451990 | 2171 | 210 . . . 2264 | 4614 |
| TESTI20455090 | 2172 | 489 . . . 1268 | 4615 |
| TESTI20455620 | 2173 | 110 . . . 1351 | 4616 |
| TESTI20456110 | 2174 | 4 . . . 1191 | 4617 |
| TESTI20458190 | 2175 | 235 . . . 579 | 4618 |
| TESTI20463520 | 2176 | 998 . . . 1402 | 4619 |
| TESTI20463580 | 2177 | 577 . . . 2037 | 4620 |
| TESTI20465350 | 2178 | 317 . . . 1258 | 4621 |
| TESTI20465520 | 2179 | 535 . . . 1026 | 4622 |
| TESTI20465690 | 2180 | 214 . . . 1074 | 4623 |
| TESTI20467210 | 2181 | 435 . . . 1613 | 4624 |
| TESTI20467320 | 2182 | 951 . . . 1922 | 4625 |
| TESTI20467970 | 2183 | 332 . . . 1690 | 4626 |
| TESTI20468630 | 2184 | 380 . . . 688 | 4627 |
| TESTI20471410 | 2185 | 97 . . . 1464 | 4628 |
| TESTI20471470 | 2186 | 31 . . . 369 | 4629 |
| TESTI20471530 | 2187 | 2264 . . . 2641 | 4630 |
| TESTI20472120 | 2188 | 517 . . . 876 | 4631 |
| TESTI20473420 | 2189 | 140 . . . 607 | 4632 |
| TESTI20473830 | 2190 | 951 . . . 1532 | 4633 |
| TESTI20477920 | 2191 | 1387 . . . 1860 | 4634 |
| TESTI20478010 | 2192 | 169 . . . 558 | 4635 |
| TESTI20478180 | 2193 | 428 . . . 754 | 4636 |
| TESTI20478850 | 2194 | 949 . . . 1323 | 4637 |
| TESTI20479300 | 2195 | 663 . . . 1205 | 4638 |
| THYMU10005360 | 2196 | 48 . . . 899 | 4639 |
| THYMU10005540 | 2197 | 84 . . . 1508 | 4640 |
| THYMU20000570 | 2198 | 216 . . . 728 | 4641 |
| THYMU20011950 | 2199 | 45 . . . 626 | 4642 |
| THYMU20015210 | 2200 | 1003 . . . 1314 | 4643 |
| THYMU20018190 | 2201 | 336 . . . 758 | 4644 |
| THYMU20023380 | 2202 | 1426 . . . 1728 | 4645 |
| THYMU20027560 | 2203 | 63 . . . 602 | 4646 |
| THYMU20029100 | 2204 | 215 . . . 928 | 4647 |
| THYMU20032870 | 2205 | 1042 . . . 1404 | 4648 |
| THYMU20039810 | 2206 | 54 . . . 2204 | 4649 |
| THYMU20045120 | 2207 | 66 . . . 425 | 4650 |
| THYMU20058070 | 2208 | 984 . . . 1388 | 4651 |
| THYMU20061700 | 2209 | 40 . . . 435 | 4652 |
| THYMU20066100 | 2210 | 188 . . . 814 | 4653 |
| THYMU20070360 | 2211 | 1333 . . . 1635 | 4654 |
| THYMU20075320 | 2212 | 1186 . . . 1767 | 4655 |
| THYMU20081490 | 2213 | 127 . . . >2055 | 4656 |
| THYMU20095960 | 2214 | 304 . . . 945 | 4657 |
| THYMU20100410 | 2215 | 219 . . . 1415 | 4658 |
| THYMU20101610 | 2216 | 1087 . . . 1446 | 4659 |
| THYMU20101920 | 2217 | 765 . . . 1310 | 4660 |
| THYMU20105190 | 2218 | 850 . . . 1713 | 4661 |
| THYMU20106710 | 2219 | 89 . . . 493 | 4662 |
| THYMU20108310 | 2220 | 97 . . . 642 | 4663 |
| THYMU20111180 | 2221 | 33 . . . 1367 | 4664 |
| THYMU20111420 | 2222 | 914 . . . 1303 | 4665 |
| THYMU20111830 | 2223 | 38 . . . 796 | 4666 |
| THYMU20114470 | 2224 | 122 . . . 502 | 4667 |
| THYMU20115850 | 2225 | 1500 . . . 1805 | 4668 |
| THYMU20118060 | 2226 | 355 . . . 687 | 4669 |
| THYMU20118520 | 2227 | 220 . . . 567 | 4670 |
| THYMU20119390 | 2228 | 118 . . . 525 | 4671 |
| THYMU20122730 | 2229 | 343 . . . 1140 | 4672 |
| THYMU20126900 | 2230 | 163 . . . 1446 | 4673 |
| THYMU20128070 | 2231 | 2 . . . 349 | 4674 |
| THYMU20128260 | 2232 | 76 . . . 411 | 4675 |
| THYMU20130890 | 2233 | 221 . . . 757 | 4676 |
| THYMU20141670 | 2234 | 196 . . . 1152 | 4677 |
| THYMU20142040 | 2235 | 24 . . . 653 | 4678 |
| THYMU20142970 | 2236 | 495 . . . 1499 | 4679 |
| THYMU20143270 | 2237 | 524 . . . 1549 | 4680 |
| THYMU20147770 | 2238 | 80 . . . 1501 | 4681 |
| THYMU20153160 | 2239 | 1303 . . . 1920 | 4682 |
| THYMU20158250 | 2240 | 117 . . . 488 | 4683 |
| THYMU20159430 | 2241 | 79 . . . 1581 | 4684 |
| THYMU20161640 | 2242 | 110 . . . 679 | 4685 |
| THYMU20162190 | 2243 | 299 . . . 646 | 4686 |
| THYMU20169680 | 2244 | 718 . . . 1395 | 4687 |
| THYMU20172150 | 2245 | 375 . . . 956 | 4688 |
| THYMU20173980 | 2246 | 355 . . . 813 | 4689 |
| THYMU20180280 | 2247 | 1352 . . . 1699 | 4690 |
| THYMU20186390 | 2248 | 461 . . . 1495 | 4691 |
| THYMU20186730 | 2249 | 194 . . . 535 | 4692 |
| THYMU20187720 | 2250 | 284 . . . 661 | 4693 |
| THYMU20193640 | 2251 | 659 . . . 1165 | 4694 |
| THYMU20194360 | 2252 | 257 . . . 955 | 4695 |
| THYMU20194420 | 2253 | 1080 . . . 1403 | 4696 |
| THYMU20195990 | 2254 | 344 . . . 673 | 4697 |
| THYMU20201980 | 2255 | 1094 . . . 2023 | 4698 |
| THYMU20202890 | 2256 | 935 . . . 2188 | 4699 |
| THYMU20204160 | 2257 | 654 . . . 1199 | 4700 |
| THYMU20204990 | 2258 | 65 . . . 385 | 4701 |
| THYMU20208300 | 2259 | 144 . . . 542 | 4702 |
| THYMU20209590 | 2260 | 193 . . . 2061 | 4703 |
| THYMU20215090 | 2261 | 862 . . . 1380 | 4704 |
| THYMU20215970 | 2262 | 1004 . . . 1552 | 4705 |
| THYMU20216840 | 2263 | 605 . . . 2074 | 4706 |
| THYMU20222890 | 2264 | 1896 . . . 2198 | 4707 |
| THYMU20226600 | 2265 | 246 . . . 1232 | 4708 |
| THYMU20228540 | 2266 | 109 . . . 426 | 4709 |
| THYMU20229220 | 2267 | 259 . . . 894 | 4710 |
| THYMU20232090 | 2268 | 111 . . . 539 | 4711 |
| THYMU20235760 | 2269 | 357 . . . 674 | 4712 |
| THYMU20239000 | 2270 | 44 . . . 1672 | 4713 |
| THYMU20239430 | 2271 | 656 . . . 982 | 4714 |
| THYMU20240710 | 2272 | 680 . . . 2077 | 4715 |
| THYMU20241210 | 2273 | 77 . . . 511 | 4716 |
| THYMU20241850 | 2274 | 63 . . . 890 | 4717 |
| THYMU20246840 | 2275 | 110 . . . 415 | 4718 |
| THYMU20247480 | 2276 | 4 . . . 1176 | 4719 |
| THYMU20250420 | 2277 | 222 . . . 707 | 4720 |
| THYMU20251890 | 2278 | 1433 . . . 1777 | 4721 |
| THYMU20253250 | 2279 | 713 . . . 1540 | 4722 |
| THYMU20255570 | 2280 | 882 . . . 1550 | 4723 |
| THYMU20255720 | 2281 | 88 . . . 645 | 4724 |
| THYMU20259090 | 2282 | 1763 . . . 2092 | 4725 |
| THYMU20265300 | 2283 | 60 . . . 1949 | 4726 |
| THYMU20271250 | 2284 | 681 . . . 1628 | 4727 |
| THYMU20272490 | 2285 | 174 . . . 560 | 4728 |
| THYMU20277390 | 2286 | 930 . . . 1541 | 4729 |
| THYMU20279750 | 2287 | 716 . . . 1114 | 4730 |
| THYMU20283790 | 2288 | 253 . . . 804 | 4731 |
| THYMU20284120 | 2289 | 178 . . . 525 | 4732 |
| THYMU20286290 | 2290 | 287 . . . 1981 | 4733 |
| THYMU20286320 | 2291 | 1214 . . . 1594 | 4734 |
| TKIDN10000010 | 2292 | 386 . . . 838 | 4735 |
| TKIDN20004640 | 2293 | 549 . . . 1172 | 4736 |
| TKIDN20005210 | 2294 | 294 . . . 1133 | 4737 |
| TKIDN20030590 | 2295 | 143 . . . 1558 | 4738 |
| TKIDN20030620 | 2296 | 25 . . . 531 | 4739 |
| TKIDN20047480 | 2297 | 1038 . . . 1460 | 4740 |
| TOVAR20004760 | 2298 | 675 . . . 1454 | 4741 |
| TOVAR20005750 | 2299 | 348 . . . 713 | 4742 |
| TRACH20002870 | 2300 | 77 . . . 613 | 4743 |
| TRACH20003590 | 2301 | 244 . . . 1773 | 4744 |
| TRACH20005020 | 2302 | 75 . . . 1463 | 4745 |
| TRACH20005400 | 2303 | 57 . . . 728 | 4746 |
| TRACH20007020 | 2304 | 271 . . . 1830 | 4747 |
| TRACH20016210 | 2305 | 122 . . . 1132 | 4748 |
| TRACH20019960 | 2306 | 112 . . . 1410 | 4749 |
| TRACH20027840 | 2307 | 61 . . . 384 | 4750 |
| TRACH20028030 | 2308 | 161 . . . 1441 | 4751 |
| TRACH20029540 | 2309 | 1410 . . . 1859 | 4752 |
| TRACH20032720 | 2310 | 830 . . . 1354 | 4753 |
| TRACH20033230 | 2311 | 560 . . . 2110 | 4754 |
| TRACH20034840 | 2312 | 1985 . . . >3328 | 4755 |
| TRACH20037360 | 2313 | 1 . . . 309 | 4756 |
| TRACH20041830 | 2314 | 424 . . . 1035 | 4757 |
| TRACH20042920 | 2315 | 77 . . . 1540 | 4758 |
| TRACH20048450 | 2316 | 511 . . . 1845 | 4759 |
| TRACH20050040 | 2317 | 70 . . . 594 | 4760 |
| TRACH20056980 | 2318 | 405 . . . 1055 | 4761 |
| TRACH20057690 | 2319 | 1448 . . . 1993 | 4762 |
| TRACH20060150 | 2320 | 3 . . . 329 | 4763 |
| TRACH20067620 | 2321 | 166 . . . 603 | 4764 |
| TRACH20068660 | 2322 | 63 . . . 890 | 4765 |
| TRACH20068700 | 2323 | 144 . . . 1811 | 4766 |
| TRACH20069180 | 2324 | 63 . . . 1625 | 4767 |
| TRACH20076740 | 2325 | 779 . . . 1669 | 4768 |
| TRACH20076760 | 2326 | 1737 . . . 2183 | 4769 |
| TRACH20077540 | 2327 | 1859 . . . 2455 | 4770 |
| TRACH20079690 | 2328 | 144 . . . 2144 | 4771 |
| TRACH20082780 | 2329 | 1675 . . . 2103 | 4772 |
| TRACH20084720 | 2330 | 38 . . . 1819 | 4773 |
| TRACH20085400 | 2331 | 223 . . . 2346 | 4774 |
| TRACH20085830 | 2332 | 41 . . . 1567 | 4775 |
| TRACH20091230 | 2333 | 1660 . . . 2067 | 4776 |
| TRACH20092680 | 2334 | 56 . . . 457 | 4777 |
| TRACH20096610 | 2335 | 417 . . . 935 | 4778 |
| TRACH20099340 | 2336 | 156 . . . 494 | 4779 |
| TRACH20105870 | 2337 | 1418 . . . 2176 | 4780 |
| TRACH20107710 | 2338 | 13 . . . 474 | 4781 |
| TRACH20109650 | 2339 | 1421 . . . 1849 | 4782 |
| TRACH20111130 | 2340 | 1548 . . . 1937 | 4783 |
| TRACH20115740 | 2341 | 507 . . . 893 | 4784 |
| TRACH20118940 | 2342 | 1781 . . . 2083 | 4785 |
| TRACH20121380 | 2343 | 795 . . . 1808 | 4786 |
| TRACH20128110 | 2344 | 1233 . . . 1796 | 4787 |
| TRACH20128230 | 2345 | 80 . . . 1657 | 4788 |
| TRACH20134950 | 2346 | 675 . . . 1001 | 4789 |
| TRACH20135520 | 2347 | 425 . . . 2335 | 4790 |
| TRACH20136710 | 2348 | 42 . . . 545 | 4791 |
| TRACH20139820 | 2349 | 1630 . . . 1998 | 4792 |
| TRACH20140820 | 2350 | 196 . . . 738 | 4793 |
| TRACH20141240 | 2351 | 270 . . . 875 | 4794 |
| TRACH20145440 | 2352 | 243 . . . 1511 | 4795 |
| TRACH20147250 | 2353 | 834 . . . 1196 | 4796 |
| TRACH20149970 | 2354 | 124 . . . 1776 | 4797 |
| TRACH20153810 | 2355 | 216 . . . 635 | 4798 |
| TRACH20154860 | 2356 | 3 . . . 1439 | 4799 |
| TRACH20162860 | 2357 | 98 . . . 364 | 4800 |
| TRACH20163170 | 2358 | 267 . . . 1028 | 4801 |
| TRACH20164980 | 2359 | 657 . . . 2165 | 4802 |
| TRACH20167220 | 2360 | 986 . . . 2422 | 4803 |
| TRACH20168350 | 2361 | 200 . . . 589 | 4804 |
| TRACH20169800 | 2362 | 1922 . . . 2359 | 4805 |
| TRACH20180840 | 2363 | 1288 . . . 1593 | 4806 |
| TRACH20183170 | 2364 | 1029 . . . 2252 | 4807 |
| TRACH20184490 | 2365 | 214 . . . 1596 | 4808 |
| TRACH20187180 | 2366 | 1322 . . . 1639 | 4809 |
| TRACH20190240 | 2367 | 1624 . . . 2313 | 4810 |
| TSTOM10001860 | 2368 | 96 . . . 1859 | 4811 |
| TSTOM20001390 | 2369 | 241 . . . 1671 | 4812 |
| TSTOM20003150 | 2370 | 103 . . . 1245 | 4813 |
| TSTOM20005690 | 2371 | 370 . . . 1626 | 4814 |
| TUTER20002830 | 2372 | 172 . . . 930 | 4815 |
| UMVEN10001560 | 2373 | 130 . . . 669 | 4816 |
| UMVEN10001860 | 2374 | 198 . . . >2048 | 4817 |
| UMVEN20000690 | 2375 | 6 . . . 1118 | 4818 |
| UMVEN20003540 | 2376 | 4 . . . 519 | 4819 |
| UTERU20000740 | 2377 | 2062 . . . 2400 | 4820 |
| UTERU20004240 | 2378 | 38 . . . 385 | 4821 |
| UTERU20006290 | 2379 | 101 . . . 406 | 4822 |
| UTERU20006960 | 2380 | 106 . . . 555 | 4823 |
| UTERU20020010 | 2381 | 54 . . . 431 | 4824 |
| UTERU20022940 | 2382 | 735 . . . 1232 | 4825 |
| UTERU20030570 | 2383 | 184 . . . 1737 | 4826 |
| UTERU20040610 | 2384 | 92 . . . 409 | 4827 |
| UTERU20046640 | 2385 | 15 . . . 2699 | 4828 |
| UTERU20046980 | 2386 | 216 . . . 926 | 4829 |
| UTERU20050690 | 2387 | 619 . . . 924 | 4830 |
| UTERU20054460 | 2388 | 557 . . . >2294 | 4831 |
| UTERU20055330 | 2389 | 45 . . . 632 | 4832 |
| UTERU20055480 | 2390 | 92 . . . 1765 | 4833 |
| UTERU20055930 | 2391 | 90 . . . 869 | 4834 |
| UTERU20056010 | 2392 | 65 . . . 484 | 4835 |
| UTERU20059050 | 2393 | 809 . . . 1459 | 4836 |
| UTERU20061030 | 2394 | 994 . . . 1389 | 4837 |
| UTERU20064000 | 2395 | 153 . . . 479 | 4838 |
| UTERU20064860 | 2396 | 26 . . . 1780 | 4839 |
| UTERU20065930 | 2397 | 37 . . . 2097 | 4840 |
| UTERU20067050 | 2398 | 641 . . . 952 | 4841 |
| UTERU20068990 | 2399 | 945 . . . 1319 | 4842 |
| UTERU20070040 | 2400 | 36 . . . 383 | 4843 |
| UTERU20070810 | 2401 | 761 . . . 1219 | 4844 |
| UTERU20076390 | 2402 | 71 . . . 499 | 4845 |
| UTERU20081300 | 2403 | 2063 . . . 2464 | 4846 |
| UTERU20084260 | 2404 | 494 . . . 1321 | 4847 |
| UTERU20094350 | 2405 | 293 . . . 802 | 4848 |
| UTERU20095380 | 2406 | 872 . . . 1213 | 4849 |
| UTERU20095400 | 2407 | 737 . . . 1456 | 4850 |
| UTERU20097760 | 2408 | 1232 . . . 1759 | 4851 |
| UTERU20099720 | 2409 | 201 . . . 746 | 4852 |
| UTERU20101240 | 2410 | 210 . . . 602 | 4853 |
| UTERU20114100 | 2411 | 538 . . . 963 | 4854 |
| UTERU20115740 | 2412 | 469 . . . 933 | 4855 |
| UTERU20116570 | 2413 | 327 . . . 1694 | 4856 |
| UTERU20118110 | 2414 | 87 . . . 485 | 4857 |
| UTERU20118970 | 2415 | 229 . . . 549 | 4858 |
| UTERU20119060 | 2416 | 1192 . . . 2436 | 4859 |
| UTERU20119680 | 2417 | 676 . . . 1185 | 4860 |
| UTERU20120310 | 2418 | 68 . . . 1066 | 4861 |
| UTERU20124070 | 2419 | 368 . . . 733 | 4862 |
| UTERU20126880 | 2420 | 524 . . . 1045 | 4863 |
| UTERU20134910 | 2421 | 1070 . . . 1489 | 4864 |
| UTERU20135860 | 2422 | 676 . . . 1965 | 4865 |
| UTERU20143980 | 2423 | 68 . . . 370 | 4866 |
| UTERU20144640 | 2424 | 231 . . . 1148 | 4867 |
| UTERU20145480 | 2425 | 172 . . . 2193 | 4868 |
| UTERU20146310 | 2426 | 114 . . . 1580 | 4869 |
| UTERU20146680 | 2427 | 524 . . . 1045 | 4870 |
| UTERU20150870 | 2428 | 47 . . . 499 | 4871 |
| UTERU20151980 | 2429 | 220 . . . 981 | 4872 |
| UTERU20158300 | 2430 | 342 . . . 686 | 4873 |
| UTERU20158800 | 2431 | 161 . . . 1318 | 4874 |
| UTERU20161570 | 2432 | 295 . . . 1209 | 4875 |
| UTERU20164260 | 2433 | 54 . . . 890 | 4876 |
| UTERU20168220 | 2434 | 835 . . . 1530 | 4877 |
| UTERU20176130 | 2435 | 27 . . . 1184 | 4878 |
| UTERU20176320 | 2436 | 108 . . . 1364 | 4879 |
| UTERU20178100 | 2437 | 2178 . . . 2528 | 4880 |
| UTERU20179880 | 2438 | 172 . . . 2379 | 4881 |
| UTERU20183640 | 2439 | 2289 . . . 2828 | 4882 |
| UTERU20185230 | 2440 | 125 . . . 1927 | 4883 |
| UTERU20186740 | 2441 | 851 . . . 1156 | 4884 |
| UTERU20188110 | 2442 | 125 . . . 1135 | 4885 |
| UTERU20188810 | 2443 | 84 . . . 389 | 4886 |

[0041] Namely, primers used to synthesize polynucleotides can be designed based on the nucleotide sequences of polynucleotides of the present invention shown in SEQ ID NOs in the above Table 1. When one intends to synthesize full-length cDNAs, an oligo dT primer can be used as the 3′-end primer. The length of the primers is usually 15-100 bp, and favorably between 15-35 bp. In case of LA PCR, which is described below, the primer length of 25-35 bp may provide a good result.

[0042] A method to design a primer that enables a specific amplification based on the aimed nucleotide sequence is known to those skilled in the art (Current Protocols in Molecular Biology, Ausubel et al. edit, (1987) John Wiley & Sons, Section 6.1-6.4). In designing a primer based on the 5′-end sequence, the primer is designed so as that, in principle, the amplification products will include the translation start site. Accordingly, for example, when the 5′-end primer is designed based on the nucleotide sequence of 5′ untranslated region (5′ UTR) , any part of the 5′-end, which ensures the specificity to the cDNA of interest, can be selected as the primer.

[0043] When synthesizing a full-length cDNA, the target nucleotide sequence to be amplified can extend to several thousand bp in some cDNA. However, it is possible to amplify such a long nucleotides by using such as LA PCR (Long and Accurate PCR). It is advantageous to use LA PCR when synthesizing long DNA. In LA PCR, in which a special DNA polymerase having 3′->5′ exonuclease activity is used, misincorporated nucleotides can be removed. Accordingly, accurate synthesis of the complementary strand can be achieved even with a long nucleotide sequence. By using LA PCR, it is reported that amplification of a nucleotide with 20 kb longer can be achieved under desirable conditions (Takeshi Hayashi (1996) Jikken-Igaku Bessatsu, “Advanced Technologies in PCR” Youdo-sha).

[0044] A template DNA for synthesizing the full-length cDNA of the present invention can be obtained by using cDNA libraries that are prepared by various methods. The full-length cDNA clones of the present invention are clones with high probability of completeness in length, which were obtained by the method comprising the steps of [1] preparing libraries containing cDNAs with the very high fullness ratio by oligo-capping, and [2] assembling the 5′-end sequences and selecting one with the highest probability of completeness in length in the cluster formed (there are many clones longer in the 5′-end direction).

[0045] However, the uses of primers designed based on the full-length nucleotide sequences provided by the present invention enable easily obtaining full-length cDNAs without such a special technique.

[0046] The problem with the cDNA libraries prepared by the known methods or commercially available is that mRNA contained in the libraries has very low fullness ratio. Thus, it is difficult to screen full-length cDNA clone directly from the library using ordinary cloning methods. The present invention has revealed a nucleotide sequence of novel full-length cDNA. If a full-length nucleotide sequence is provided, it is possible to synthesize a target full-length cDNA by using enzymatic reactions such as PCR. In particular, a full-length-enriched cDNA library, synthesized by methods such as oligo-capping, is desirable to synthesize a full-length cDNA with more reliability. The 5′-end sequence of the full-length cDNA clones of the invention can be used to isolate the regulatory element of transcription including the promoter on the genome. A rough draft of the human genome (analysis of human genomic sequence with lower accuracy), which covers 90% of the genome, has been reported (Nature, Vol.409, 814-823, 2001), and by the year 2003, analysis of the entire human genomic sequence is going to be finished. However, it is hard to analyze with software the transcription start sites on the human genome, in which long introns exist. By contrast, it is easy to specify the transcription start site on the genomic sequence using the nucleotide sequence which includes the 5′-end of the full-length cDNA clone of the present invention, and thus it is easy to obtain the genomic region involved in transcription regulation, which includes the promoter that is contained in the upstream of the transcription start site.

[0047] The polypeptide encoded by the full-length cDNA of the invention can be prepared as a recombinant polypeptide or as a natural polypeptide. For example, the recombinant polypeptide can be prepared by inserting the polynucleotide encoding the polypeptide of the invention into a vector, introducing the vector into an appropriate host cell and purifying the polypeptide expressed within the transformed host cell, as described below. In contrast, the natural polypeptide can be prepared, for example, by utilizing an affinity column to which an antibody against the polypeptide of the invention (Current Protocols in Molecular Biology (1987) Ausubel et al. edit, John Wiley & Sons, Section 16.1-16.19) is attached. The antibody used for affinity purification may be either a polyclonal antibody, or a monoclonal antibody. Alternatively, in vitro translation (See, for example, “On the fidelity of mRNA translation in the nuclease-treated rabbit reticulocyte lysate system.” Dasso M. C., and Jackson R. J. (1989) Nucleic Acids Res. 17: 3129-3144) may be used for preparing the polypeptide of the invention.

[0048] Polypeptides functionally equivalent to the polypeptides of the present invention can be prepared based on the activities, which were clarified in the above-mentioned manner, of the polypeptides of the present invention. Using the biological activity possessed by the polypeptide of the invention as an index, it is possible to verify whether or not a particular polypeptide is functionally equivalent to the polypeptide of the invention by examining whether or not the polypeptide has said activity.

[0049] Polypeptides functionally equivalent to the polypeptides of the present invention can be prepared by those skilled in the art, for example, by using a method for introducing mutations into an amino acid sequence of a polypeptide (for example, site-directed mutagenesis (Current Protocols in Molecular Biology, edit, Ausubel et al., (1987) John Wiley & Sons, Section 8.1-8.5) Besides, such polypeptides can be generated by spontaneous mutations. The present invention also includes a polypeptide comprising the amino acid sequence shown in Table 1 in which one or more amino acids are substituted, deleted, inserted, and/or added, as long as the polypeptides have the equivalent functions to those of the polypeptides identified in the present Examples described later.

[0050] There are no limitations on the number and sites of amino acid mutations, as long as the polypeptides maintain the functions thereof. The number of mutations typically corresponds to 30% or less, or 20% or less, or 10% or less, preferably 5% or less, or 3% or less of the total amino acids, more preferably 2% or less or 1% or less of the total amino acids. Alternatively, herein, substitution of one or more amino acids includes substitution of several amino acids. As used herein, the term “several amino acids” means, for example, 5 amino acids, preferably 4 or 3 amino acids, more preferably 2 amino acids, and further preferably 1 amino acid.

[0051] From the viewpoint of maintaining the polypeptide function, it is preferable that a substituted amino acid has a similar property to that of the original amino acid. For example, Ala, Val, Leu, Ile, Pro, Met, Phe and Trp are assumed to have similar properties to one another because they are all classified into a group of non-polar amino acids. Similarly, substitution can be performed among non-charged amino acid such as Gly, Ser, Thr, Cys, Tyr, Asn, and Gln, acidic amino acids such as Asp and Glu, and basic amino acids such as Lys, Arg, and His.

[0052] In addition, polypeptides functionally equivalent to the polypeptides of the present invention can be isolated by using techniques of hybridization or gene amplification known to those skilled in the art. Specifically, using the hybridization technique (Current Protocols in Molecular Biology, edit, Ausubel et al., (1987) John Wiley & Sons, Section 6.3-6.4)), those skilled in the art can usually isolate a polynucleotide highly homologous to the polynucleotide encoding the polypeptide identified in the present Example based on the identified nucleotide sequence (Table 1) or a portion thereof and obtain the functionally equivalent polypeptide from the isolated polynucleotide. The present invention include polypeptides encoded by the polynucleotides hybridizing with the polynucleotides encoding the polypeptides identified in the present Example, as long as the polypeptides are functionally equivalent to the polypeptides identified in the present Example. Organisms from which the functionally equivalent polypeptides are isolated are illustrated by vertebrates such as human, mouse, rat, rabbit, pig and bovine, but are not limited to these animals.

[0053] Washing conditions of hybridization for the isolation of polynucleotides encoding the functionally equivalent polypeptides are usually “1×SSC, 0.1% SDS, 37° C.”; more stringent conditions are “0.5×SSC, 0.1% SDS, 42° C.”; and still more stringent conditions are “0.1×SSC, 0.1% SDS, 65° C.”. Alternatively, the following conditions can be given as hybridization conditions of the present invention. Namely, conditions in which the hybridization is done at “6×SSC, 40% Formamide, 25° C.”, and the washing at “1×SSC, 55° C.” can be given. More preferable conditions are those in which the hybridization is done at “6×SSC, 40% Formamide, 37° C.”, and the washing at “0.2×SSC, 55° C.”. Even more preferable are those in which the hybridization is done at “6×SSC, 50% Formamide, 37° C.”, and the washing at “0.1×SSC, 62° C.”. The more stringent the conditions of hybridization are, the more frequently the polynucleotides highly homologous to the probe sequence are isolated. Therefore, it is preferable to conduct hybridization under stringent conditions. Examples of stringent conditions in the present invention are, washing conditions of “0.5×SSC, 0.1% SDS, 42° C.”, or alternatively, hybridization conditions of “6×SSC, 40% Formamide, 37° C.”, and the washing at “0.2×SSC, 55° C.”.

[0054] One skilled in the art can suitably select various conditions, such as dilution ratios of SSC, formamide concentrations, and temperatures to accomplish a similar stringency.

[0055] However, the above-mentioned combinations of SSC, SDS and temperature conditions are indicated just as examples. Those skilled in the art can select the hybridization conditions with similar stringency to those mentioned above by properly combining the above-mentioned or other factors (for example, probe concentration, probe length and duration of hybridization reaction) that determines the stringency of hybridization.

[0056] The amino acid sequences of polypeptides isolated by using the hybridization techniques usually have high identity to those of the polypeptides of the present invention, which are shown in Table 1. The present invention encompasses a polynucleotide comprising a nucleotide sequence that has a high identity to the nucleotide sequence of claim 1 (a) . Furthermore, the present invention encompasses a peptide, or polypeptide comprising an amino acid sequence that has a high identity to the amino acid sequence encoded by the polynucleotide of claim 1 (b). The term “high identity” indicates sequence identity-of at least 40% or more; preferably 60% or more; and more preferably 70% or more. Alternatively, more preferable is identity of 90% or more, or 93% or more, or 95% or more, furthermore, 97% or more, or 99% or more. The identity can be determined by using the BLAST search algorithm.

[0057] As used herein, “percent identity” of amino acid sequences or nucleic acids is determined using the algorithm BLAST of Karlin and Altschul (Proc. Natl. Acad. Sci. USA 90:5873-5877, 1993). Such an algorithm is incorporated into the BLASTN and BLASTX programs of Altschul et al. (J. Mol. Biol.215:403-410, 1990). BLAST nucleotide searches are performed with the BLASTN program, for example, score=100, wordlength=12. BLAST protein searches are performed with the BLASTX program, for example, score=50, wordlength=3. When utilizing BLAST and Gapped BLAST programs, the default parameters of the respective programs are used. See http://www.ncbi.nlm.nih.gov.

[0058] With the gene amplification technique (PCR) (Current Protocols in Molecular Biology, edit, Ausubel et al., (1987) John Wiley & Sons, Section 6.1-6.4)) using primers designed based on the nucleotide sequence (Table 1) or a portion thereof identified in the present Example, it is possible to isolate a polynucleotide fragment highly homologous to the polynucleotide sequence or a portion thereof and to obtain functionally equivalent polypeptide to a particular polypeptide identified in the present Example based on the isolated polynucleotide fragment.

[0059] The present invention also provides a polynucleotide containing at least 15 nucleotides complementary to a polynucleotide comprising a nucleotide sequence of SEQ ID NOs shown in Table 1 or the complementary strand thereof. Herein, the term “complementary strand” is defined as one strand of a double strand DNA composed of A:T and G:C base pair to the other strand. Also, “complementary” is defined as not only those completely matching within a continuous region of at least 15 nucleotides, but also having a identity of at least 70%, favorably 80% or higher, more favorably 90% or higher, and most favorably 95% or higher within that region. The identity may be determined using the algorithm described herein.

[0060] Such a polynucleotide includes probes and primers used for the detection and amplification of a polynucleotide encoding the inventive polypeptide. When used as a primer, the polynucleotide usually comprises 15 to 100 bp, and preferably of 15 to 35 bp. When used as a probe, the polynucleotide comprises the whole or a part of the sequence of a polynucleotide of the invention, and comprises at least 15 bp. When used as primers, such polynucleotides are complementary at the 3′-end, and restriction enzyme recognition sequences or tags can be added to the 5′-end.

[0061] Furthermore, polynucleotides of the present invention include an antisense polynucleotide for suppressing the expression of a polypeptide of the invention, which comprises an amino acid sequence of SEQ ID NOs shown in Table 1. To exert an antisense effect, an antisense polynucleotide has at least 15 bp or more, for example 50 bp or more, preferably 100 bp or more, and more preferably 500 bp or more, and usually has 3000 bp or less, and preferably 2000 bp or less. Antisense polynucleotides can be used in the gene therapy of diseases caused by abnormalities of the polypeptides of the invention (abnormal function or abnormal expression). An antisense polynucleotide can be prepared, for example, by the phosphorothioate method (“Physicochemical properties of phosphorothioate oligodeoxynucleotides.” Stein (1988) Nucleic Acids Res. 16: 3209-3221) based on the sequence information of polynucleotide encoding a polypeptide of the invention (for example, the nucleotide sequences of SEQ ID NO: 1 to 2443).

[0062] The polynucleotides or antisense polynucleotides of the present invention can be used in, for example, gene therapy. As target diseases, for example, cancers or various inflammatory diseases may be preferable. These molecules can be used for gene therapy, for example, by administrating them to patients by the in vivo or ex vivo method using virus vectors such as retrovirus vectors, adenovirus vectors, and adeno-related virus vectors, or non-virus vectors such as liposomes.

[0063] The present invention also includes a partial peptide of the polypeptides of the invention. The partial peptide comprises a polypeptide generated as a result that a signal peptide has been removed from a secretory protein. If the polypeptide of the present invention has an activity as a receptor or a ligand, the partial peptide may function as a competitive inhibitor of the polypeptide and may bind to the receptor (or ligand). In addition, the present invention includes an antigen peptide for raising antibodies. For the peptides to be specific for the polypeptide of the invention, the peptides comprise at least 7 amino acids, preferably 8 amino acids or more, more preferably 9 amino acids or more, and even more preferably 10 amino acids or more. The peptide can be used for preparing antibodies against the polypeptide of the invention, or competitive inhibitors of them, and also screening for a receptor that binds to the polypeptide of the invention. The partial peptides of the invention can be produced, for example, by genetic engineering methods, known methods for synthesizing peptides, or digesting the polypeptide of the invention with an appropriate peptidase.

[0064] The present invention also relates to a vector into which a polynucleotide of the invention is inserted. The vector of the invention is not limited as long as it contains the inserted polynucleotide stably. For example, if E. coli is used as a host, vectors such as pBluescript vector (Stratagene) are preferable as a cloning vector. To produce the polypeptide of the invention, expression vectors are especially useful. Any expression vector can be used as long as it is capable of expressing the polypeptide in vitro, in E. coli, in cultured cells, or in vivo. For example, pBEST vector (Promega) is preferable for in vitro expression, pET vector (Invitrogen) for E. coli, pME18S-FL3 vector (GenBank Accession No. AB009864) for cultured cells, and pME18S vector (Mol. Cell. Biol. (1988) 8: 466-472) for in vivo expression. To insert the polynucleotide of the invention, ligation utilizing restriction sites can be performed according to the standard method (Current Protocols in Molecular Biology (1987) Ausubel et al. edit, John Wiley & Sons, Section 11.4-11.11).

[0065] Recently, the technique of GATEWAYT system (Invitrogen), which is an expression vector construction system for polypeptide expression, has been developed (Experimental Medicine, Vol. 18, No. 19 (December) , p2716-2717, 2000). This system includes two types of site-specific recombinases (BP CLONASE™ and LR CLONASE™) derived from lambda phage and uses BP CLONASE™—specific recombination sites for an Entry Vector and LR CLONASE™—specific recombination sites for a Destination Vector, which may comprise a tag useful for polypeptide purification. With this system, an expression vector can be obtained by using homologous recombination.

[0066] First, a polynucleotide fragment of interest is inserted into the entry vector using the first recombination. Then, the secondary recombination is allowed to take place between the entry vector, where the polynucleotide fragment of interest has been inserted, and the destination vector. Thus, the expression vector can be prepared rapidly and highly efficiently. With the above-mentioned typical method using restriction enzyme and ligase reactions, the step of expression vector construction and expression of polypeptide of interest takes about 7 to 10 days. However, with the GATEWAY™ system, the polypeptide of interest can be expressed and prepared in only 3 to 4 days. Thus, the system ensures a high-throughput functional analysis for expressed polypeptides

[0067] (http://biotech.nikkeibp.co.jp/netlink/lto/gateway/).

[0068] The present invention also relates to a transformant carrying the vector of the invention. Any cell can be used as a host into which the vector of the invention is inserted, and various kinds of host cells can be used depending on the purposes. For strong expression of the polypeptide in eukaryotic cells, COS cells or CHO cells can be used, for example.

[0069] Introduction of the vector into host cells can be performed, for example, by calcium phosphate precipitation method, electroporation method (Current Protocols in Molecular Biology (1987) Ausubel et al. edit, John Wiley & Sons, Section 9.1-9.9), lipofectamine method (GIBCO-BRL), or microinjection method, etc.

[0070] Further, a polynucleotide containing at least 15 nucleotides comprising a nucleotide sequence of any one of the polynucleotides comprising the nucleotide sequences of SEQ ID NOs shown in Table 1 or the complementary strand thereof can be used not only as a primer for synthesizing full-length cDNAs but also for testing and diagnosing the abnormalities of the polypeptide encoded by the full-length CDNA of the present invention. For examples, by utilizing polymerase chain reaction (genomic DNA-PCR, or RT-PCR) using the polynucleotide of the invention as a primer, polynucleotide encoding the polypeptide of the invention can be amplified. It is also possible to obtain the regulatory region of expression in the 5′-upstream by using PCR or hybridization since the transcription start site within the genomic sequence can be easily specified based on the 5′-end sequence of the full-length cDNA. The obtained genomic region can be used for detection and/or diagnosis of the abnormality of the sequence by RFLP analysis, SSCP, or sequencing. Especially, in the case where expression of the mRNA of the present invention varies according to a specific disease, analysis of the amount of expression of the mRNA using the polynucleotide of the present invention as a probe or a primer enables detection and diagnosis of the disease.

[0071] The present invention also relates to antibodies that bind to the polypeptide of the invention. There are no limitations in the form of the antibodies of the invention. They include polyclonal antibodies, monoclonal antibodies, or their portions that can bind to an antigen. They also include antibodies of all, classes. Furthermore, special antibodies such as humanized antibodies and chimeric antibodies are also included.

[0072] The polyclonal antibody of the invention can be obtained according to the standard method by synthesizing an oligopeptide corresponding to the amino acid sequence and immunizing rabbits with the peptide (Current Protocols in Molecular Biology (1987) Ausubel et al. edit, John Wiley & Sons, Section 11.12-11.13). The monoclonal antibody of the invention can be obtained according to the standard method by purifying the polypeptide expressed in E. coli, immunizing mice with the polypeptide, and producing a hybridoma cell by fusing the spleen cells and myeloma cells (Current Protocols in Molecular Biology (1987) Ausubel et al. edit, John Wiley & Sons, Section 11.4-11.11).

[0073] The antibody binding to the polypeptide of the present invention can be used for purification of the polypeptide of the invention, and also for detection and/or diagnosis of the abnormalities of the expression and structure of the polypeptide. Specifically, polypeptides can be extracted, for example, from tissues, blood, or cells, and the polypeptide of the invention is detected by Western blotting, immunoprecipitation, or ELISA, etc. for the above purpose.

[0074] Furthermore, the antibody binding to the polypeptide of the present invention can be utilized for treating the diseases that associates with the polypeptide of the invention. If the antibodies are used for treating patients, human antibodies, humanized antibodies, or chimeric antibodies are preferable in terms of their low antigenicity. The human antibodies can be prepared by immunizing a mouse whose immune system is replaced with that of human (e.g., see “Functional transplant of megabase human immunoglobulin loci recapitulates human antibody response in mice” Mendez, M. J. et al. (1997) Nat. Genet. 15: 146-156). The humanized antibodies can be prepared by recombination of the hypervariable region of a monoclonal antibody (Methods in Enzymology (1991) 203: 99-121).

[0075] A cDNA of the present invention encodes, for example, an amino acid sequence of a protein that is predicted to have the following function. The use of the amino acid sequences of the polypeptides encoded by the cDNAs of the present invention enables predicting that the polypeptides have the following functions. It can be predict, from the results of homology search of SwissProt, GenBank, UniGene, or nr, that these polypeptides have such functions. Specifically, for instance, as shown in Examples, searching for a known gene or polypeptide that is homologous to the partial sequence of the full-length cDNA of the invention (2443 clone) and referring the function of the gene and of the polypeptide encoded by the gene make it possible to predict the function of the polypeptide encoded by the cDNA of the invention. In this way, each of 1216 clones out of the 2443 full-length cDNA clones of the invention was predicted to encode a polypeptide that was classified into the following categories.

[0076] Secretory and/or membrane protein (632 clones)

[0077] Glycoprotein-related protein (128 clones)

[0078] Signal transduction-related protein (84 clones)

[0079] Transcription-related protein (144 clones)

[0080] Disease-related protein (387 clones)

[0081] Enzyme and/or metabolism-related protein (206 clones)

[0082] Cell division- and/or cell proliferation-related protein (33 clones)

[0083] Cytoskeleton-related protein (75 clones)

[0084] Nuclear protein and/or RNA synthesis-related protein (65 clones)

[0085] Protein synthesis- and/or transport-related protein (62 clones)

[0086] Cellular defense-related protein (15 clones)

[0087] Development and/or differentiation-related protein (13 clones)

[0088] DNA- and/or RNA-binding protein (174 clones)

[0089] ATP- and/or GTP-binding protein (68 clones)

[0090] The functions of the polypeptides encoded by the cDNAs of the present invention can be predicted by assessing the presence of signal sequence, transmembrane region, nuclear translocation signal, glycosylation signal, phosphorylation site, and zinc finger motif, SH3 domain, etc. in the amino acid sequences. The programs, PSORT (Nakai K., and Kanehisa M. (1992) Genomics 14: 897-911), SOSUI (Hirokawa T. et al. (1998) Bioinformatics 14: 378-379) (Mitsui Knowledge Industry), and MEMSAT (Jones D. T., Taylor W. R., and Thornton J. M. (1994) Biochemistry 33: 3038-3049) can be used to predict the existence of the signal sequence or transmembrane region. Alternatively, a partial amino acid sequence of the polypeptide is fused with another polypeptide such as GFP, the fusion polypeptide is transfected into cultured cells, and the localization is analyzed to predict the function of the original polypeptide.

[0091] Based on the determined nucleotide sequences of the full-length cDNAs obtained in the present invention, it is possible to predict more detailed functions of the polypeptides encoded by the cDNA clones, for example, by searching the databases such as GenBank, Swiss-Prot, UniGene, and nr for homologies of the cDNAs; or by searching the amino acid sequences deduced from the full-length cDNAs for signal sequences by using software programs such as PSORT, for transmembrane regions by using software programs such as SOSUI or for motifs by using software programs such as Pfam (http://www.sanger.ac.uk/Software/Pfam/index-shtml) and PROSITE (http://www.expasy.ch/prosite/). As a matter of course, the functions are often predictable by using partial sequence information (preferably 300 nucleotides or more) instead of the full-length nucleotide sequences. However, the result of the prediction by using partial nucleotide sequence does not always agree with the result obtained by using full-length nucleotide sequence, and thus, it is needless to say that the prediction of function is preferably performed based on the full-length nucleotide sequences.

[0092] GenBank, Swiss-Prot, UniGene and nr databases were searched for homologies of the full-length nucleotide sequences of the 2443 clones (see Example 6). The amino acid sequences deduced from the full-length nucleotide sequences were searched for functional domains by PSORT, SOSUI and Pfam. Prediction of functions of polypeptides encoded by the, clones and the categorization thereof were performed based on these results obtained. The categorization was carried out by the following method.

[0093] [1] Firstly, the cDNA clones were classified into the above-mentioned 14 functional categories based on the results of annotation-based categorization (using the keywords in the case of Swiss-Prot hit data; using Definition or Reference information in the case of GenBank, UniGene, or nr hit data), and the signal sequence search of the deduced ORFs by PSORT and the transmembrane region search by SOSUI.

[0094] [2] Secondly, clones which had been unassignable to the categories by the method of [1] were searched for functional domains and/or motifs by Pfam. Based on the results, the clones were additionally classified into the above-mentioned 14 types of categories when they had a functional domain and/or motif assignable to any one of the categories.

[0095] The following 632 clones presumably belong to secretory and/or membrane proteins. ADIPS10000640, ADRGL10001470, ADRGL20013520, ADRGL20018540, ADRGL20035850, ASTRO20001410, ASTRO20005330, ASTRO20033160, ASTRO20055750, ASTRO20058630, ASTRO20190390, BEAST20004540, BGGI110000240, BNGH420088500, BRACE20006400, BRACE20038000, BRACE20038470, BRACE20039040, BRACE20039540, BRACE20051380, BRACE20053630, BRACE20059370, BRACE20060550, BRACE20061050, BRACE20063630, BRACE20067430, BRACE20069090, BRACE20081720, BRACE20101700, BRACE20101710, BRACE20116110, BRACE20147800, BRACE20153680, BRACE20163350, BRACE20179340, BRACE20188470, BRACE20195100, BRACE20201570, BRACE20210140, BRACE20224480, BRACE20224500, BRACE20228480, BRACE20232840, BRACE20238000, BRACE20273890, BRACE20274080, BRALZ20013500, BRALZ20054710, BRALZ20064740, BRALZ20069760, BRALZ20073760, BRALZ20077930, BRAMY20000860, BRAMY20002770, BRAMY20025840, BRAMY20039260, BRAMY20060920, BRAMY20063970, BRAMY20111960, BRAMY20112800, BRAMY20124260, BRAMY20134140, BRAMY20135900, BRAMY20136210, BRAMY20144620, BRAMY20152110, BRAMY20174550, BRAMY20181220, BRAMY20195090, BRAMY20211390, BRAMY20211420, BRAMY20215230, BRAMY20218250, BRAMY20218670, BRAMY20229800, BRAMY20231720, BRAMY20247280, BRAMY20252180, BRAMY20273960, BRAMY20277170, BRAMY20284910, BRAMY20285160, BRAWH20015350, BRAWH20015890, BRAWH20016860, BRAWH20018730, BRAWH20030250, BRAWH20064050, BRAWH20110790, BRAWH20112940, BRAWH20117950, BRAWH20118230, BRAWH20121640, BRAWH20122580, BRAWH20132190, BRCAN20064010, BRCAN20071190, BRCAN20091560, BRCAN20103740, BRCAN20224720, BRCAN20273550, BRCAN20280360, BRCAN20285450, BRCOC10000870, BRCOC20004040, BRCOC20006370, BRCOC20041750, BRCOC20077690, BRCOC20078640, BRCOC20090520, BRCOC20101230, BRCOC20107300, BRCOC20114180, BRCOC20121720, BRCOC20134480, BRCOC20136750, BRHIP10001290, BRHIP20000870, BRHIP20003120, BRHIP20103090, BRHIP20111200, BRHIP20118380, BRHIP20118910, BRHIP20121410, BRHIP20135100, BRHIP20174040, BRHIP20179200, BRHIP20183690, BRHIP20191490, BRHIP20191770, BRHIP20198190, BRHIP20207430, BRHIP20208270, BRHIP20208590, BRHIP20217620, BRHIP20233090, BRHIP20234380, BRHIP20238880, BRHIP20283030, BRHIP30004570, BRSSN20003120, BRSSN20043040, BRSSN20066110, BRSSN20120810, BRSSN20137020, BRSSN20142940, BRSSN20146100, BRSSN20151990, BRSSN20169050, BRSTN20002200, BRTHA20004740, BRTHA20046290, BRTHA20046420, COLON10001350, COLON20093370, CTONG10000100, CTONG10000940, CTONG10001650, CTONG20004690, CTONG20009770, CTONG20092570, CTONG20092580, CTONG20095340, CTONG20099380, CTONG20103480, CTONG20105080, CTONG20114740, CTONG20119200, CTONG20120770, CTONG20124730, CTONG20131490, CTONG20132220, CTONG20133480, CTONG20139340, CTONG20149950, CTONG20155400, CTONG20158660, CTONG20159530, CTONG20161850, CTONG20267700, D30ST10001090, D30ST20036070, D30ST20038560, D30ST30002580, D60ST20005070, D90ST20002780, D90ST20015470, D90ST20023970, D90ST20026730, D90ST20035940, D90ST20040180, DFNES20025880, FCBBF10000240, FCBBF10000380, FCBBF10001150, FCBBF10001210, FCBBF10001550, FCBBF10002430, FCBBF10002700, FCBBF10003220, FCBBF10003760, FCBBF10005460, FCBBF10005740, FCBBF20032970, FCBBF20042560, FCBBF20049300, FCBBF20051220, FCBBF30008470, FCBBF30024750, FCBBF30078290, FCBBF30083620, FCBBF30086440, FCBBF30090690, FCBBF30095260, FCBBF30123470, FCBBF30172550, FCBBF30175310, FCBBF30190850, FCBBF30215060, FCBBF30238870, FCBBF30251420, FCBBF30279030, FEBRA20002100, FEBRA20004620, FEBRA20009090, FEBRA20029860, FEBRA20037260, FEBRA20080810, FEBRA20086620, FEBRA20092890, FEBRA20093520, FEBRA20095880, FEBRA20111460, FEBRA20125070, FEBRA20130190, FEBRA20140100, FEBRA20145780, FEBRA20211710, FEBRA20223220, FEBRA20229630, FEBRA20235500, HCHON20000380, HCHON20008180, HCHON20015980, HCHON20016040, HCHON20016650, HCHON20040020, HCHON20064590, HCHON20067700, HCHON20068710, HCHON20086720, HCHON20100740, HEART20003060, HEART20005410, HEART20034320, HEART20049410, HEART20049800, HEART20072310, HHDPC20001040, HHDPC20014320, HHDPC20034720, HHDPC20068620, HHDPC20084140, HHDPC20091780, HHDPC20092080, HLUNG10000550, KIDNE20003940, KIDNE20007770, KIDNE20011400, KIDNE20021910, KIDNE20022620, KIDNE20100070, KIDNE20101510, KIDNE20109730, KIDNE20121880, KIDNE20125630, KIDNE20126010, KIDNE20126130, KIDNE20127450, KIDNE20130450, KIDNE20131580, KIDNE20137340, KIDNE20181660, LIVER20035110, LIVER20045650, LIVER20055200, LIVER20062510, LIVER20064690, LIVER20075680, LIVER20087060, LIVER20091180, MESAN10001260, MESAN20014500, MESAN20027090, MESAN20038510, MESAN20089360, MESAN20103120, MESAN20115970, MESAN20125860, MESAN20139360, MESAN2Q152770, MESAN20153910, MESAN20174170, NOVAR20000380, NT2NE20010050, NT2NE20021620, NT2NE20068130, NT2NE20118960, NT2NE20124480, NT2NE20131890, NT2NE20132170, NT2NE20155110, NT2NE20156260, NT2NE20157470, NT2NE20159740, NT2NE20177520, NT2NE20183760, NT2RI20003480, NT2RI20023910, NT2RI20025400, NT2RI20028470, NT2RI20040930, NT2RI20054050, NT2RI20056700, NT2RI20076290, NT2RI20086220, NT2RI20091940, NT2RI20244600, NT2RP70072690, NT2RP70081610, NT2RP70122910, NT2RP70125160, NT2RP70133740, NT2RP70134990, NT2RP70137290, NT2RP70179710, NT2RP70188020, NT2RP70192730, NT2RP70198350, NTONG20028070, NTONG20029700, NTONG20048060, NTONG20049910, NTONG20051530, NTONG20061870, NTONG20063010, NTONG20067830, NTONG20076930, NTONG20092330, OCBBF10001750, OCBBF20013890, OCBBF20019830, OCBBF20023570, OCBBF20026630, OCBBF20046690, OCBBF20050770, OCBBF20059560, OCBBF20063320, OCBBF20071210, OCBBF20072320, OCBBF20080050, OCBBF20086400, OCBBF20086910, OCBBF20087010, OCBBF20088140, OCBBF20091150, OCBBF20107090, OCBBF20108630, OCBBF20116850, OCBBF20120390, OCBBF20122620, OCBBF20130910, OCBBF20132850, OCBBF20145760, OCBBF20155060, OCBBF20178880, OCBBF20180120, OCBBF20180840, OCBBF20188730, PANCR10000910, PEBLM10000710, PEBLM20024320, PEBLM20040150, PEBLM20074370, PEBLM20075980, PERIC20004220, PLACE60086400, PLACE60121080, PLACE60161600, PLACE60177140, PROST20005050, PROST20050670, PROST20107820, PROST20116600, PROST20120160, PROST20127800, PROST20146010, PROST20164440, PROST20169800, PROST20170980, PROST20175290, PUAEN20003740, PUAEN20030180, SALGL10001710, SKMUS20003610, SKMUS20007800, SKMUS20011640, SKMUS20020840, SKMUS20028210, SKMUS20028400, SKMUS20077400, SKNSH20028660, SKNSH20031740, SKNSH20051940, SKNSH20063040, SMINT20009840, SMINT20011990, SMINT20022020, SMINT20029760, SMINT20040860, SMINT20050750, SMINT20053870, SMINT20073650, SMINT20095050, SMINT20100680, SMINT20105330, SMINT20106720, SMINT20121950, SMINT20127930, SMINT20144430, SMINT20144890, SMINT20153260, SMINT20154540, SMINT20157450, SMINT20173240, SMINT20178550, SMINT20191420, SMINT20192000, SPLEN20003070, SPLEN20021660, SPLEN20029310, SPLEN20079510, SPLEN20095810, SPLEN20097330, SPLEN20118300, SPLEN20141360, SPLEN20141990, SPLEN20142100, SPLEN20144520, SPLEN20152760, SPLEN20157880, SPLEN20165310, SPLEN20167200, SPLEN20169220, SPLEN20169720, SPLEN20171890, SPLEN20172120, SPLEN20179810, SPLEN20186430, SPLEN20211570, SPLEN20211940, SPLEN20213830, SPLEN20273950, SPLEN20292950, SPLEN20293800, SPLEN20304950, SPLEN20329240, STOMA20005390, STOMA20005670, STOMA20006400, STOMA20006780, STOMA20008880, STOMA20051200, STOMA20056640, STOMA20056670, STOMA20062130, STOMA20077450, STOMA20080500, STOMA20088380, STOMA20092530, SYNOV20001520, SYNOV20001730, SYNOV20002510, SYNOV20002790, SYNOV20002970, SYNOV20004260, SYNOV20007000, SYNOV20008240, SYNOV20009230, SYNOV20010880, SYNOV20011110, SYNOV20013000, SYNOV20013560, SYNOV20013900, SYNOV30001840, TBAES20003150, TESOP20004000, TESOP20005690, TESTI20001720, TESTI20036380, TESTI20037560, TESTI20094120, TESTI20110280, TESTI20123080, TESTI20123560, TESTI20128350, TESTI20136100, TESTI20136710, TESTI20143390, TESTI20148000, TESTI20164100, TESTI20193360, TESTI20209810, TESTI20209990, TESTI20211220, TESTI20214250, TESTI20216370, TESTI20230250, TESTI20231940, TESTI20242990, TESTI20244190, TESTI20254220, TESTI20254860, TESTI20265970, TESTI20271850, TESTI20272960, TESTI20284880, TESTI20291310, TESTI20291960, TESTI20303220, TESTI20303360, TESTI20303420, TESTI20307700, TESTI20309170, TESTI20314180, TESTI20316870, TESTI20333000, TESTI20335200, TESTI20347180, TESTI20347300, TESTI20352620, TESTI20357960, TESTI20370810, TESTI20373820, TESTI20383880, TESTI20390260, TESTI20390410, TESTI20391770, TESTI20393530, TESTI20396130, TESTI20397760, TESTI20401020, TESTI20401280, TESTI20415170, TESTI20421490, TESTI20422640, TESTI20441940, TESTI20442760, TESTI20444130, TESTI20444180, TESTI20449200, TESTI20463520, TESTI20463580, TESTI20465350, THYMU10005360, THYMU10005540, THYMU20027560, THYMU20032870, THYMU20039810, THYMU20066100, THYMU20081490, THYMU20100410, THYMU20106710, THYMU20111830, THYMU20141670, THYMU20147770, THYMU20159430, THYMU20161640, THYMU20162190, THYMU20173980, THYMU20194420, THYMU20208300, THYMU20216840, THYMU20222890, THYMU20229220, THYMU20241850, THYMU20277390, TKIDN20005210, TRACH20002870, TRACH20003590, TRACH20016210, TRACH20019960, TRACH20029540, TRACH20033230, TRACH20034840, TRACH20042920, TRACH20050040, TRACH20067620, TRACH20068660, TRACH20069180, TRACH20076740, TRACH20085400, TRACH20085830, TRACH20109650, TRACH20111130, TRACH20121380, TRACH20128110, TRACH20128230, TRACH20134950, TRACH20136710, TRACH20139820, TRACH20140820, TRACH20145440, TRACH20168350, TRACH20180840, TRACH20190240, UMVEN20000690, UTERU20030570, UTERU20040610, UTERU20046980, UTERU20055480, UTERU20064860, UTERU20076390, UTERU20094350, UTERU20135860, UTERU20144640, UTERU20158300, UTERU20158800, UTERU20161570, UTERU20178100, UTERU20183640, UTERU20186740

[0096] The following 128 clones presumably belong to glycoprotein-related proteins. ADIPS10000640, BRACE20059370, BRACE20163350, BRAMY20277170, BRAMY20285160, BRAWH20064050, BRAWH20112940, BRAWH20117950, BRAWH20118230, BRCAN20103740, BRCOC20004040, BRCOC20006370, BRHIP10001290, BRHIP20103090, BRHIP20283030, BRHIP30004570, BRSSN20003120, BRSSN20146100, BRTHA20046290, COLON10001350, CTONG20159530, D90ST20023970, D90ST20040180, FCBBF10001150, FCBBF20049300, FCBBF30024750, FCBBF30083620, FCBBF30190850, FCBBF30238870, FEBRA20086620, FEBRA20092890, HCHON20015980, HCHON20016040, HCHON20064590, HCHON20086720, HCHON20100740, HEART20003060, HHDPC20014320, HHDPC20068620, HHDPC20092080, KIDNE20003940, KIDNE20007770, KIDNE20101510, LIVER20064690, MESAN20125860, NT2NE20118960, NT2NE20157470, NT2NE20177520, NT2RI20003480, NT2RI20056700, NT2RP70192730, NTONG20051530, NTONG20076930, OCBBF20107090, OCBBF20108630, OCBBF20120390, OCBBF20145760, OCBBF20155060, PLACE60177140, SMINT20050750, SMINT20073650, SMINT20105330, SMINT20106720, SMINT20112730, SMINT20127930, SMINT20153260, SMINT20179740, SMINT20190170, SPLEN20021660, SPLEN20142100, SPLEN20157880, SPLEN20165310, SPLEN20179810, SPLEN20186430, STOMA20001830, STOMA20005390, STOMA20005670, STOMA20006400, STOMA20008880, STOMA20034770, STOMA20056640, STOMA20056670, STOMA20083610, STOMA20088380, STOMA20092530, SYNOV20001520, SYNOV20001730, SYNOV20002510, SYNOV20002790, SYNOV20002970, SYNOV20004260, SYNOV20007000, .SYNOV20008240, SYNOV20009230, SYNOV20010880, SYNOV20011110, SYNOV20013000, SYNOV20013560, SYNOV20013900, TESOP20004000, TESTI20136100, TESTI20216370, TESTI20244190, TESTI20254860, TESTI20303220, TESTI20335200, TESTI20352620, TESTI20358980, TESTI20442760, TESTI20449200, TESTI20455090, THYMU10005360, THYMU10005540, THYMU20147770, THYMU20159430, THYMU20241850, TRACH20016210, TRACH20050040, TRACH20067620, TRACH20069180, TRACH20076740, TRACH20128230, UTERU20046980, UTERU20064860, UTERU20144640, UTERU20158800, UTERU20161570, UTERU20183640

[0097] The following 84 clones presumably belong to signal transduction-related proteins. ASTRO20108190, BRACE20115920, BRACE20154120, BRACE20177200, BRACE20237270, BRAMY20104640, BRAMY20242470, BRAMY20271400, BRAWH20016620, BRAWH20103290, BRAWH20149340, BRCOC20021550, BRCOC20091960, BRHIP20189980, BRHIP20218580, BRHIP20238600, BRSSN20038200, CD34C30004240, CTONG20118150, CTONG20127450, CTONG20200310, FCBBF30012350, FCBBF40001730, FEBRA10001880, FEBRA20004620, FEBRA20132740, FEBRA20144170, FEHRT20003250, HCHON20007510, HLUNG20033780, IMR3220002430, KIDNE20008010, KIDNE20102710, KIDNE20107620, NT2NE20080170, NT2NE20181650, NT2RP70027380, NT2RP70036880, NT2RP70063950, NT2RP70078420, NT2RP70159960, NTONG20046140, NTONG20056570, OCBBF20028050, OCBBF20053430, OCBBF20054760, OCBBF20124360, OCBBF20127140, OCBBF20149280, OCBBF20173980, PEBLM20013120, PEBLM20085760, PROST20161950, PUAEN20015260, PUAEN20015860, PUAEN20083140, SMINT20028820, SMINT20049090, SMINT20110660, SPLEN20011410, SPLEN20121750, SPLEN20170310, SPLEN2018l810, SPLEN20222270, SPLEN20250170, SPLEN20283650, TESTI20035960, TESTI20288910, TESTI20305540, TESTI20326810, TESTI20369650, TESTI20392250, TESTI20416640, TESTI20432750, TESTI20467320, THYMU20169680, THYMU20172150, THYMU20201980, THYMU20202890, TKIDN20004640, TKIDN20047480, TRACH20057690, UMVEN10001860, UTERU20146310

[0098] The following 144 clones presumably belong to transcription-related proteins. 3NB6920014590, ADIPS20004250, ASTRO20008010, ASTRO20168470, BLADE20003400, BLADE20003890, BRACE20060890, BRACE20068590, BRACE20257100, BRAMY20210400, BRAMY20260910, BRAMY20270730, BRAWH20028110, BRAWH20075700, BRAWH20096780, BRCAN20280210, BRCOC20144000, BRCOC20178270, BRHIP20005340, BRHIP20096170, BRHIP20119330, BRHIP20191860, BRHIP20195890, BRHIP20222280, BRSSN20039370, BRSSN20046790, BRSSN20176820, CTONG20050280, CTONG20075860, CTONG20085950, CTONG20091080, CTONG20092700, CTONG20121010, CTONG20124220, CTONG20133390, CTONG20133520, D90ST20033970, FCBBF10001710, FCBBFl0004370, FCBBF20059090, FCBBF20068820, FCBBF30007680, FCBBF30010810, FCBBF30018550, FCBBF30025560, FCBBF30057290, FCBBF30083820, FCBBF30129630, FCBBF30240960, FCBBF30246230, FEBRA20018690, FEBRA20026110, FEBRA20034680, FEBRA20040530, FEBRA20082010, FEBRA20171380, FEBRA20195820, FEBRA20233770, HCHON20008320, HCHON20009560, HCHON20035130, HHDPC10000830, HHDPC20030490, HHDPC20031130, KIDNE20027250, KIDNE20027950, KIDNE20182690, LIVER20055440, NT2NE20010490, NT2NE20089970, NT2NE20142210, NT2NE20184900, NT2RP60000770, NT2RP70043480, NT2RP70063950, NT2RP70102350, NT2RP70157890, NTONG20070200, OCBBF10001850, OCBBF20020830, OCBBF20037440, OCBBF20046120, OCBBF20049300, OCBBF20054200, OCBBF20066390, OCBBF20071840, OCBBF2008041O, OCBBF20108190, OCBBF20125530, OCBBF20148280, PEBLM20060360, PEBLM20078320, PERIC20003870, PROST10003220, PROST20047390, PROST20066880, PROST20185830, PROST20189770, PROST20191640, SKNSH20008190, SMINT20001760, SMINT20028820, SMINT20130320, SMINT20144800, SPLEN20026950, SPLEN20054290, SPLEN20079260, SPLEN20095410, SPLEN20117660, SPLEN20140800, SPLEN20147390, SPLEN20160450, SPLEN20162680, SPLEN20243830, SPLEN20250170, SPLEN20252190, SPLEN20267650, STOMA20032890, STOMA20063250, TESTI20039400, TESTI20041690, TESTI20067200, TESTI20088220, TESTI20130010, TESTI20156100, TESTI20230850, TESTI20318090, TESTI20320670, TESTI20378190, TESTI20385960, TESTI20409890, TESTI20420620, TESTI20432820, TESTI20456110, THYMU20247480, TRACH20079690, TRACH20154860, TRACH20163170, TRACH20164980, TRACH20184490, UTERU20099720, UTERU20116570, UTERU20145480, UTERU20176130

[0099] The following 387 clones presumably belong to disease-related proteins. ADIPSZOO04250, ADRGL10001470, ADRGL20011190, ADRGL20018300, ADRGL20035850, ADRGL20078100, ASTRO10001650, ASTRO20008010, ASTRO20027430, ASTRO20106150, ASTRO20108190, ASTRO20168470, BLADE20003400, BLADE20003890, BRACE20038480, BRACE20039540, BRACE20059370, BRACE20108130, BRACE20108880, BRACE20115920, BRACE20116460, BRACE20232840, BRACE20248260, BRACE20253330, BRACE20284100, BRALZ20013500, BRALZ20017430, BRALZ20018340, BRAMY20000520, BRAMY20025840, BRAMY20120910, BRAMY20134140, BRAMY20135900, BRAMY20162510, BRAMY20174550, BRAMY20210400, BRAMY20211390, BRAMY20242470, BRAMY20245300, BRAMY20266850, BRAMY20285160, BRAWH20016620, BRAWH20028110, BRAWH20064050, BRAWH20096780, BRAWH20110960, BRAWH20113430, BRAWH20114000, BRAWH20118230, BRAWH20121640, BRAWH20128270, BRAWH20137480, BRCAN20103740, BRCAN20224720, BRCAN20279700, BRCAN20280210, BRCAN20283190, BRCOC20001860, BRCOC20006370, BRCOC20027510, BRCOC20055420, BRCOC20099370, BRCOC20178270, BRCOC20178560, BRHIP20003120, BRHIP20005340, BRHIP20174040, BRHIP20176420, BRHIP20191490, BRHIP20191860, BRHIP20194940, BRHIP20195890, BRHIP20222280, BRHIP20249110, BRHIP20285930, BRHIP30004880, BRSSN20013420, BRSSN20038200, BRSSN20039370, BRSSN20046790, BRSSN20066110, BRSSN20101100, BRSSN20120810, BRSSN20187310, BRTHA20046290, CD34C30004240, COLON10001350, CTONG20004690, CTONG20052650, CTONG20099550, CTONG20124220, CTONG20125640, CTONG20128430, CTONG20131560, CTONG20133390, CTONG20153300, CTONG20153580, CTONG20158040, CTONG20159530, D60ST20003580, D90ST20023970, DFNES20001530, DFNES20037420, FCBBF10001210, FCBBF10001710, FCBBF10003770, FCBBF20059090, FCBBF20064520, FCBBF20068820, FCBBF30010810, FCBBF30024750, FCBBF30025560, FCBBF30039020, FCBBF30049550, FCBBF30057290, FCBBF30083620, FCBBF30129630, FCBBF30190850, FCBBF30238870, FCBBF30240960, FCBBF30243640, FCBBF30279030, FCBBF30281880, FCBBF40001730, FEBRA10001880, FEBRA20004620, FEBRA20010120, FEBRA20018690, FEBRA20082010, FEBRA20097310, FEBRA20130190, FEBRA20132740, FEBRA20144170, FEBRA20195820, FEBRA20223220, FEBRA20233770, FEBRA20235500, FEHRT20003250, HCHON10001760, HCHON20007380, HCHON20008320, HCHON20009560, HCHON20015230, HCHON20015980, HCHON20016040, HCHON20035130, HCHON20036420, HCHON20064590, HCHON20067700, HCHON20086720, HCHON20100740, HEART20003060, HEART20017730, HEART20025980, HEART20049410, HHDPC20014320, HHDPC20030490, HHDPC20084140, HHDPC20091140, HHDPC20091780, HHDPC20092080, HLUNG20033780, IMR3220002430, KIDNE20007770, KIDNE20020150, KIDNE20021680, KIDNE20022620, KIDNE20024830, KIDNE20027950, KIDNE20101370, KIDNE20101510, KIDNE20182690, LIVER20002160, LIVER20055200, LIVER20055440, LIVER20059810, LIVER20064690, MESAN20101140, MESAN20125860, MESAN20130220, MESAN20154010, MESAN20174170, NOVAR10000910, NT2NE20010490, NT2NE20118960, NT2NE20157470, NT2RI20040990, NT2RI20041880, NT2RI20048840, NT2RI20050960, NT2RI20240080, NT2RP60000770, NT2RP70027380, NT2RP70032610, NT2RP70037240, NT2RP70192730, NT2RP70198350, NTONG20013620, NTONG20015870, NTONG20028070, NTONG20067830, NTONG20070200, NTONG20090600, NTONG20092330, OCBBF20006770, OCBBF20037440, OCBBF20046120, OCBBF20049300, OCBBF20053490, OCBBF20053730, OCBBF20054760, OCBBF20071840, OCBBF20072240, OCBBF20078920, OCBBF20108430, OCBBF20108580, OCBBF20127140, OCBBF20129360, OCBBF20145760, OCBBF20153350, OCBBF20173980, OCBBF20178880, PEBLM10000710, PEBLM20013120, PERIC10000250, PLACE60060420, PLACE60177140, PROST20100460, PROST20159240, PROST20169800, PROST20176170, PUAEN20018820, PUAEN20030180, PUAEN20055020, PUAEN20083140, SKMUS20018230, SKMUS20018500, SKMUS20021530, SKMUS20024750, SKMUS20029200, SKMUS20048970, SKMUS20049030, SKNSH20008190, SKNSH20089400, SMINT20001760, SMINT20026890, SMINT20028820, SMINT20050750, SMINT20073650, SMINT20105330, SMINT20112730, SMINT20121220, SMINT20127350, SMINT20127930, SMINT20136130, SMINT20138900, SMINT20153260, SMINT20155180, SMINT20179740, SMINT20190170, SMINT20191420, SPLEN20006070, SPLEN20011410, SPLEN20026950, SPLEN20027440, SPLEN20039240, SPLEN20079260, SPLEN20095410, SPLEN20146450, SPLEN20147390, SPLEN20151210, SPLEN20160450, SPLEN20170310, SPLEN20179180, SPLEN20186430, SPLEN20212730, SPLEN20243830, SPLEN20245300, SPLEN20250390, SPLEN20252190, SPLEN20267650, SPLEN20305620, STOMA20001830, STOMA20005390, STOMA20008880, STOMA20010250, STOMA20034770, STOMA20046680, STOMA20056670, STOMA20064470, STOMA20077450, STOMA20080500, STOMA20083610, STOMA20088380, SYNOV20001520, SYNOV20001730, SYNOV20002790, SYNOV20002970, SYNOV20007000, SYNOV20008240, SYNOV20009230, SYNOV20010880, SYNOV20011110, TBAES20003770, TESOP20004000, TESOP20005270, TESTI20031270, TESTI20036380, TESTI20044310, TESTI20067200, TESTI20116830, TESTI20121550, TESTI20156100, TESTI20168480, TESTI20208400, TESTI20215990, TESTI20231940, TESTI20234360, TESTI20237520, TESTI20238610, TESTI20239510, TESTI20249990, TESTI20266740, TESTI20316870, TESTI20318090, TESTI20335050, TESTI20335200, TESTI20343570, TESTI20352620, TESTI20368330, TESTI20369650, TESTI20385960, TESTI20392250, TESTI20400940, TESTI20404240, TESTI20420620, TESTI20436560, TESTI20438570, TESTI20441940, TESTI20442760, TESTI20443090, TESTI20449200, TESTI20455090, TESTI20455620, TESTI20456110, TESTI20463580, TESTI20465350, TESTI20465690, TESTI20467210, THYMU20122730, THYMU20126900, THYMU20130890, THYMU20159430, THYMU20169680, THYMU20172150, THYMU20180280, THYMU20193640, THYMU20209590, THYMU20232090, THYMU20247480, TKIDN10000010, TKIDN20004640, TKIDN20047480, TRACH20016210, TRACH20019960, TRACH20050040, TRACH20057690, TRACH20067620, TRACH20077540, TRACH20079690, TRACH20096610, TRACH20105870, TRACH20121380, TRACH20154860, TRACH20162860, TRACH20163170, TRACH20164980, TRACH20190240, TSTOM20005690, TUTER20002830, UTERU20030570, UTERU20116570, UTERU20144640, UTERU20151980, UTERU20158800, UTERU20183640, UTERU20185230

[0100] The following 206 clones presumably belong to the category of enzymes and/or metabolism-related proteins. 3NB6910001910, ADRGL10001470, ADRGL20035850, ADRGL20078100, ASTRO20105820, ASTRO20106150, ASTRO20130500, ASTRO20145760, BRACE20027620, BRACE20038000, BRACE20062640, BRACE20096200, BRACE20107530, BRACE20108130, BRACE20108880, BRACE20116460, BRACE20148240, BRACE20185680, BRACE20253160, BRALZ20017430, BRALZ20018340, BRAMY20104640, BRAMY20134140, BRAMY20153110, BRAMY20213100, BRAMY20252720, BRAWH20016620, BRAWH20105840, BRAWH2011294O, BRAWH20114000, BRAWH20117950, BRAWH20125380, BRAWH20132190, BRAWH20171030, BRCAN20054490, BRCAN20224720, BRCAN20280360, BRCAN20283190, BRCAN20283380, BRCOC20001860, BRCOC20031250, BRCOC20055420, BRCOC20091960, BRCOC20144000, BRHIP10001290, BRHIP20005530, BRHIP20096850, BRHIP20103090, BRHIP20174040, BRHIP20249110, BRSSN20013420, BRSSN20015790, BRSSN20120810, BRSSN20146100, CTONG20095340, CTONG20106520, CTONG20118250, CTONG20127450, CTONG20140580, CTONG20153300, CTONG20158040, D30ST20006180, D60ST20003580, DFNES20031920, DFNES20071130, FCBBF10001820, FCBBF10003670, FCBBF30012350, FCBBF30012810, FCBBF30175310, FCBBF30243640, FEBRA10001880, FEBRA20007620, FEBRA20130190, FEBRA20144170, FEBRA20167390, FEBRA20196630, FEHRT20003250, HCHON10001760, HCHON20003220, HCHON20015350, HEART20034320, HEART20090000, HHDPC20014320, KIDNE20002520, KIDNE20008010, KIDNE20021680, KIDNE20022620, KIDNE20028390, KIDNE20028720, KIDNE20107620, LIVER20059810, MESAN20154010, NT2NE20118960, NT2NE20157470, NT2RI20005750, NT2RI20244600, NT2RI20273230, NT2RP70032610, NT2RP70045590, NT2RP70192730, NT2RP70195430, NTONG20009770, NTONG20013620, NTONG20046140, OCBBF20028650, OCBBF20030910, OCBBF20046690, OCBBF20050770, OCBBF20053430, OCBBF20053490, OCBBF20053730, OCBBF20054760, OCBBF20078920, OCBBF20124360, OCBBF20129360, OCBBF20178880, PEBLM20044520, PEBLM20052820, PEBLM20060490, PERIC10000250, PLACE50000660, PROST20083600, PROST20169800, PUAEN20015260, PUAEN20030180, SKMUS20018230, SMINT20028820, SMINT20049090, SMINT20102780, SMINT20105330, SMINT20106290, SMINT20110660, SMINT20152940, SMINT20191420, SMINT20191530, SPLEN20021660, SPLEN20026950, SPLEN20121750, SPLEN20145720, SPLEN20149240, SPLEN20150940, SPLEN20151210, SPLEN20173510, SPLEN20212730, SPLEN20250390, SPLEN20305620, STOMA20006860, STOMA20077450, TBAES20002550, TBAES20003150, TESOP20004000, TESOP20005270, TESTI20001000, TESTI20002720, TESTI20002780, TESTI20060400, TESTI20066670, TESTI20082330, TESTI20083200, TESTI20108720, TESTI20116830, TESTI20143390, TESTI20148000, TESTI20216370, TESTI20232140, TESTI20234360, TESTI20237520, TESTI20239510, TESTI20266740, TESTI20314180, TESTI20334410, TESTI20343570, TESTI20352620, TESTI20355020, TESTI20366910, TESTI20368330, TESTI20369650, TESTI20375340, TESTI20397760, TESTI20416640, TESTI20432750, TESTI20463580, TESTI20465350, TESTI20471410, TESTI20473830, THYMU20023380, THYMU20111830, THYMU20126900, THYMU20169680, THYMU20202890, TKIDN20004640, TKIDN20047480, TRACH20003590, TRACH20016-210, TRACH20019960, TRACH20041830, TRACH20057690, TRACH20067620, TRACH20084720, TRACH20085830, TRACH20162860, UTERU20064860, UTERU20144640, UTERU20146310, UTERU20151980

[0101] The following 33 clones presumably belong to the category of cell division- and/or cell proliferation-related proteins. BRALZ20077900, BRAMY20135900, BRAWH20002320, BRAWH20128270, BRCAN20071190, BRCAN20273640, BRHIP20096170, CTONG10000940, CTONG20124220, FCBBF30247930, FEBRA20113560, HCASM10000500, HCHON20097490, MESAN20025190, NT2RI20050960, OCBBF20039250, OCBBF20054760, OCBBF20072240, SMINT20051610, SPLEN20147110, SPLEN20284240, TESOP20005690, TESTI20234360, TESTI20305540, TESTI20332420, TESTI20335050, TESTI20368330, TESTI20392760, TESTI20400940, THYMU20161640, TKIDN20047480,.UTERU20097760, UTERU20185230

[0102] The following 75 clones presumably belong to the category of cytoskeleton-related proteins. ADRGL20011190, ADRGL20018300, ASTRO10001650, ASTRO20055750, BRACE20003070, BRACE20059370, BRACE20163350, BRAMY20121620, BRAMY20157820, BRAMY20242470, BRAWH20028110, BRAWH20137480, BRCAN20003460, BRCOC20008160, BRCOC20059510, BRHIP20115080, BRHIP20137230, BRHIP20167880, BRHIP20283030, BRHIP20285830, BRSSN20187310, CTONG10002770, CTONG20052900, CTONG20121580, FCBBF10001150, FCBBF30013770, FCBBF30015940, FCBBF30049550, FEBRA20024100, FEBRA20237640, HCHON20015980, HCHON20068410, HEART20017730, HEART20025980, HEART20061950, HEART20077670, HLUNG20016330, KIDNE20118580, MESAN20004570, NT2RI20040990, NT2RI20041880, NT2RP70037240, NT2RP70062230, NTONG20015870, NTONG20056570, NTONG20067830, NTONG20090600, OCBBF20107090, OCBBF20155060, PLACE60079250, PUAEN20040670, SKMUS20001980, SKMUS20016220, SKMUS20048970, SKMUS20049030, SMINT20024570, SMINT20026890, SMINT20121220, SMINT20138900, SPLEN20006070, SPLEN20027440, SPLEN20142100, TESTI20063830, TESTI20094230, TESTI20278400, TESTI20371030, TESTI20417300, TESTI20436560, TESTI20455090, THYMU20105190, THYMU20172150, THYMU20209590, TRACH20096610, UMVEN10001560, UTERU20116570

[0103] The following 65 clones presumably belong to the category of nuclear proteins and/or RNA synthesis-related proteins. BRACE20057190, BRACE20064880, BRACE20248260, BRACE20253160, BRAMY20000520, BRAMY20120910, BRAWH20113430, BRAWH20171030, BRCAN10001490, BRCAN20283190, BRCOC20037320, BRCOC20178560, BRHIP20106100, BRHIP20176420, BRHIP20243470, BRSSN20101100, CTONG20114290, CTONG20125540, CTONG20131560, CTONG20140580, DFNES20001530, FCBBF20064520, FEBRA20007620, FEBRA20010120, FEBRA20097310, FEBRA20144170, FEBRA20174410, FEBRA20215500, IMR3220002430, MESAN20101140, NT2RI20273230, OCBBF20028650, OCBBF20030910, OCBBF20078920, PROST20104000, PUAEN20018820, SKMUS20007010, SMINT20127350, SMINT20177360, SMINT20191530, SPLEN20008740, SPLEN20146450, STOMA20046680, TESTI20082330, TESTI20094470, TESTI20121550, TESTI20208400, TESTI20234360, TESTI20237520, TESTI20249990, TESTI20334410, TESTI20355020, TESTI20368330, TESTI20392760, TESTI20408970, TESTI20436560, TESTI20438570, TESTI20443090, THYMU20193640, THYMU20202890, THYMU20241210, TRACH20096610, TUTER20002830, UTERU20151980, UTERU20176320

[0104] The following 62 clones presumably belong to the category of protein synthesis- and/or protein transport-related proteins. 3NB6910001910, ASTRO20106150, ASTRO20130500, ASTRQ20141350, BRACE20038480, BRACE20052160, BRACE20057620, BRACE20106840, BRACE20172980, BRACE20192440, BRAWH20110960, BRCOC20037320, BRHIP20005530, BRSSN20120810, BRSTN20005360, CTONG20009770, CTONG20114290, CTONG20125640, CTONG20153300, D60ST20003580, DFNES20037420, FCBBF30012810, FEBRA20080810, HCHON20064590, HHDPC20014320, HHDPC20084140, HLUNG20017120, LIVER20064690, NT2NE20132170, NT2NE20157470, NT2RP70133740, NTONG20009770, NTONG20075220, NTONG20076930, OCBBF20030910, OCBBF20035930, OCBBF20153340, PLACE60060420, SMINT20152940, SPLEN20008740, SPLEN20103950, SPLEN20118300, SPLEN20212730, SPLEN20250390, STOMA20077450, TBAES20002550, TESOP20004000, TESTI20239510, TESTI20278400, TESTI20314180, TESTI20463580, THYMU20111830, THYMU20122730, THYMU20130890, THYMU20232090, TKIDN10000010, TRACH20084720, TRACH20105870, TRACH20139820, TRACH20149970, UTERU20120310, UTERU20188110

[0105] The following 15 clones presumably belong to the category of cellular defense-related proteins. BRCOC20144000, CTONG20092680, KIDNE20020150, LIVER20002160, NT2RI20050960, NT2RP70045590, OCBBF20128120, PLACE60003480, SKNSH20089400, SMINT20106290, SPLEN20039240, TESTI20001000, TESTI20455620, TRACH20028030, UTERU20176320

[0106] The following 13 clones presumably belong to the category of development and/or differentiation-related proteins. 3NB6920014590, BRAMY20211390, CTONG20091080, CTONG20121010, FCBBF30024750, KIDNE20027250, NT2NE20142210, OCBBF20054200, PROST10003220, SKMUS20007010, SPLEN20179810, STOMA20063250, TESTI20291960

[0107] The following 174 clones presumably belong to the category of DNA- and/or RNA-binding proteins. 3NB6920014590, ADIPS20004250, ASTRO20008010, ASTRO20168470, BLADE20003400, BLADE20003890, BRACE20057620, BRACE20060890, BRACE20064880, BRACE20068590, BRACE20248260, BRACE20253160, BRAMY20000520, BRAMY20213100, BRAMY20260910, BRAMY20270730, BRAWH20028110, BRAWH20075700, BRAWH20096780, BRAWH20113430, BRCAN10001490, BRCAN20280210, BRCAN20283190, BRCOC20144000, BRCOC20178270, BRCOC20178560, BRHIP20005340, BRHIP20106100, BRHIP20119330, BRHIP20153600, BRHIP20176420, BRHIP20191860, BRHIP20195890, BRHIP20222280, BRSSN20039370, BRSSN20046790, BRSSN20176820, CTONG20050280, CTONG20075860, CTONG20085950, CTONG20091080, CTONG20092700, CTONG20121010, CTONG20124220, CTONG20125540, CTONG20133390, CTONG20133520, CTONG20140580, CTONG20156780, D90ST20033970, FCBBF10001710, FCBBF10004370, FCBBF20059090, FCBBF20064520, FCBBF20068820, FCBBF30007680, FCBBF30010810, FCBBF30018550, FCBBF30025560, FCBBF30057290, FCBBF30083820, FCBBF30129630, FCBBF30240960, FCBBF30246230, FEBRA20010120, FEBRA20018690, FEBRA20026110, FEBRA20034680, FEBRA20040530, FEBRA20082010, FEBRA20097310, FEBRA20171380, FEBRA20195820, FEBRA20196630, FEBRA20233770, HCHON20008320, HCHON20009560, HCHON20035130, HHDPC10000830, HHDPC20031130, KIDNE20017130, KIDNE20027250, KIDNE20027950, KIDNE20107390, KIDNE20182690, LIVER20055440, MESAN20101140, NT2NE20010490, NT2NE20089970, NT2NE20142210, NT2NE20184900, NT2RP60000770, NT2RP70044280, NT2RP70102350, NT2RP70157890, NTONG20070200, OCBBF10001850, OCBBF20020830, OCBBF20037440, OCBBF20046120, OCBBF20049300, OCBBF20066390, OCBBF20071840, OCBBF20078920, OCBBF20080410, OCBBF20108190, OCBBF20125530, OCBBF20148280, PEBLM20060360, PEBLM20060490, PEBLM20078320, PERIC10000250, PROST10003220, PROST20047390, PROST20066880, PROST20185830, PROST20189770, PROST20191640, PUAEN20018820, SKNSH20008190, SKNSH20089400, SMINT20001760, SMINT20127350, SMINT20144800, SMINT20177360, SMINT20191530, SPLEN20054290, SPLEN20079260, SPLEN20095410, SPLEN20140800, SPLEN20147390, SPLEN20160450, SPLEN20252190, SPLEN20267650, STOMA20010250, STOMA20032890, STOMA20046680, STOMA20063250, TESTI20039400, TESTI20067200, TESTI20088220, TESTI20094470, TESTI20121550, TESTI20130010, TESTI20156100, TESTI20204450, TESTI20230850, TESTI20237520, TESTI20266740, TESTI20318090, TESTI20320670, TESTI20334410, TESTI20355020, TESTI20378190, TESTI20385960, TESTI20432820, TESTI20443090, TESTI20456110, THYMU20193640, THYMU20241210, THYMU20247480, TRACH20079690, TRACH20105870, TRACH20139820, TRACH20154860, TRACH20163170, TRACH20164980, TRACH20184490, TUTER20002830, UTERU20099720, UTERU20116570, UTERU20145480, UTERU20176130, UTERU20185230

[0108] The following 68 clones presumably belong to the category of ATP- and/or GTP-binding proteins. 3NB6910001910, BRACE20108130, BRACE20148240, BRAMY20134140, BRAMY20157820, BRAMY20174550, BRAWH20164460, BRCAN20003460, BRCAN20054490, BRCAN20283190, BRCOC20059510, BRCOC20144000, BRHIP20103090, BRHIP20115080, BRHIP20167880, BRSTN20005360, CD34C30004240, CTONG20095340, CTONG20121580, CTONG20200310, DFNES20037420, FCBBF20067810, FCBBF30012350, FCBBF30015940, FEBRA20007620, FEBRA20024100, FEBRA20144170, KIDNE20020150, KIDNE20028720, LIVER20002160, LIVER20087060, NT2RI20005750, NT2RI20041880, NT2RI20048840, NT2RI20273230, OCBBF20028650, OCBBF20046690, OCBBF20054760, OCBBF20108430, OCBBF20108630, SMINT20121220, SMINT20183530, SMINT20191530, SPLEN20026950, SPLEN20039240, SPLEN20099700, SPLEN20145720, SPLEN20179180, STOMA20006860, TESTI20035960, TESTI20355020, TESTI20397760, TESTI20400940, TESTI20417300, TESTI20443090, TESTI20455620, THYMU20105190, THYMU20202890, THYMU20209590, TKIDN20004640, TKIDN20047480, TRACH20005400, TRACH20019960, TRACH20057690, TRACH20084720, UTERU20168220, UTERU20176320, UTERU20185230

[0109] Among the clones other than the ones shown above, BRAMY20248490, FCBBF10002800, NTONG20092290, OCBBF20127040, SMINT20163960, THYMU20279750, TRACH20167220, are clones which

[0110] were predicted to highly possibly belong to the category of secretory protein and/or membrane protein based on the result of domain search by Pfam. FCBBF10002800, NTONG20092290, OCBBF20127040, SMINT20163960, TESTI20478850, THYMU20279750

[0111] The 6 clones shown above are clones which were predicted to highly possibly belong to the category of glycoprotein-related protein based on the result of domain search by Pfam. BRACE20060720, BRACE20223330, BRALZ20058880, BRAMY20148130, BRAWH20101360, BRCAN20124080, BRHIP20253660, CTONG10000620, CTONG20014280, CTONG20124010, KIDNE20109890, MESAN20171520, OCBBF20109310, OCBBF20140640, PROST20079500, PUAEN20078980, SPLEN20077500, SPLEN20143180, TESTI20017950, TESTI20184620, TESTI20208710, TESTI20211160, TESTI20226230, TESTI20234140, TESTI20258460, TESTI20275030

[0112] The 26 clones shown above are clones which were predicted to highly possibly belong to the category of signal transduction-related protein based on the result of domain search by Pfam. ADRGL20048330, ASTRO20064750, ASTRO20084250, BRACE20151320, BRALZ20058880, BRHIP20207990, CTONG20093950, FCBBF30195640, FEBRA10001900, FEBRA20090290, FEBRA20214970, FEBRA20222040, KIDNE20109890, LIVER20087510, MESAN20029400, MESAN20031900, MESAN20035290, MESAN20136110, NT2NE20130190, PEBLM20060310, PERIC20004780, PROST20171280, PUAEN20078980, SMINT20115880, SPLEN20095550, TESTI20023510, TESTI20083940, TESTI20152460, TESTI20185650, TESTI20189410, TESTI20200710, TESTI20308600, TESTI20343070, TESTI20369690, TESTI20381040, UTERU20050690

[0113] The 36 clones shown above are clones which were predicted to highly possibly belong to the category of transcription-related protein based on the result of domain search by Pfam. BGGI120006160, BRACE20053480, BRACE20190040, BRACE20223330, BRAWH20101360, BRAWH20185060, BRCOC20023230, BRHIP20252450, BRSSN20105870, BRSSN20117990, BRTHA20000570, CTONG20098440, CTONG20129960, CTONG20146300, CTONG20155180, FEBRA20025270, HEART20083640, KIDNE20009470, LIVER20035680, MESAN20029400, MESAN20031900, MESAN20186700, NOVAR10000150, NTONG20029480, OCBBF20079310, OCBBF20082830, PEBLM20042900, PLACE60136500, PLACE60136720, PROST20114390, SKNSH20020540, SMINT20013480, SMINT20174360, SPLEN20077500, SPLEN20119810, SPLEN20126190, SPLEN20174260, SPLEN20211220, TESTI20046750, TESTI20057750, TESTI20061110, TESTI20197940, TESTI20211160, TESTI20226230, TESTI20255820, TESTI20317600, TESTI20377230, THYMU20111180, THYMU20115850, THYMU20143270, THYMU20240710, UTERU20055330, UTERU20055930, UTERU20064000, UTERU20119060

[0114] The 55 clones shown above are clones which were predicted to highly possibly belong to the category of enzyme and/or metabolism-related protein based on the result of domain search by Pfam. TESTI20127760, TESTI20392270

[0115] The 2 clone shown above is a clone which was predicted to highly possibly belong to the category of cell division and/or cell proliferation-related protein based on the result of domain search by Pfam. FCBBF30262510, MESAN20031900, NT2NE20125050, SMINT20068010, SPLEN20163560, STOMA20092890, TESTI20382750

[0116] The 7 clones shown above are clones which were predicted to highly possibly belong to the category of cytoskeleton-related protein based on the result of domain search by Pfam. THYMU20118520

[0117] The clone shown above is clone which was predicted to highly possibly belong to the category of Nuclear protein and/or RNA synthesis-related protein based on the result of domain search by Pfam. BRACE20053480, BRACE20240740, KIDNE20009470, OCBBF20140890, SMINT20035690, UTERU20064000

[0118] The 6 clones shown above are clones which were predicted to highly possibly belong to the category of Protein synthesis-and/or transport-related protein based on the result of domain search by Pfam. ADRGL20048330, ASTRO20064750, ASTRO20084250, BRACE20151320, BRACE20190040, BRACE20223330, BRALZ20058880, BRAMY20103570, BRCOC20023230, BRHIP20207990, BRTHA20000570, CTONG20093950, CTONG20129960, CTONG20146300, CTONG20155180, CTONG20160560, FCBBF10004120, FCBBF30195640, FEBRA10001900, FEBRA20090290, FEBRA20214970, FEBRA20222040, HCHON20008150, HEART20083640, KIDNE20109890, LIVER20035680, LIVER20087510, MESAN20029400, MESAN20031900, MESAN20035290, MESAN20136110, MESAN20186700, NT2NE20130190, NT2RI20025640, NTONG20029480, PEBLM20060310, PERIC20004780, PROST20114390, PROST20171280, PUAEN20078980, SMINT20115880, SPLEN20095550, SPLEN20119810, TESTI20023510, TESTI20057750, TESTI20083940, TESTI20152460, TESTI20185650, TESTI20189410, TESTI20200710, TESTI20308600, TESTI20343070, TESTI20369690, TESTI20381040, THYMU20115850, UTERU20050690, UTERU20055330

[0119] The 57 clones shown above are clones which were predicted to highly possibly belong to the category of DNA- and/or RNA-binding protein based on the result of domain search by Pfam. PLACE60136720

[0120] The clone shown above is a clone which was predicted to highly possibly belong to the category of ATP- and/or GTP-binding proteins based on the result of domain search by Pfam.

[0121] The 213 clones shown below are clones which were unassignable to any of the above-mentioned categories, but have been predicted to have some functions based on homology search using their full-length nucleotide sequences and motif search in their estimated ORFs. Clone Name, Definition in the result of homology search or Motif Name in the motif search, demarcated by a double slash mark (//), are shown below. ADRGL20028570//Rattus norvegicus MG87 mRNA, complete cds. ADRGL20061930//transposon-derived Busterl transposase-like protein ASTRO20012490//Eukaryotic initiation factor 1A ASTR020072210//PERIAXIN. ASTR020114370//Mus musculus SMAR1 mRNA, complete cds. ASTR020125520//dnaj protein [Schizosaccharomyces pombe] ASTR020143630//KH domain// Bacterial regulatory proteins, crp family ASTR020155290//TPR Domain// TPR Domain// TPR Domain ASTRO20181690//oocyte-specific protein P100 BGGI110001930//UBX domain BRACE20011070//Mus musculus F-box protein FBX15 mRNA, partial cds. BRACE20039440//Drosophila melanogaster CHARYBDE (charybde) mRNA, complete cds. BRACE20050900//TPR Domain// TPR Domain// TPR Domain// TPR Domain BRACE20053280//Mus musculus Pdz-containing protein (Pdzx) mRNA, complete cds. BRACE20057730//toxin sensitivity protein KTI12 homolog BRACE20058580//Homo sapiens HCMOGT-1 mRNA for sperm antigen, complete cds. BRACE20063780//NOLl/NOP2/sun family BRACE20269200//Heat-labile enterotoxin alpha chain BRACE20276430//Homo sapiens retinoblastoma-associated protein RAP140 mRNA, complete cds. BRACE20286360//Alpha adaptin carboxyl-terminal domain BRAMY10001300//Homo sapiens MAGE-Elb mRNA, complete cds. BRAMY20045240//Flagellar L-ring protein BRAMY20054880//Rattus norvegicus KPL2 (Kpl2) mRNA, complete cds. BRAMY20167060//Collagen triple helix repeat (20 copies) BRAMY20184670//Homo sapiens mRNA for ALEXI, complete cds. BRAMY20217460//Homo sapiens cardiac voltage gated potassium channel modulatory subunit mRNA, complete cds, alternatively spliced. BRAMY20240040//Homo sapiens suppressor of white apricot homolog 2 (SWAP2) mRNA, complete cds. BRAMY20247110//Mus musculus semaphorin cytoplasmic domain-associated protein 3A (Semcap3) mRNA, complete cds. BRAWHi20004600//Mus musculus mRNA for NAKAP95, complete cds. BRAWH20011710//cytoplasmic linker 2 BRAWH20012390//Trichomonas vaginalis mRNA for centrin (cel gene). BRAWH20017010//Homo sapiens testes development-related NYD-SP22 mRNA, complete cds. BRAWH20029630//Homo sapiens bet3 (BET3) mRNA, complete cds. BRAWH20138660//Homo sapiens stonin 2 mRNA, complete cds. BRCOC20008500//Human ras inhibitor mRNA, 3end. BRCOC20026640//Gag P30 core shell protein BRCOC20035130//14-3-3 PROTEIN EPSILON (MITOCHONDRIAL IMPORT STIMULATION FACTOR L SUBUNIT) (PROTEIN KINASE C INHIBITOR PROTEIN-1) (KCIP-1) (14-3-3E). BRCOC20074760//CDC4-LIKE PROTEIN (FRAGMENT). BRCOC20110100//Integrase core domain BRCOC20176520//Rattus norvegicus mRNA for type II brain 4.1, complete cds. BRHIP20001630//Protein of unknown function DUF16 - BRHIP20132860//Homo sapiens rhophilin-like protein mRNA, complete cds. BRHIP20143730//MYND finger BRHIP20175420//Mus musculus partial mRNA for stretch responsive protein 278 (sr278 gene). BRHIP20236950//Outer Capsid protein VP4 (Hemagglutinin) BRSSN20014260//RIBONUCLEASE INHIBITOR. BRSSN20018690//Homo sapiens NY-REN-25 antigen mRNA, partial cds. BRSSN20021600//RING CANAL PROTEIN (KELCH PROTEIN). BRSSN20177570//Phosducin BRSTN10000830//Kelch motif// Kelch motif// Kelch motif// Kelch motif CTONG10000220//Mus musculus cerebellar postnatal development protein-1 (Cpdl) mRNA, partial cds. CTONG10000930//Armadillo/beta-catenin-like repeats CTONG20027090//Glypican// Leucine Rich Repeat// Leucine Rich Repeat CTONG20076130//ZINC FINGER PROTEIN 185 (LIM-DOMAIN PROTEIN ZNF185) (P1-A). CTONG20096750//Disintegrin CTONG20100240//Mus musculus radial spokehead-L protein (Rshll) mRNA, complete cds. CTONG20139860//Homo sapiens nasopharyngeal carcinoma susceptibility protein LZ16 mRNA, complete cds. CTONG20143690//MYND finger CTONG20149460//RING CANAL PROTEIN (KELCH PROTEIN). CTONG20165050//Keratin, high sulfur B2 protein CTONG20186320//RING CANAL PROTEIN (KELCH PROTEIN). D30ST20013280//ARP2/3 COMPLEX 16 KDA SUBUNIT (P16-ARC). D30ST20024360//Homo sapiens neuroendocrine differentiation factor mRNA, complete cds. D90ST20031370//Homo sapiens mRNA for partial putative TCPTP-interacting protein (ptpip5 gene). DFNES20014040//TRICHOHYALIN. FCBBF10000630//Homo sapiens huntingtin interacting protein HYPB mRNA, partial cds. FCBBF10000770//Homo sapiens REC8 mRNA, partial cds. FCBBF10005060//CELLULAR RETINALDEHYDE-BINDING PROTEIN (CRALBP). FCBBF10005500//Keratin, high sulfur B2 protein FCBBF20014270//ACYL-COA-BINDING PROTEIN (ACBP) (DIAZEPAM BINDING INHIBITOR) (DBI) (ENDOZEPINE) (EP). FCBBF20042170//Homo sappiens NIBAN mRNA, complete cds. FCBBF30016320//SecA protein, amino terminal region FCBBF30033050//Sm protein FCBBF30054440//PLAT/LH2 domain FCBBF30225660//Ank repeat// Ank repeat// Ank repeat// K+channel tetramerisation domain// BTB/POZ domain FCBBF30233680//G1O protein FCBBF30246630//H.sapiens mRNA for ZYG homologue. FCBBF30250730//TRICHOHYALIN. FCBBF30252520//Homo sapiens bicaudal-D (BICD) mRNA, alternatively spliced, partial cds. FCBBF30252800//NDRG1 PROTEIN (DIFFERENTIATION-RELATED GENE 1 PROTEIN) (DRG1) (REDUCING AGENTS AND TUNICAMYCIN-RESPONSIVE PROTEIN) (RTP) (NICKEL- SPECIFIC INDUCTION PROTEIN CAP43). FCBBF30252850//Mus musculus peripherial benzodiazepine receptor associated - protein (Pap7) mRNA, complete cds. FCBBF30285280//Keratin, high sulfur B2 protein// Bacterial regulatory proteins, gntR family FEBRA20088360//ALPHA-ADAPTIN C (CLATHRIN ASSEMBLY PROTEIN COMPLEX 2 ALPHA-C LARGE CHAIN) (100 KDA COATED VESICLE PROTEIN C) (PLASMA MEMBRANE ADAPTOR HA2/AP2 ADAPTIN ALPHA C SUBUNIT). FEBRA20184330//Rattus norvegicus glutamate receptor interacting protein 2 (GRIP2) mRNA, complete cds. FEBRA20192420//Cyclin-dependent kinase inhibitor// IQ calmodulin-binding motif// IQ calmodulin-binding motif// IQ calmodulin-binding motif// IQ calmodulin-binding motif// IQ calmodulin-binding motif FEBRA20196370//Cyclin-dependent kinase inhibitor// IQ calmodulin-binding motif// IQ calmodulin-binding motif// IQ calmodulin-binding motif// IQ calmodulin-binding motif// IQ calmodulin-binding motif FEBRA20225040//high-glucose-regulated protein 8 HCHON20001560//TRANSCRIPTION FACTOR-LIKE PROTEIN MORF4. HCHON20003440//Homo sapiens cyclin-D binding Myb-like protein mRNA, complete cds. HCHON20010990//TPR Domain HCHON20059870//Hypothetical protein. HHDPC20034390//Cereal trypsin/alpha-amylase inhibito HHDPC20057420//Mus musculus proline-rich protein (Bprp) mRNA, complete cds. HHDPC20064600//SUPPRESSOR PROTEIN SRP40. HLUNG20023340//Mus musculus SLM-1 (Slml) mRNA, complete cds. KIDNE20007210//Xenopus laevis mRNA for RPA interacting protein alpha (ripalpha gene). KIDNE20028830//K-box region KIDNE20115080//Homo sapiens mRNA for hNBL4, complete cds. KIDNE20124400//Homo sapiens mRNA for ALEX1, complete cds. KIDNE20127100//Drosophila melanogaster Diablo (dbo) mRNA, complete cds. KIDNE20127750//Homo sapiens partial mRNA for transport-secretion protein 2.1 (TTS-2.1 gene). KIDNE20190740//Rattus norvegicus SNIP-b mRNA, complete cds. LIVER10004790//EF hand LIVER20011130//Homo sapiens F-box protein FBL9 mRNA, partial cds. LIVER20064100//Ciona intestinalis mRNA for myoplasmin-Cl, complete cds. LIVER20080530//Drosophila melanogaster forked mRNA for large Forked protein, complete cds. MAMGL10000830//Drosophila melanogaster L82B (L82) mRNA, complete cds. MESAN20036460//Corticotropin-releasing factor family MESAN20127350//myelin expression factor-3 MESAN20141920//Human ovarian cancer downregulated myosin heavy chain homolog (Docl) mRNA, complete cds. NT2NE20010400//Homo sapiens GLO13 mRNA, complete cds. NT2NE20122430//GLYOXYLATE-INDUCED PROTEIN. NT2NE20158600//erythroid ankyrin - Synechocystis sp. (strain PCC 6803). NT2RI20001330//Homo sapiens KE03 protein mRNA, partial cds. NT2RI20009870//lunatic fringe precursor [Mus musculus] NT2RI20046080//recA bacterial DNA recombination proteins NT2RI20091730//Molluscan rhodopsin C-terminal tail NT2RP60000850//Bos taurus RPGR-interacting protein-1 (RPGRIPl) mRNA, complete cds. NT2RP70080850//SPRY domain// Adenovirus-EB1 55K protein / large t-an NT2RP70105210//Myc amino-terminal region NT2RP70188710//Yeast PIR proteins NT2RP70194450//Bacterial regulatory proteins, crp family NTONG20052650//Gallus gallus Xin mRNA, complete cds. NTONG20064400//REPETIN. NTONG20064840//Mus musculus slpl mRNA for synaptotagmin-like protein 1, complete cds. NTONG20066460//Mus musculus Gd mRNA for gasdermin, complete cds. NTONG20067090//Mus musculus mRNA for Sh3yll, complete cds. NTONG20070340//collagen alpha 1(IX) chain NTONG20083650//TPR Domain// TPR Domain// TPR Domain// PPR repeat// TPR Domain// PPR repeat// TPR Domain NTONG20088620//Homo sapiens genethonin 3 mRNA, partial cds. OCBBF10000540//Mus musculus ris (rjs) mRNA, complete cds. OCBBF20019380//seizure related gene 6 OCBBF20022900//Homo sapiens SCHIP-1 mRNA, complete cds. OCBBF20030280//Rattus norvegicus hfb2 mRNA, complete cds. OCBBF20046470//ARFAPTIN 1. OCBBF20049840//Homo sapiens mRNA for neurabin II protein. OCBBF20068490//Mus musculus RWl protein mRNA, complete cds. OCBBF20071960//Coturnix coturnix japonica qMEF2D gene. OCBBF20073540//Homo sapiens p30 DBC mRNA, complete cds. OCBBF20121390//RING CANAL PROTEIN (KELCH PROTEIN). OCBBF20127550//Outer Capsid protein VP4 (Hemagglutinin) OCBBF20148730//RING CANAL PROTEIN (KELCH PROTEIN). OCBBF20178150//Plasmodium falciparum ADA2-like protein gene, partial cds. PEBLM10000240//Domain found in Dishevelled, Egl-10, and Ple PROST20047270//CRAL/TRIO domain. PROST20112970//Sterile alpha motif (SAM)/Pointed domain// SAM domain (Sterile alpha motif) PUAEN10000850//Uncharacterized protein family UPF0025// Secl family PUAEN20011880//Mus musculus mRNA for MIWI (piwi), complete cds. PUAEN20051100//Mus musculus otogelin mRNA, complete cds. PUAEN20108240//Drosophila melanogaster ankyrin 2 (Ank2) mRNA, complete cds. SKMUS20084740//Syndecan domain SMINT20053300//Homo sapiens hepatocellular carcinoma-associated antigen 59 mRNA, complete cds. SMINT20071400//NOL1/NOP2/sun family SMINT20101440//Human cisplatin resistance associated alpha protein (hCRA alpha) mRNA, complete cds. SMINT20110330//pKID domain SMINT20122910//Mus musculus StAR-related protein 1-4E mRNA, partial cds. SMINT20131810//ENV polyprotein (coat polyprotein) SMINT20168570//Homo sapiens mRNA for stabilin-1 (stabl gene). SPLEN20008390//Human placenta (Diff48) mRNA, complete cds. SPLEN20084600//RING CANAL PROTEIN (KELCH PROTEIN). SPLEN20128000//Xenopus laevis XMAB21 (Xmab-21) mRNA, complete cds. SPLEN20149110//Dishevelled specific domain SPLEN20171470//Keratin, high sulfur B2 protein SPLEN20194050//Homo sapiens HOTTL protein mRNA, complete cds. SPLEN20214580//Mus musculus mdgl-l mRNA, complete cds. STOMA20057820//Uncharacterized protein family UPF0024 STOMA20063980//Collagen triple helix repeat (20 copies) STOMA20069040//Keratin, high sulfur B2 protein SYNOV20017080//UBX domain TBAES20000590//Cytochrome P450// Cytochrome P450 TESTI20001170//HORMA domain TESTI20031810//Bacterial luciferase// Domain of unknown function DUF28 TESTI20044230//Mus musculus testis-specific Y-encoded-like protein (Tspyll) mRNA, complete cds. TESTI20098350//VAT-Nn domain TESTI20157520//K+channel tetramerisation domain// K+channel tetramerisation domain TESTI20170350//Cystine-knot domain TESTI20192800//Homo sapiens nasopharyngeal carcinoma susceptibility protein LZ16 mRNA, complete cds. TESTI20199750//TRICHOHYALIN. TEST120202650//Repeat in HS1/Cortactin TESTI20229600//Drosophila melanogaster SP2353 mRNA, complete cds. TESTI20231920//Gag P30 core shell protein TEST120242830//E2 (early) protein, C terminal// Syndecan domain TESTI20254540//Homo sapiens hepatocellular carcinoma-associated antigen 59 mRNA, complete cds. TESTI20320440//THIOREDOXIN. TESTI20327680//EF hand// EF hand TESTI20328280//KE2 family protein// Troponin TESTI20351830//K-box region TEST120370020//Bleomycin resistance protein TESTI20391210//IQ calmodulin-binding motif TESTI20408150//Keratin, high sulfur B2 protein TESTI20451990//SAP domain TESTI20467970//Neurohypophysial hormones, N-terminal Domain// Neurohypophysial hormones, N-terminal Domain// Neurohypophysial hormones, N- terminal Domain// Neurohypophysial hormones, N-terminal Domain// Neurohypophysial hormones, N-terminal Domain// Neurohypophysial hormones, N- terminal Domain// Neurohypophysial hormones, N-terminal Domain// Neurohypophysial hormones, N-terminal Domain// Neurohypophysial hormones, N- terminal Domain THYMU20108310//Mouse NCBP-29 mRNA for PW29, complete cds. THYMU20142040//WISKOTT-ALDRICH SYNDROME PROTEIN HOMOLOG (WASP). THYMU20194360//Kelch motif THYMU20239000//collagen alpha 1(XI) chain TOVAR20004760//Leucine Rich Repeat// Leucine Rich Repeat// Leucine Rich Repeat TRACH20005020//Ank repeat// MutT-like domain TRACH20007020//TRICHOHYALIN. TRACH20048450//PROTEIN K4 (PROTEIN K3). TRACH20068700//Homo sapiens adaptor protein CIKS mRNA, complete cds. TRACH20076760//Keratin, high sulfur B2 protein TRACH20135520//TBC domain// Rhodanese-like domain TRACH20141240//Mus musculus G21 protein mRNA, complete cds. TRACH20183170//Rattus norvegicus Sprague-Dawley SM-20 mRNA, complete cds. UTERU20000740//Human fusion protein mRNA, complete cds. UTERU20004240//CGI-96 protein UTERU20006960//endoplasmic reticulum resident protein 58 UTERU20022940//Human (p23) mRNA, complete cds. UTERU20046640//Mus musculus ldlBp (LDLB) mRNA, complete cds. UTERU20065930//GTP-RHO BINDING PROTEIN 1 (RHOPHILIN). UTERU20115740//Human PMS2 related (hPMSR3) gene, complete cds. UTERU20179880//TPR Domain// TPR Domain// TPR Domain// TPR Domain

[0122] Further, the reason is that a polypeptide does not always belong solely to a single category of the above-described functional categories, and therefore, a polypeptide may belong to any of the predicted functional categories. Besides, additional functions can be found for the clones classified into these functional categories by further analyses.

[0123] Since the polypeptide encoded by clones of the invention contains full-length amino acid sequence, it is possible to analyze its biological activity, and its effect on cellular conditions such as cell proliferation and differentiation by expressing the polypeptide as a recombinant polypeptide using an appropriate expression system, injecting the recombinant into the cell, or raising a specific antibody against the polypeptide.

[0124] The biological activities of respective polypeptides can be analyzed by the methods as shown below. Secretory protein, transmembrane protein:

[0125] “Ion Channels” (Ed., R. H. Ashley, 1995) of “The Practical Approach Series” (IRL PRESS),

[0126] “Growth Factors” (Eds., I. McKay, I. Leigh, 1993),

[0127] “Extracellular Matrix” (Eds., M. A. Haralson, J. R. Hassell, 1995);

[0128] Glycoprotein-Related Protein:

[0129] “Glycobiology” (Eds., M. Fukuda, A. Kobata, 1993) of “The Practical Approach Series” (IRL PRESS),

[0130] “Glycoprotein Analysis in Biomedicine” (Ed., Elizabeth F.Hounsell, 1993) of “Method in Molecular Biology” (Humana Press) series;

[0131] Signal Transduction-Related Protein:

[0132] “Signal Transduction” (Ed., G. Milligan, 1992) of “The Practical Approach Series” (IRL PRESS),

[0133] “Protein Phosphorylation” (Ed., D. G. Hardie, 1993), or

[0134] “Signal Transduction Protocols” (Eds., David A. Kendall, Stephen J. Hill, 1995) of “Method in Molecular Biology” (Humana Press) series;

[0135] Transcription-Related Protein:

[0136] “Gene Transcription” (Eds., B. D. Hames, S. J. Higgins, 1993) of “The Practical Approach Series” (IRL PRESS),

[0137] “Transcription Factors” (Ed., D. S. Latchman, 1993);

[0138] Enzyme and/or Metabolism-Related Protein:

[0139] “Enzyme Assays” (Eds., ROBERT EISENTHAL and MICHAEL J. DANSON, 1992) of “The Practical Approach Series” (IRL PRESS);

[0140] Cell Division and/or Cell Proliferation-Related Protein:

[0141] “Cell Growth, Differentiation and Senescence” (Ed., GEORGE STUDZINSKI, 2000) of “The Practical Approach Series” (IRL PRESS);

[0142] Cytoskeleton-Related Protein:

[0143] “Cytoskeleton: Signalling and Cell Regulation” (Eds., KERMIT L. CARRAWAY and CAROLIE A. CAROTHERS CARRAWAY, 2000) of “The Practical Approach Series” (IRL PRESS),

[0144] “Cytoskeleton Methods and Protocols” (Ed., Gavin, Ray H., 2000) of “Method in Molecular Biology” (Humana Press) series;

[0145] Nuclear Protein and/or RNA Synthesis-Related Protein:

[0146] “Nuclear Receptors” (Ed., DIDIER PICARD, 1999) of “The Practical Approach Series” (IRL PRESS),

[0147] “RNA Processing” (Eds., STEPHEN J. HIGGINS and B. DAVID HAMES, 1994);

[0148] Protein Synthesis and/or Transport-Related Protein:

[0149] “Membrane Transport” (Ed., STEPHEN A. BALDWIN, 2000) of “The Practical Approach Series” (IRL PRESS),

[0150] “Protein Synthesis Methods and Protocols” (Eds., Martin, Robin, 1998) of “Method in Molecular Biology” (Humana Press) series;

[0151] Cellular Defense-Related Protein:

[0152] “DNA Repair Protocols” (Henderson, Daryl S., 1999) of “Method in Molecular Biology” (Humana Press) series,

[0153] “Chaperonin Protocols” (Eds., Schneider, Christine, 2000);

[0154] Development and/or Differentiation-Related Protein:

[0155] “Developmental Biology Protocols” (Eds., ROBERT EISENTHAL and MICHAEL J. DANSON, 1992) of “Method in Molecular Biology” (Humana Press) series;

[0156] DNA- and/or RNA-Binding Protein:

[0157] “DNA-Protein Interactions Principles and Protocols” (Eds., Kneale, G. Geoff, 1994) of “Method in Molecular Biology” (Humana Press) series,

[0158] “RNA-Protein Interaction Protocols” (Eds., Haynes, Susan R., 1999);

[0159] ATP- and/or GTP-Binding Protein:

[0160] “Signal Transduction Protocols” (Eds., David A. Kendall, Stephen J. Hill, 1995) of “Method in Molecular Biology” (Humana Press) series.

[0161] In the categorization, the clone predicted to belong to the category of secretory and/or membrane protein means a clone having hit data with some annotation, such as growth factor, cytokine, hormone, signal, transmembrane, membrane, extracellular matrix, receptor, G-protein coupled receptor, ionic channel, voltage-gated channel, calcium channel, cell adhesion, collagen, connective tissue, etc., suggesting that it was a secretory or membrane protein, or a clone in which the presence of nucleotide sequence encoding a signal sequence or transmembrane region was suggested by the results of PSORT and SOSUI analyses for deduced ORF.

[0162] The clone predicted to belong to the category of glycoprotein-related protein means a clone having hit data with some annotation, such as glycoprotein, suggesting that the clone encodes a glycoprotein-related protein.

[0163] The clone predicted to belong to the category of signal transduction-related protein means a clone having hit data with some annotation, such as serine/threonine-protein kinase, tyrosine-protein kinase, SH3 domain, SH2 domain, etc., suggesting that the clone encodes a signal transduction-related protein.

[0164] The clone predicted to belong to the category of transcription-related protein means a clone having hit data with some annotation, such as transcription regulation, zinc finger, homeobox, etc., suggesting that the clone encodes a transcription-related protein.

[0165] The clone predicted to belong to the category of disease-related protein means a clone having hit data with some annotation, such as disease mutation, syndrome, etc., suggesting that the clone encodes a disease-related protein, or a clone whose full-length nucleotide sequence has hit data for Swiss-Prot, GenBank, UniGene, or nr, where the hit data corresponds to genes or polypeptides which have been deposited in the Online Mendelian Inheritance in Man (OMIM) (http://www.ncbi.nlm.nih.gov/Omim/), which is the human gene and disease database described later.

[0166] The clone predicted to belong to the category of enzyme and/or metabolism-related protein means a clone having hit data with some annotation, such as metabolism, oxidoreductase, E. C. No. (Enzyme commission number), etc., suggesting that the clone encodes an enzyme and/or metabolism-related protein.

[0167] The clone predicted to belong to the category of cell division and/or cell proliferation-related protein means a clone having hit data with some annotation, such as cell division, cell cycle, mitosis, chromosomal protein, cell growth, apoptosis, etc., suggesting that the clone encodes a cell division and/or cell proliferation-related protein.

[0168] The clone predicted to belong to the category of cytoskeleton-related protein means a clone having hit data with some annotation, such as structural protein, cytoskeleton, actin-binding, microtubles, etc., suggesting that the clone encodes a cytoskeleton-related protein.

[0169] The clone predicted to belong to the category of nuclear protein and/or RNA synthesis-related protein means a clone having hit data with some annotation, such as nuclear protein, RNA splicing, RNA processing, RNA helicase, polyadenylation, etc., suggesting that the clone encodes a nuclear protein and/or RNA synthesis-related protein.

[0170] The clone predicted to belong to the category of protein synthesis and/or transport-related protein means a clone having hit data with some annotation, such as translation regulation, protein biosynthesis, amino-acid biosynthesis, ribosomal protein, protein transport, signal recognition particle, etc., suggesting that the clone encodes a protein synthesis and/or transport-related protein.

[0171] The clone predicted to belong to the category of cellular defense-related protein means a clone having hit data with some annotation, such as heat shock, DNA repair, DNA damage, etc., suggesting that the clone encodes a cellular defense-related protein.

[0172] The clone predicted to belong to the category of development and/or differentiation-related proteins means a clone having hit data with some annotation, such as developmental protein, etc., suggesting that the clone encodes a development and/or differentiation-related protein.

[0173] The clone predicted to belong to the category of DNA-and/or RNA-binding protein means a clone having hit data with some annotation, such as DNA-binding, RNA-binding, etc.

[0174] The clone predicted to belong to the category of ATP-and/or GTP-binding protein means a clone having hit data with some annotation, such as ATP-binding, GTP-binding, etc.

[0175] As to a protein involved in a disease, it is possible to perform a functional analysis as described above, but also possible to analyze correlation between the expression or the activity of the protein and a certain disease by using a specific antibody that is obtained by using expressed protein. Alternatively, it is possible to utilize the database OMIM, which is a database of human genes and diseases, to analyze the protein. Further, new information is constantly being deposited in the OMIM database. Therefore, it is possible for one skilled in the art to find a new relationship between a particular disease and a gene of the present invention in the most up-to-date database. The proteins involved in diseases are useful for developing a diagnostic marker or medicines for regulation of their expression and activity, or as a target of gene therapy.

[0176] Also, as for a secretory protein, membrane protein, signal transduction-related protein, glycoprotein-related protein, or transcription-related protein, etc., search of the OMIM with the following keywords resulted in the finding that the proteins are involved in many diseases (the result of the OMIM search for secrete and membrane proteins is shown below). Also, association between proteins related to signal transduction or transcription and diseases is reported in “Transcription Factor Research-1999” (Fujii, Tamura, Morohashi, Kageyama, and Satake edit, (1999) Jikken-Igaku Zoukan, Vol.17, No.3), and “Gene Medicine” (1999) Vol.3, No.2). When cancer is used as an example, as described in “Biology of Cancer” (S. Matsubara, 1992) of Life Science series (Shokabo), many proteins are involved in cancers, which include enzyme and/or metabolism-related proteins, cytoskeleton-related proteins, cell division and/or cell proliferation-related proteins as well as secretory proteins, membrane proteins, signal transduction-related proteins,- glycoprotein-related proteins, transcription-related proteins. As clearly seen by the above example, it is evident that not only disease-related proteins, but also secretory proteins, membrane proteins, signal transduction-related proteins, glycoprotein-related proteins, transcription-related proteins, etc. are often involved in diseases, and thus they can be useful targets in the field of medical industry.

[0177] The result of the OMIM search for secretory and membrane proteins is shown below, in which the keywords,

[0178] (1) secretion protein,

[0179] (2) membrane protein,

[0180] (3) channel, and

[0181] (4) extracellular matrix were used.

[0182] Shown in the search result are only the accession numbers in the OMIM. Using the number, data showing the relationship between a disease and a gene or protein can be seen. The OMIM data has been renewed everyday.

[0183] 1) Secretion protein 354 entries found, searching for “secretion protein”*604667, *104760, *176860, *151675, *139320, *107400, *604029, *118910, #200100, *176880, *603850, *147572, *604028, *179513, *125950, *139250, *246700, *600946, *600560, *602926, 185860, *605083, *603215, *602421, *157147, *179512, *600174, *109270, *604710, *138120, *179510, *600998, *179509, *170280, *179511, *600626, *603831, *601489, *154545, *179490, *603826, *122559, *603216, *102720, *147290, *164160, *603062, *112262, *602672, *605435, *605322, *131230, *601652, *603166, *601746, *601591, *179508, #160900, *104311, *600759, *147545, *167805, #104300, *167770, #219700, *168470, *601684, *602049, *601146, *605227, *602434, *602534, *114840, *603489, *604323, *107470, *600753, *600768, *118825, *600564, *604252, *173120, *134370, *192340, *308230, *600322, *605359, *600046, *300090, 106160, *600041, #262500, *605563, *150390, *158106, *182590, #103580, *104610, #173900, *134797, *143890, #145980, *306900, *308700, *176300, *227500, *137350, #154700, *138079, *600760, *107730, *142410, *147670, *124092, *590050, *152760, *600509, *605646, *201910, *227600, *152790, *300200, *300300, 300800, *138160, *107741, *120150, *601199, *120180, *120160, *176730, *133170, *122560, *107300; *137241, *120140, *101000, *193400, *217000, *272800, *600937, #201710, *600377, #174800, *106100, #274600, *173350, #177170, *147620, *214500, *131244, *202110, *120120, *601007, *191160, *147470, *603372, *600733, *252800, *190160, *138040, *158070, *162151, #125700, #130070, *113811, *603355, *171060, *136435, #184700, *603732, *190180, *164008, *186590, *120220, *604312, *152200, *138130, *605085, *605353, *600840, #166210, *188545, *207750, *173360, *601933, #194050, *153450, *138850, *253200, *307030, *157145, *600514, *600262, *264080, *147380, *600281, #204000, #227810, *232200, *188826, *232800, *161561, #166200, *188400, *153620, *182099, *218040, #265800, *172400, #177200, *176805, #211600, #214700, #176410, *152780, *600633, *601771, *301500, *605402, *601922, *307800, *147892, *147720, *312060, #520000, *147660, *106150, *602358, *107270, *601769, *147440, *604558, *131530, *600270, *601610, *603692, *603401, *600423, *601604, *603345, #125853, *602843, *142640, *603044, *605740, *134830, *602779, *130660, *139191, *137035, *600761, *601340, *600823, *107740, *130160, *600877, *605110, *600945, *130080, *600957, #130050, *605580, *118444, *601124, *124020, 122470, *120700, *603201, *137216, *601185,- *138945, *218030, *600839, #240600, #262400, #162300, *162330, *188450, #265850, *263200, *162641, *300159, *601038, #191390, *201810, *601398, *602384, *131240, *602423, *139392, *142703, *602663, *232700, *602682, #602722, *602730, *600734, *188540, *182452, *601538, *603061, *146880, *603140, *603160, *142704, #252650, *182280, *125255, *603252, #131750, *182139, *182100, #259420, #261100, *603493, *601745, *182098, *603795, *123812, *600264, *147940, *180246, *180245, *118888, #604284, *168450, *118455, *604398, *604433, *601919, *118445, *600031, *604961, *605032, *605033, *171050, #171300, *131243, *109160, *605254, 274900, #171400, *600042, *151670, *184600, *605470, *605546, *176760, *602008, *102200, *605720, *600732, *605901

[0184] 2) Membrane protein 1489 entries found, searching for “membrane protein”*130500, *605704, *305360, *153330, *173610, *109270, *170995, *170993, *104776, *602333, *309060, *605703, *120920, *605943, *602690, *159430, *600897, *133090, *601178, *602413, *602003, *604405, *605940, *603237, *109280, *600378, *602173, *107776, *602334, *602335, *125305, *601134, *309845, *605731, *154045, *603241, *603718, *600594, *603214, *185881, *603657, *600182, *603177, *605331, *601476, *605456, *601114, *605190, *600723, *603904, *136950, *300222, *602879, *185880, *605348, *300096, *602257, *177070, *310200, *603062, *603344, *600039, *602977, *300100, *128240, *600959, *600322, *227400, *186945, *600946, *602534, *602048, *182900, *601097, *600267, *602625, *136430, *602421, *601047, *107450, *143450, *603141, *184756, *164730, *159440, *154050, *600579, *312080, *604202, *603700, *600447, *256540, *604691, *158343, *600403, *602414, *137290, *176640, *176981, *600179, *600754, *604456, *604693, *605875, *604605, *188860, *300172, *602910, *604323, *219800, *601848, *603179, *600279, *602251, #222700, *603831, *605072, *605377, *601028, *604155, *108733, *104225, *601896, *601510, *173335, *107770, *601767, *600046, *603850, *600040, *603784, *603234, 188560, *605863, *121015, *605862, *605861, *186946, *604252, *603215, *142461, *604597, *603143, *605264, *603735, *176860, *605536, *176801, *180721, *603355, *104760, *131560, *310300, *602631, *304700, #309400, *603142, *143890, *605431, *600753, *115501, *176790, *600266, *601691, *168468, *601239, *602216, #104300, *605613, *601595, *605550, *125950, *605475, *602217, *602261, *603534, *602262, *604631, *190315, *601313, *604306, *1.04311, *604672, *605000, *602461, *605548, *602296, *604376, *121014, *121011, *600691, *604262, *139310, *304040, *605445, *179514, *179512, *151460, #160900, *120130, *128239, *601158, *601403, *176943, *601014, 300800, *300294, *601757, *185470, *273800, *605034, *602887, #185000, *604871, *603593, *603583, *605454, *104775, *605872, *141180, *602713, *603531, *139150, *601531, *601832, *605452, *134651, *604156, *120620, *605883, *604142, *166945, *605324, *600816, *604699, *300112, *605182, *600164, *182180, *605071, *300023, *605057, *308240, *300249, *176947, *176894, *605081, *605035, *602044, *182860, *107271, *305100, *153390, *113730, *602689, *180069, *603518, *300017, *191275, *177061, *601693, *601789, *604241, *600934, *138160, *604424, *603868, *600174, *600718, *600523, *604141, *601009, *605251, *600481, *600874, *155550, *605227, *601017, *162230, 601138, *604157, *601212, *600763, *604110, *604158, *601107, *601326, 600621, *600587, 601137, *600917, *600855, *605058, *194355, *605194, *603291, *102720, *136425, *170715, *603216, *605547, *135630, *602926, *600168, *605002, *602474, *600157, *603025, *603893, *231200, *120090, *601966, *131230, *604722, *604721, *604515, *246700, *602101, *605628, *303630, *605787, *602857, *602285, *605708, *602488, *605025, *603817, *300051, *603293, *176878, *603646, 605707, 185860, *112205, *300187, *602654, *120070, *603648, *604850, *602655, *602514, *300118, *182309, *179590, *602701, *600759, *204200, *604170, *175100, #103580, *147670, *306400, *143100, *182870, *25722.0, *180380, #116920, *301000, *193300, *157147, *131550, *139200, *139130, *190195, *605406, *155760, *155960, *605734, *155970, *605385, *111700, *155975, *150370, 605709, *151430, *605438, *151510, *116952, *157655, *158105, *605777, *176877, *153619, *120131, *185430, *109190, *120190, *109170, *605093, *605250, *153432, *107777, *186590, *160993, *605699, *605698, *605813, *605697, *605616, *605300, *162060, *605219, *163970, *135620, *165040, *605478, *604964, *103195, *604932, *604923, *605906, *605496, *605914, *166490, 138277, *604915, *114070, *605213, *605933, *180297, *101000, *191163, *191164, *605101, *603167, *600772, *603164, *600708, *604001, *191328, *313440, *602672, *604009, *604299, *192974, *604256, *603048, *600515, *604221, *602632, *604196, *601179, 603290, *604661, *601023, *601110, *304800, *203200, *300212, *602933, *603352, *208900, *604418, *604838, *600551, #212140, *604837, *602049, *600552, *600553, *300213, *602574, *600583, *600932, *603452, *604775, *516020, *604617, *604464, *603498, *300145, *601523, *602694, *600632, *604762, *604492, *400015, *604504, *601717, *601728, *300242, *602426, *604194, *603821, *604730, *600695, *603823, *603869, *300241, *600707, *603822, *602370, *602202, *604193, *601181, *604089, *602507, *604195, *602306, *300284, *601805, *601895, *601275, *604660, *600752, *603820, *604192, *602207, *308230, *600894, *312600, *603199, *604029, *602500, *102680, *235200, #256300, *601633, #219700, 262890, *156225, *173470, *193400, *173910, *600354, *113705, *600065, *107741, *107400, *600024, *131195, *113811, #118220, *601638, *300011, *276903, *604144, *311770, *601758, #173900, *604592, *120120, *179605, *603130, *603372, *110750, *222900, *602509, *256100, *602469, *602281, *229300, *224100, *110900, *190180, *261600, *602997, *603616, *603189, 601791, *601567, *312700, *171060, *308700, *604027, *162643, *516000, *176261, *604028, *314850, #145980, *601383, *600930, *305900, *601253, *136350, *605537, *138140, *604033, *605Q70, *139250, *300500, *603967, *300041, *603866, #130600, *120150, *601050, *604942, *605204, *605248, *272750, *600163, *604235, *600682, *107266, *306900, *191092, #262500, *600106, *1-52790, *186720, *227650, *153700, *308380, *103390, *605646, *164920, *604478, #252650, *173850, *173350, *602505, *246530, *194380, *602575, *603030, #209920, *212138, #214100, *605767, *600582, *189980, #176200, *604653, *604678, *256550, *300037, *253700, #253300, #226700, *604766, #244400, *190000, *188040, *604824, *214500, #237500, *232300, *605014, *604477, *190930, *605124, *604475, *604594, #227810, *306700, #301050, *600135, *600143, *605145, #269920, *300104, *277900, *300135, *300231, *192500, *182138, *191190, *176805, *600185, *186591, *604889, *603051, *165360, *147545, *601040, #156575, *107269, *603009, *602934, *123825, *601081, *602924, *163890, *600381, *602909, *150330, *109690, *123900, *603434, *603491, *110700, *602581, *125647, #154700, *114760, *141900, *603690, *120220, *601199, #145500, *601309, *602382, *120325, *600877, *604205, *604090, *601497, *602377, *605464, *138720, *603728, *120950, *604026, *600580, *601610, *137167, *603960, *603931, *601880, *603126, *138190, *130130, *601997, *601975, *600395, *516040, *600418, *600650, *605245, *605172, *600509, *164761, *310400, *600308, *605109, *600544, *600359, *600103, *605267, *312610, *176100, *308100, *158070, *605123, *173325, #312750, *600839, *158120, #604369, *604465, *173510, #161200, *151525, *605369, *604237, *516050, #600886, *604517, *165180, *605381, *605399, *307800, *604365, *155740, *147795, 601709, *604673, *147730, *602122, *147557, *193245, *600978, *604990, *603261, *603274, *601007, *131100, *602941, *107941, *146710, *276901, *131244, *602872, *603411, *186357, *176290, *601066, *185050, *232200, *143030, *601843, #236700, *604122, *142800, *134638, *604985, *182380, *603930, *142410, *137060, *604586, *601193, *120650, *252500, *253800, *120930, *604858, *605874, 601274, *602158, *605873, *193210, *203100, *601295, *604095, #201710, *126150, *108740, #205400, *601373, *300167, *109545, *602894, *603361, #300257, *266200, *603401, *131390, *180470, *605908, *604798, #221770, *223360, *180901, *605641, *605745, *604018, *300200, *604603, *230800, *602676, #604004, *605692, *602640, *601599, *134637, *245900, *118425, 601614, *605725, *120110, *300189, *300035, *603102, *250800, *602282, *602458, *123610, *603754, *300278, *601463, *300224, *601581, *182160, *601653, *139191, *601733, *600748, *142460, *601194, *152390, *153620, *601615, *601814, *601617, *601613, *300191, #308300, *600798, 601858, *601872, *601597, #601588, *600821, *147840, *152427, *138850, *600823, *601492, *300256, *600840, *300267, *601411, *139080, *139090, 600851, *300334, *179080, *602095, *601284, *601282, #177200, *601681, *601252, *176000, *602184, *602188, #266510, #154020, *186711, *257200, *601711, *600667, *602241, *186745, *255125, *300126, *600644, *123890, #255120, #175200, *600004, *302060, *123580, *186760, *122561, *602316, *600017, *120940, 140300, *151690, *120700, *602354, *600019, *600857, *182175, *600536, *158380, *600516, *120290, *600493, *182310, #252010, *182530, *186830, *601839, *142790, *159465, *118990, *250790, *248600, #248250, *186845, *601153, *142600, *116930, *114860, *171834, #303600, *186880, *600444, *142871, *601852, *602602, *602607, *114207, *186910, #232220, 600880, *134635, *112203, #112100, *111680, *231680, *311030, *111250, *111200, *134390, #226670, #145600, *226200, *602714, *171760, *133550, *602727, *161555, *602744, *602746, #131705, *602835, *600423, *176267, *602859, #600918, 277175, *602874, *601020, *109770, *600170, *217070, *173515, *602893, *147280, *154360, *171050, *108780, *176257, *600979, *600377, *108360, *204500, *170260, *146880, *154582, *601011, *600997, *602992, *201475, *603005, *190198, *147360, #270400, *600238, #164970, *306250, #126600, *193065, #181350, *106180, *602136, *600937, *603086, *603087, *307030, *182099, *103320, *601683, #192430, *103180, *102681, *192321, *600244, *191740, *191315, *603152, *102642, *191305, #266140, *100500, *600867, *604585, *604404, *604345, *603201, *605430, *603207, *603208, *605433, *604101, *603969, *605896, *604616, *605851, *605768, *604576, *605754, *605730, *605477, *603263, *605538, *603283, *604402, *605453, *605427, *603302, *605458, 603313, *604415, *603345, *605541, *603353, *605295, *603879, *605268, *605266, *605246, *603377, *603380, *605181, *604203, *603425, *603867, *605106, *605017, *603842, *604936, *603510, *604857, *605932, *605816, *603765, *603551, *605357, *605237, *604204, *603594, *605110, *604190, *603861, *604962, *603639, *603644, *605007, *605349, *604943, *604918, *604907, *603667, *603681, *605396, *605561, *603712, *603713, *605688, *605942, *604878, *604843, *604659, *604671, *603798, *604682, *604056, *604705, *603749, 602586, *603647, *602515, #602475, *603717, *602359, *602372, *602380, *602518, *603652, *602573, *603626, 602587, *603598, *602871, *603613, *603750, *603875, *602608, *602666, *602345, *602935, *603564, *603548, *603927, 601876, *602343, *603943, *603787, *601730, *601611, *602679, *603788, *602243, 603790, *601535, *603796, *601488, *601485, *602314, *601478, *604047, *604048, *602297, *604057, *602715, *602192, *601459, *601416, *603833, *602190, *604102, *602106, *604111, *602724, *603499, *602736, *601123, *601002, *600923, *601987, *604149, *601929, *600910, *600900, *600864, *604165, *600782, *602836, *600769, *600742, *602783, *601905, *600535, *604198, *601901, *600534, *602876, *603356, *600530, *604216, *604217, *602890, *602905, *600465, *600464, *600446, *602891, *603366, *601894, *604272, *603926, *603312, *600368, *602914, *600327, *603151, *603202, 602911, *602974, *603006, *601883, *603008, *600074, *603007, *603046, #603903, *604433, *600016, *603925, *516005, *516004, *516003, *601756, *604487, *516001, *313475, *313470, #307810, *604527, *604528, *601745, *604551, *604555, *603243, *603242, *603061, *603063, *603217, *300335, *300283, *300281, *604600, *300197, *603097, *603220, *601625, *604623, *603118, *601590, *604646, *300008, *601568, *300007, *275630, *601533, #275200, *270200, #261550, *604031, *604683, #254800, *251100, #242300, *604058, *604720, *240500, *233690, #232240, #226730, *223100, *222100, #220100, *216950, *604832, 212750, 212067, *604066, *193067, 601315, *193001, *604862, *604870, *191306, *600385, *604879, *191191, *601296, *604914, *190181, *604119, #188550, *604925, *188410, #601287, *604939, *188380, *604126, *604945, *604148, *188060, *604982, *186854, *604988, *186360, *186355, *185250, *600916, *605008, *605009, 185020, *600734, *605024, *182331, *605032, *605033, *182305, *180903, #179800, *179610, *605060, *179410, *178990, *176802, *605080, *176266, *176263, *176260, *600732, *173490, *604199, *173445, *173391, 172290, *605147, *605149, *171890, *600528, *171833, *605185, #170500, *605193, #168000, *605196, *167055, *605205, *605208, 166900, *605216, *162651, *162010, *600504, #161400, *604253, #160800, *159460, *154540, *605254, *605261, *153634, *600429, *153337, *600424, *605292, #604286, #152700, 152423, *152310, *151625, *600153, *604313, *151523, *150325, *150320, *150292, *603150, *150290, *150210, *605410, *605415, *605416, *605417, *605421, *603149, *604349, *147940, *600282, *147880, *146928, *146661, *600150, *146630, *142622, *600018, *605461, *138981, *138590, *600023, *138330, *605495, *138297, *605512, *138230, #136900, #301310, *516006, *605545, *605546, *136131, *134660, *134350, *516002, *605589, *131235, #130050, *605625, *126455, *126064, #125310, *605670, *604534, *125240, *123836, *123830, *123620, *605702, #122200, *120980, *120360, *118510, *114835, *605710, *605716, *605722, *114217, *604561, *113810, *111740, #110800, *605748, *605752, *604564, *110600, *603160, *109610, *605784, #107480, *107273, *603192, *300169, *106195, *105210, *104615, *104614, *104210, *103850, 103581, *605876, *605877, *605879, *103220, *605887, *300150, *102910, *102670, *102576, *605916, *604629, *102575, *102573, *300132, *101800, *605947

[0185] 3) Channel (member of membrane protein) 361 entries found, searching for “channel”*176266, *600724, *182390, *123825, *114208, *114206, *176267, *114205, *601784, *600937, *114204, *603415, *600053, *114207, *114209, *605427, *604527, *604528, *600760, *601011, *192500, *118425, *600228, *176261, *602235, *600761, *600359, *300008, *182389, *600877, *602232, *176263, *182391, *601328, *600054, *603939, *602208, *601534, *600504, *602323, *603208, *601958, *603537, *601012, *601327, *600734, *602780, *602781, *604433, *603220, *182392, *605874, *605873, *601745, *603888, *603219, *602604, *603796, *302910, *602866, *601013, *602905, *602906, *603967, *600163, #170500, *152427, *180901, *176260, #601462, *603951, *601141, *604492, *600702, *602023, *600308, *602754, *107776, *176257, *602024, *601949, *605222, *601142, *602983, *193245, *600681, *176265, *600235, *176262, *176258, *605206, *604427, *605411, *603305, *601219, *600150, *604065, *602343, *605223, *605720, *603906, *138249, *138253, *600843, *604385, *600003, *600935, *603940, *602727, *602158, 602911, *600397, *602726, *600845, *605080, *600580, *602872, *602106, *176264, *603953, *605722, *300110, *138252, *604111, *602717, *602420, *600570, 600844, *603493, *600932, *605716, *138254, *603652, *300138, *605410, *176268, *605214, *605696, *300334, *604660, *176256, *605879, *603749, *603583, *602345, *604661, *603787, 603313, *602982, *604337, *600846, *604662, *300328, *300281, *602566, *602836, *604003, *603788, *603651, *602421, *107777, #177200, *100725, #219700, *100690, *100710, #160800, #603830, #183086, *600509;- #220400, #601144, *173910, *180902, *605692, #264350, #160900, #145600, #255700, *602076, *603061, *601313, *154275, #604233, *604532, #108500, #121201, #170400, *300225, *121014, *139311, #125800, #160120, *118503, 601439, #141500, #168300, *304040, #601887, #256450, *186945, *154276, #300009, #216900, *600040, *601014, *601042, *602512, *601383, *605445, *602368, *603831, #117000, *601218, *108745, *605248, #177735, #173900, *601212, *182139, *601059, *600039, *601485, *180903, *186360, *603319, #600101, *118509, *600109, #121200, *600170, *604187, *176975,- *137163, #310468, #263800, #262300, *603750, *600229, *124030, *602251, #603829, *137143, #145500, *600669, *147450, *154050, *603353, *600516, *601157, *600855, *601154, *602522, *249210, *600968, #252650, *171060, *600919, *156490, #259700, #601678, *601764, #310500, *131244, *300041, *121011, *125950, *114180, *602974, *600637, *113730, *118504, *605145, *604669, *118800, *121013, *121015, *138491, *600421, *104610, *604045, *604594, *131230, *605487, *138247, *600467, #602485, *602481, *138251, *137192, *602403, 600851, *277900, *603785, *603152, *603199, *603475, #168600, #272120, *170280, *603852, #241200, *603053, *600465, #603034, *142461, *164920, *137164, *600884, *600442, *123885, *604001, *600232, *232200, *171050, *602103, *602014, *300211, *600983, *602887, *604415, *604418, *300242, #300071, *604471, *600837, 168350, *118511, 193007, *600300, *604654, #601820, *180297, *600046, *603853, *604678, *604693, #604772, *118508, *603855, *605204, #254210, *182099, *182307, #130600, *601109, *114080, *300103, *182860, *605438, *601129, *603964, *600019, *516060, #185000, *138079, *104210, *605818, *603418, *305990, *305450

[0186] 4) Extracellular matrix 218 entries found, searching for “extracellular matrix”*605912, *603479, *602201, *604633, *601418, *601548, *115437, *154870, *600754, *602261, *602285, *602262, *134797, *120361, *604629, *604871, *603321, *603320, *⁶01807, #154700, *116935, *185261, *120360, *185250, *605470, *603767, *253700, *190180, *128239, *308700, *276901, *193300, *120324, *188826, *602109, *155760, *600514, *600261, #177170, *600536, *147557, #116920, *150240, *601313, *120140, 601614, *605158, *120150, *120180, #200610, *605127, *193400, *192240, #173900, *152200, #136900,, *135821, #130070, *120320, *120220, *112260, *310200, *600900, *600262, *605670, *600985, *179590, #245150, *602574, *601463, 183850, *601211, *604241, *600758, *186745, *604710, *602369, *602090, *190182, *192975, *602178, *230740, *600065, *601652, *158106, *190181, *156790, #158810, *193210, *155120, *192977, *193065, #226700, *187380, *231050, *182120, *188060, *186355, 163200, *164010, #156550, *151510, *150370, *253800, *156225, *150325, #194050, *150290, *216550, *147620, *600215, *222600, *147559, *165380, *182888, *600491, *146650, *146640, *600564, *600596, *600616, *600700, *600742, *138297, *182889, *154705, *600930, *301870, *153619, *601050, *601090, *601105, *165070, *305370,, *135820, *130660, *310300, *601492, *128240, *601587, #126600, *601636, *600119, *601692, *601728, *125485, 601858, *601915, *602048, *175100, *602108, *121010, *600245, *120470, *120328, *120325, *602264, *120280, *602366, *600309, *602402, *602415, *602428, *602453, *602505, #166210, *602600, *602941, *603005, *603196, 603209, *603221, *603234, *603319, *120250, *120210, *120120, *603489, *603551, *118938, *603799, *603842, *603924, *603963, *604042, *604063, *604149, *604160, *601028, *604467, *604510, *604592, *116930, *116806, *601284, *604724, *604806, *604807, *604808, *107269, *605007, *605008, *605009, *600214, *600076, *605174, *605175, *605292, *605343, *605351, #600204, *605497, *605546, *605587, *605623, *600211, *605702, *103320

[0187] In addition to these, the various keywords shown in the above-mentioned categorization or others can be used for the OMIM search and the result may suggest the involvement thereof in diseases.

[0188] Further, the use of nucleotide sequences of cDNAs of the present invention enables analyzing the expression frequency of genes corresponding to the cDNAs. In addition, functions of the genes can be predicted based on the information obtained by the expression frequency analysis.

[0189] There are several methods for analyzing the expression levels of genes involved in diseases. Differences in gene expression levels between diseased and normal tissues are studied by the analytical methods using, for example, Northern hybridization, RT-PCR, DNA microarray, etc. (Experimental Medicine, Vol.17, No. 8, 980-1056 (1999); Cell Engineering (additional volume) DNA Microarray and Advanced PCR Methods, Muramatsu & Nawa (eds.), Shujunsya (2000)). By computer analysis, in addition to these analysis methods, the nucleotide sequences of expressed genes can be compared to analyze the expression frequency. For example, there is a database called “BODYMAP”; gene clones are extracted at random from cDNA libraries of various tissues and/or cells, and the clones homologous to one another are assigned to a single cluster based on the information of nucleotide sequence homology at the 3′-end; genes are classified into any clusters, and the numbers of clones in the respective clusters are compared to gain the information on expression frequency (http://bodymap.ims.u-tokyo.ac.jp/).

[0190] When explicit difference in the expression levels between diseased tissues and normal tissues is observed for a gene by these analytical methods, it can be conclude that the gene is closely involved in a disease or disorder. Instead of diseased tissues, when gene expression is explicitly different between normal cells and cells reproducing disease-associated specific features, it can be concluded that the gene is closely involved in a disease or disorder.

[0191] From the 2443 clones whose full-length nucleotide sequences had been revealed, genes involved in particular pathology or functions were selected by the use of databases shown below (see Example 7; “Expression frequency analysis in silico”). The database used in the analyses of the present invention contains nucleotide sequences of 1,402,070 clones, and the population of the database is large enough for the analysis. The sequence information in the database was obtained by selecting cDNA clones at random from cDNA libraries derived from the various tissues and cells shown in Example 1 and determining the 5′-end sequences thereof.

[0192] Then, the nucleotide sequences of respective clones in this database were categorized (clustered) based on the nucleotide sequence homology determined with a search program; the number of clones belonging to every cluster of each library was determined and normalized; thus, the ratio of a certain gene in a cDNA library was determined. This analysis provided the information of the expression frequency of a gene in a tissue or cell that is the source of the cDNA library.

[0193] Then, in order to analyze the expression of genes corresponding to the nucleotide sequences of cDNAs of the present invention in tissues and cells, the libraries from the tissues or cells, which had been used in the large-scale cDNA analyses, were taken as subjects to compare the expression levels between different tissues or cells. Namely, the expression frequency was analyzed by comparing the previously normalized values between tissues or cells from which 600 or more cDNA clones whose nucleotide sequences had been analyzed were derived. The result of this analysis showed that the cDNA clones corresponded to the genes involved in the pathology and functions, which are indicated below. Each value in Tables 3 to 51 indicated below represents a relative expression frequency; the higher the value, the higher the expression level. osteoporosis-related genes

[0194] Osteoporosis is a pathology in which bones are easily broken owing to overall decrease in components of bone. The onset correlates to the balance between the functions of osteoblast producing bone and osteoclast absorbing bone, namely bone metabolism. Thus, the genes involved in the increase of osteoclasts differentiating from precursor cells of monocyte/macrophage line (Molecular Medicine 38. 642-648. (2001)) are genes involved in osteoporosis relevant to bone metabolism.

[0195] A nucleotide sequence information-based analysis was carried out to identify the genes whose expression frequencies are higher or lower in CD34+ cell (cell expressing a glycoprotein CD34) treated with the osteoclast differentiation factor (Molecular Medicine 38. 642-648. (2001)) than in the untreated CD34+ cell, which is the precursor cell of monocyte/macrophage line. The result of comparative analysis for the frequency between the cDNA libraries prepared from the RNA of CD34+ cells (CD34C) and from the RNA of CD34+ cells treated with the osteoclast differentiation factor (D30ST, D60ST or D90ST) showed that the genes whose expression levels were different between the two were 56 clones indicated in Table 3. These clones are involved in osteoporosis.

[0196] Genes involved in Neural Cell Differentiation

[0197] Genes involved in neural cell differentiation are useful for treating neurological diseases. Genes with varying expression levels in response to induction of cellular differentiation in neural cells are thought to be involved in neurological diseases.

[0198] A survey was performed for genes whose expression levels are varied in response to induction of differentiation (stimulation by retinoic acid (RA) or growth inhibitor treatment after RA stimulation) in cultured cells of a neural strain, NT2. The result of comparative analysis of cDNA libraries derived from undifferentiated NT2 cells (NT2RM) and the cells subjected to the differentiation treatment (NT2RP, NT2RI or NT2NE) showed that the genes whose expression levels were different between the two were 288 clones indicated in Table 4. These genes are neurological disease-related genes.

[0199] Cancer-Related Genes

[0200] It has been assumed that, distinct from normal tissues, cancer tissues express a distinct set of genes, and thus the expression thereof can contribute to the carcinogenesis in tissues and cells. Thus, genes whose expression patterns in cancer tissues are different from those in normal tissues are cancer-related genes. Search was carried out for the genes whose expression levels in cancer tissues were different from those in normal tissues.

[0201] The result of comparative analysis of cDNA libraries derived from breast tumor (TBAES) and normal breast (BEAST) showed that the genes whose expression levels were different between the two were 35 clones indicated in Table 5.

[0202] The result of comparative analysis of cDNA libraries derived cervical tumor (TCERX) and normal cervical duct (CERVX) showed that the genes whose expression levels were different between the two were 11 clones indicated in Table 6.

[0203] The result of comparative analysis of cDNA libraries derived from colon tumor (TCOLN) and normal colon (COLON) showed that the genes whose expression levels were different between the two were 25 clones indicated in Table 7.

[0204] The result of comparative analysis of cDNA libraries derived from esophageal tumor (TESOP) and normal esophagus (NESOP) showed that the genes whose expression levels were different between the two were 41 clones indicated in Table 8.

[0205] The result of comparative analysis of cDNA libraries derived from kidney tumor (TKIDN) and normal kidney (KIDNE) showed that the genes whose expression levels were different between the two were 175 clones indicated in Table 9.

[0206] The result of comparative analysis of cDNA libraries derived from liver tumor (TLIVE) and normal liver (LIVER) showed that the genes whose expression levels were different between the two were 47 clones indicated in Table 10.

[0207] The result of comparative analysis of cDNA libraries derived from lung tumor (TLUNG) and normal lung (HLUNG) showed that the genes whose expression levels were different between the two were 62 clones indicated in Table 11.

[0208] The result of comparative analysis of cDNA libraries derived from ovary tumor (TOVER) and normal ovary (NOVER) showed the genes whose expression levels were different between the two were 23 clones indicated in Table 12.

[0209] The result of comparative analysis of cDNA libraries derived from stomach tumor (TSTOM) and normal stomach (STOMA) showed that the genes whose expression levels were different between the two were 70 clones indicated in Table 13.

[0210] The result of comparative analysis of cDNA libraries derived from uterine tumor (TUTER) and normal uterus (UTERU) showed that the genes whose expression levels were different between the two were 236 clones indicated in Table 14.

[0211] The result of comparative analysis of cDNA libraries derived from tongue cancer (CTONG) and normal tongue (NTONG) showed that the genes whose expression levels were different between the two were 232 clones indicated in Table 15.

[0212] These genes are involved in cancers.

[0213] Further, there is a method to search for genes involved in development and differentiation, which is the expression frequency analysis in which the expression levels of genes are compared between developing and/or differentiating tissues and/or cells and adult tissues and/or cells. The genes involved in tissue development and/or differentiation are genes participating in tissue construction and expression of function, and thus are useful genes, which are available for regenerative medicine aiming at convenient regeneration of injured tissues.

[0214] By using the information of gene expression frequency gained from the database of 5′-end nucleotide sequences described above, genes involved in development or differentiation of particular tissues were selected from the 2443 clones whose full-length nucleotide sequence had been revealed (see Example 7).

[0215] The result of comparative analysis of cDNA libraries derived from fetal brain (FCBBF, FEBRA or OCBBF) and adult brain (BRACE, BRALZ, BRAMY, BRAWH, BRCAN, BRCOC, BRHIP, BRSSN, BRSTN or BRTHA) showed that the genes whose expression levels were different between the two were 1195 clones indicated in Tables 16 to 48.

[0216] The result of comparative analysis of cDNA libraries derived from fetal heart (FEHRT) and adult heart (HEART) showed that the genes whose expression levels were different between the two were 45 clones indicated in Table 49.

[0217] The result of comparative analysis of cDNA libraries derived from fetal kidney (FEKID) and adult kidney (KIDNE) showed that the genes whose expression levels were different between the two were 118 clones indicated in Table 50.

[0218] The result of comparative analysis of cDNA libraries derived from fetal lung (FELNG) and adult lung (HLUNG) showed that the genes whose expression levels were different between the two were 63 clones indicated in Table 51. These genes are involved in regeneration of tissues and/or cells.

[0219] The expression frequency or the like can be analyzed by PCR based on the nucleotide sequences of cDNAs of the present invention. There are some known methods for comparing the quantities of amplification products obtained by PCR. For example, the band intensities can be determined by ethidium bromide staining. With RI-labeled or fluorescently labeled primers, the RI signal or fluorescence intensity can be assayed for the quantity of labeled amplification products. Alternatively, the quantity of amplification products can also be determined by measuring the RI signal or the fluorescence intensity from the RI-labeled or fluorescently labeled probe hybridizing to the products. The assay results thus obtained are compared and then the clones exhibiting differences in the expression levels can be selected.

[0220] There are some quantitative PCR methods: a PCR method using internal standards; a competitive PCR, in which the quantification is achieved by adding, to a sample, a dilution series of a known quantity of a template RNA and by comparing the quantity of an amplification product derived from the RNA of interest with the quantity of an amplification product derived from the template RNA. These methods overcome the problems of errors in the amount of amplification products among tubes and of the plateau effect. ATAC-PCR (Adaptor-tagged competitive PCR) is a method of competitive PCR which is practiced by using multiple adapters of different sizes attached- to a gene whose 3′-end nucleotide sequence has previously been determined. The ratio of expression frequency of a single mRNA species from a number of tissues (cells) can be assayed in a single step (Nucleic Acids Research 1997, 25(22): 4694-4696; “DNA Micro-array and Advanced PCR Techniques”, Cell Technology, supplement, Eds., Muramatsu and Nawa (Shujunsha, 2000): 104-112).

[0221] If it is observed, by using these analytical methods, that the expression levels of genes are evidently varied during major cellular events (such as differentiation and apoptosis), the genes are involved in the cellular events and accordingly are candidates for disease- and/or disorder-related genes. Further, genes exhibiting tissue-specific expression are genes playing important parts in the tissue functions and, therefore, can be candidates for genes involved in diseases and/or disorders affecting the tissues.

[0222] For example, inflammation is an important biological response that is known to be involved in various diseases. The representative inflammation-inducing factors include TNF-α (Tumor Necrosis Factor-alpha). There exists a signaling cascade activated by TNF-α stimulations, wherein NF-κB is a transducing molecule (Cell 1995, 80:529-532). It has also been revealed that many inflammation-related genes, including IL-2, IL-6 and G-CSF, are varied in the expression levels thereof in response to the signal through the pathway (Trends Genet. 1999, 15(6): 229-235). It is assumed that genes whose expression levels are varied in response to the stimulation of TNF-α also participate in inflammation.

[0223] Further, the infection of Helicobacter pylori to the gastric epithelia is known to cause gastritis and gastroduodenal ulcer (Mebio 2000, July, 17(7): 16-33). Thus, the genes whose expression levels are altered depending on co-culturing cells with Helicobacter pylori may be involved in gastritis and gastroduodenal ulcer. A recent study has suggested that Helicobacter pylori strongly activates the NF-κB pathway(Gastroenterology 2000, 119: 97-108).

[0224] THP-1 cell, which is a human monocyte cell line, was cultured in the presence of TNF-α (Tumor Necrosis Factor-alpha) The genes whose expression levels were altered owing to the presence of TNF-α were searched for, and the result showed that the clones whose expression levels were increased owing to the presence of TNF-α were: ASTRO20152140, BRACE20057620, BRACE20060720, BRACE20090440, BRACE20152870, BRACE20229280, BRAMY20002770, BRAMY20266850, BRAMY20280720, BRAWH20106180, BRAWH20122770, BRHIP20096170, BRHIP20111200, BRHIP20186120, BRHIP20194940, BRHIP20207430, BRSSN20152380, CTONG20095270, CTONG20100240, CTONG20158150, CTONG20265130, D30ST200 06540, D90ST20031370, FCBBF20071860, FCBBF30251420, FCBBF30252520, FCBBF40001420, FEBRA20017050, FEBRA20082100, HCHON20011160, KIDNE20141190, KIDNE20163880, KIDNE20182690, LIVER10004790, LIVER20038540, LIVER20085800, MESAN20130220, MESAN20174170, NT2NE20158600, NT2RI20005750, NT2RP70110860, NT2RP70169110, NT2RP70175670, NT2RP70188710, PERIC20002140, PLACE60155130, PROST20120160, PROST20149250, PROST20161950, PUAEN20015260, SKNSH20080430, SMINT20051610, SMINT20060780, SMINT20161220, SMINT20163960, SPLEN20101190, SPLEN20157300, SPLEN20163560, SPLEN20214580, SPLEN20279950, STOMA20048520, TESTI20076850, TESTI20087620, TESTI20108720, TESTI20220100, TESTI20239510, TESTI20266740, TESTI20342430, TESTI20370020, TESTI20391210, TESTI20401020, TESTI20415640, THYMU20130890, THYMU20286290, TRACH20060150, TRACH20099340, UTERU20004240, UTERU20068990, UTERU20119060.

[0225] On the other hand, the clones whose expression levels were decreased owing to the presence of TNF-α were: ASTRO20032120, ASTRO20084250, ASTRO20181690, BRACE20062640, BRACE20067430, BRACE20235400, BRALZ20018340, BRALZ20069760, BRALZ20075450, BRAMY20163270, BRAMY20204450, BRAMY20218670, BRAMY20229800, BRAWH10000930, BRAWH20107540, BRAWH20132190, BRAWH20158530, BRCAN20273340, BRHIP20105710, BRHIP20186120, BRSSN20176820, CTONG20095290, DFNES20031920, FCBBF30033050, FCBBF30071520, FCBBF30083820, HCHON20008980, HCHON20022470, HHDPC20034390, KIDNE20028720, KIDNE20079440, KIDNE20127750, KIDNE20148900, LIVER20011130, MAMGL10000830, MESAN20127350, NT2NE20181650, NT2RI20023160, NT2RP70102350, NT2RP70157890, NTONG20029480, OCBBF20020830, OCBBF20041680, OCBBF20061720, OCBBF20127040, OCBBF20139260, OCBBF20178990, PEBLM20013120, PLACE60003480, PLACE60181070, PROST20151240, PUAEN20003740, PUAEN20011880, PUAEN20078980, PUAEN20085150, SKNSH20080430, SMINT20001760, SMINT20047810, SMINT20108530, SPLEN20158990, SPLEN20283650, STOMA20010250, STOMA20057820, TESTI20060400, TESTI20161970, TESTI20275620, TESTI20369690, TESTI20386230, TESTI20392250, TESTI20409440, TESTI20424730, THYMU20095960, THYMU20111180, THYMU20226600, THYMU20253250, THYMU20272490, TRACH20153810, UTERU20176130, UTERU20186740.

[0226] These clones are inflammation-related genes.

[0227] MKN45, which is a gastric cancer cell line, was co-cultured with Helicobacter pylori. The genes whose expression levels were altered owing to the presence of Helicobacter pylori were searched for, and the result showed that the clones whose expression levels were increased owing to the presence of Helicobacter pylori were: ADRGL20067670, BLADE20004630, BRACE20039040, BRACE20151320, BRACE20229280, BRACE20235400, BRALZ20058880, BRAMY20060920, BRAMY20184670, BRAMY20218670, BRAMY20229800, BRCAN20147880, BRHIP20196410, BRHIP30004880, BRSSN20187310, CD34C30004940, CTONG20265130, DFNES20031920, FCBBF30278630, FCBBF40001420, HHDPC20095280, KIDNE20130450, LIVER20011130, LIVER20038540, NT2NE20172590, NT2RP70169110, OCBBF20085200, OCBBF20180840, PEBLM10000240, PLACE60003480, PROST20120160, PROST20151240, PUAEN20011880, SKMUS20031680, SKNSH20080430, SMINT20056210, SMINT20105000, SPLEN20019450, SPLEN20211570, STOMA20048520, TESTI20004890, TESTI20083940, TESTI20168480, TESTI20239510, TESTI20308600, TESTI20478010, UTERU20126880.

[0228] On the other hand, the clones whose expression levels were decreased owing to the presence of Helicobacter pylori were: ASTRO20032120, BRACE20090440, BRACE20114780, BRALZ20064740, BRAMY20002770, BRAMY20210400, BRAMY20215230, BRAMY20247280, BRAMY20267130, BRAWH20029630, BRAWH20100690, BRAWH20118230, BRCOC20105100, BRHIP20218580, BRSSN20046570, CTONG20138030, CTONG20146970, CTONG20158150, D30ST20037970, FCBBF30001840, FCBBF30033050, FEBRA20082100, HCHON20035130, HCHON20043590, HCHON20067220, NT2NE20174920, NT2RI20009870, NT2RI20023160, NT2RP70062230, NT2RP70130020, NTONG20070340, OCBBF20020150, OCBBF20094240, OCBBF20107920, PROST20144220, PROST20149160, PROST20153320, PUAEN20003740, PUAEN20025680, PUAEN20040670, SMINT20014580, SPLEN20101190, STOMA20076800, TESTI20087620, TESTI20098530, TESTI20123080, TESTI20161970, TESTI20234140, TESTI20288110, TESTI20357960, TESTI20391210, TESTI20424730, THYMU20158250, THYMU20226600, TRACH20005020, TRACH20134950, TRACH20184490, TSTOM20001390, UTERU20119060, UTERU20134910, UTERU20176130.,

[0229] These clones are involved in gastritis or gastroduodenal ulcer.

[0230] For example, if the polypeptide encoded by the cDNA of the present invention is a regulatory factor of cellular conditions such as growth and differentiation, it can be used for developing medicines as follows. The polypeptide or antibody provided by the invention is injected into a certain kind of cells by microinjection. Then, using the cells, it is possible to screen low molecular weight compounds, etc. by measuring the change in the cellular conditions, or the activation or inhibition of a particular gene. The screening can be performed as follows.

[0231] First, the polypeptide is expressed and purified as recombinant. The purified polypeptide is microinjected into cells such as various cell lines, or primary culture cells, and the cellular change such as growth and differentiation can be examined. Alternatively, the induction of genes whose expression is known to be involved in a particular change of cellular conditions may be detected by the amount of mRNA or polypeptide. Alternatively, the amount of intracellular molecules (low molecular weight compounds, etc.) that is changed by the function of the gene product (polypeptide) which is known to be involved in a particular change of cellular conditions may be detected. The compounds to be screened (both low and high molecular compounds are acceptable) can be added to the culture media and assessed for their activity by measuring the change of the cellular conditions.

[0232] Instead of microinjection, cell lines introduced with the gene obtained in the invention can be used for the screening. If the gene product is turn out to be involved in a particular change in the cellular conditions, the change of the product can be used as a measurement for screening. Once a compound is screened out which can activate or inhibit the function of the polypeptide of the invention, it can be applied for developing medicines.

[0233] If the polypeptide encoded by the cDNA of the present invention is a secretory protein, membrane protein, or protein involved in signal transduction, glycoprotein, transcription, or diseases, it can be used in functional assays for developing medicines.

[0234] In case of a membrane protein, it is most likely to be a polypeptide that functions as a receptor or ligand on- the cell surface. Therefore, it is possible to reveal a new relationship between a ligand and receptor by screening the membrane protein of the invention based on the binding activity with the known ligand or receptor. Screening can be performed according to the known methods.

[0235] For example, a ligand against the polypeptide of the invention can be screened in the following manner. Namely, a ligand that binds to a specific polypeptide can be screened by a method comprising the steps of: (a) contacting a test sample with the polypeptide of the invention or a partial peptide thereof, or cells expressing these, and (b) selecting a test sample that binds to said polypeptide, said partial peptide, or said cells.

[0236] On the other hand, for example, screening using cells expressing the polypeptide of the present invention that is a receptor protein can also be performed as follows. It is possible to screen receptors that is capable of binding to a specific polypeptide by using procedures (a) attaching the sample cells to the polypeptide of the invention or its partial peptide, and (b) selecting cells that can bind to the said polypeptide or its partial peptide.

[0237] In a following screening as an example, first the polypeptide of the invention is expressed, and the recombinant polypeptide is purified. Next, the purified polypeptide is labeled, binding assay is performed using a various cell lines or primary cultured cells, and cells that are expressing a receptor are selected (Growth and differentiation factors and their receptors, Shin-Seikagaku Jikken Kouza Vol.7 (1991) Honjyo, Arai, Taniguchi, and Muramatsu edit, p203-236, Tokyo-Kagaku-Doujin). A polypeptide of the invention can be labeled with RI such as ¹²⁵I, and enzyme (alkaline phosphatase etc.).

[0238] Alternatively, a polypeptide of the invention may be used without labeling and then detected by using a labeled antibody against the polypeptide. The cells that are selected by the above screening methods, which express a receptor of the polypeptide of the invention, can be used for the further screening of an agonists or antagonists of the said receptor.

[0239] Once the ligand binding to the polypeptide of the invention, the receptor of the polypeptide of the invention or the cells expressing the receptor are obtained by screening, it is possible to screen a compound that binds to the ligand and receptor. Also it is possible to screen a compound that can inhibit both bindings (agonists or antagonists of the receptor, for example) by utilizing the binding activities.

[0240] When the polypeptide of the invention is a receptor, the screening method comprises the steps of (a) contacting the polypeptide of the invention or cells expressing the polypeptide of the invention with the ligand, in the presence of a test sample, (b) detecting the binding activity between said polypeptide or cells expressing said polypeptide and the ligand, and (c) selecting a- compound that reduces said binding activity when compared to the activity in the absence of the test sample. Furthermore, when the polypeptide of the invention is a ligand, the screening method comprises the steps of (a) contacting the polypeptide of the invention with its receptor or cells expressing the receptor in the presence of samples, (b) detecting the binding activity between the polypeptide and its receptor or the cells expressing the receptor, and (c) selecting a compound that can potentially reduce the binding activity compared to the activity in the absence of the sample.

[0241] Samples to screen include cell extracts, expressed products from a gene library, synthesized low molecular compound, synthesized peptide, and natural compounds, for example, but are not construed to be listed here. A compound that is isolated by the above screening using a binding activity of the polypeptide of the invention can also be used as a sample.

[0242] A compound isolated by the screening may be a candidate to be an agonist or an antagonist of the receptor of the polypeptide. By utilizing an assay that monitors a change in the intracellular signaling such as phosphorylation which results from reduction of the binding between the polypeptide and its receptor, it is possible to identify whether the obtained compound is an agonist or antagonist of the receptor. Also, the compound may be a candidate of a molecule that can inhibit the interaction between the polypeptide and its associated proteins (including a receptor) in vivo. Such compounds can be used for developing drugs for precaution or cures of a disease in which the polypeptide is involved.

[0243] Secretory proteins may regulate cellular conditions such as growth and differentiation. It is possible to find out a novel factor that regulates cellular conditions by adding the secretory protein of the invention to a certain kind of cell, and performing a screening by utilizing the cellular changes in growth or differentiation, or activation of a particular gene.

[0244] The screening can be performed, for example, as follows. First, the polypeptide of the invention is expressed and purified in a recombinant form. Then, the purified polypeptide is added to a various kind of cell lines or primary cultured cells, and the change in the cell growth and differentiation is monitored. The induction of a particular gene that is known to be involved in a certain cellular change is detected by the amounts of mRNA and polypeptide. Alternatively, the amount of an intracellular molecule (low-molecular-weight compounds, etc.) that is changed by the function of a gene product (polypeptide) that is known to function in a certain cellular change is used for the detection.

[0245] Once the screening reveals that the polypeptide of the invention can regulate cellular conditions or the functions, it is possible to apply the polypeptide as a pharmaceutical and diagnostic medicine for related diseases by itself or by altering a part of it into an appropriate composition.

[0246] As is above described for membrane proteins, the secretory protein provided by the invention may be used to explore a novel ligand-receptor interaction using a screening based on the binding activity to a known ligand or receptor. A similar method can be used to identify an agonist or antagonist. The resulting compounds obtained by the methods can be a candidate of a compound that can inhibit the interaction between the polypeptide of the invention and an interacting molecule (including a receptor) . The compounds may be able to use as a preventive, therapeutic, and diagnostic medicine for the diseases, in which the polypeptide may play a certain role.

[0247] Proteins involved in signal transduction or transcription may be a factor that affects a certain polypeptide or gene in response to intracellular/extracellular stimuli. It is possible to find out a novel factor that can affect a polypeptide or gene by expressing the polypeptide provided by the invention in a certain types of cells, and performing a screening utilizing the activation of a certain intracellular polypeptide or gene.

[0248] The screening may be performed as follows. First, a transformed cell line expressing the polypeptide is obtained. Then, the transformed cell line and the untransformed original cell line are compared for the changes in the expression of a certain gene by detecting the amount of its mRNA or polypeptide. Alternatively, the amount of an intracellular molecule (low molecular weight compounds, etc.) that is changed by the function of a certain gene product (polypeptide) may be used for the detection. Furthermore, the change of the expression of a certain gene can be detected by introducing a fusion gene that comprises a regulatory region of the gene and a marker gene (luciferase, P-galactosidase, etc.) into a cell, expressing the polypeptide provided by the invention into the cell, and estimating the activity of a marker gene product (polypeptide).

[0249] If the polypeptide or gene of the-invention is involved in diseases, it is possible to screen a gene or compound that can regulate its expression and/or activity either directly or indirectly by utilizing the polypeptide of the present invention.

[0250] For example, the polypeptide of the invention is expressed and purified as a recombinant polypeptide. Then, the polypeptide or gene that interacts with the polypeptide of the invention is purified, and screened based on the binding. Alternatively, the screening can be performed by adding with a compound of a candidate of the inhibitor added in advance and monitoring the change of binding activity. In another method, a transcription regulatory region locating in the 5′-upstream of the gene encoding the polypeptide of the invention that is capable of regulating the expression of other genes is obtained, and fused with a marker gene. The fusion is introduced into a cell, and the cell is added with compounds to explore a regulatory factor of the expression of the said gene.

[0251] The compound obtained by the screening can be used for developing pharmaceutical and diagnostic medicines for the diseases in which the polypeptide of the present invention is involved. Similarly, if the regulatory factor obtained in the screening is turn out to be a polypeptide, compounds that can newly affect the expression or activity of the polypeptide may be used as a medicine for the diseases in which the polypeptide of the invention is involved.

[0252] If the polypeptide of the invention has an enzymatic activity, regardless as to whether it is a secretory protein, membrane protein, or proteins involved in signal transduction, glycoprotein, transcription, or diseases, a screening may be performed by adding a compound to the polypeptide of the invention and monitoring the change of the compound. The enzymatic activity may also be utilized to screen a compound that can inhibit the activity of the polypeptide.

[0253] In a screening given as an example, the polypeptide of the invention is expressed and the recombinant polypeptide is purified. Then, compounds are contacted with the purified polypeptide, and the amount of the compound and the reaction products is examined. Alternatively, compounds that are candidates of an inhibitor are pretreated, then a compound (substrate) that can react with the purified polypeptide is added, and the amount of the substrate and the reaction products is examined.

[0254] The compounds obtained in the screening may be used as a medicine for diseases in which the polypeptide of the invention is involved. Also they can be applied for tests that examine whether the polypeptide of the invention functions normally in vivo.

[0255] Whether the secretory protein, membrane protein, signal transduction-related protein, glycoprotein-related protein, or transcription-related protein of the present invention is a novel protein involved in diseases or not is determined in another method than described above, by obtaining a specific antibody against the polypeptide of the invention, and examining the relationship between the expression or activity of the polypeptide and a certain disease. In an alternative way, it may be analyzed referred to the methods in “Molecular Diagnosis of Genetic Diseases” (Elles R. edit, (1996) in the series of “Method in Molecular Biology” (Humana Press).

[0256] Proteins involved in diseases are targets of screening as mentioned, and thus are very useful in developing drugs which regulate their expression and activity. Also, the proteins are useful in the medicinal industry as a diagnostic marker of the related disease or a target of gene therapy.

[0257] Compounds isolated as mentioned above can be administered patients as it is, or after formulated into a pharmaceutical composition according to the known methods. For example, a pharmaceutically acceptable carrier or vehicle, specifically sterilized water, saline, plant oil, emulsifier, or suspending agent can be mixed with the compounds appropriately. The pharmaceutical compositions can be administered to patients by a method known to those skilled in the art, such as intraarterial, intravenous, or subcutaneous injections. The dosage may vary depending on the weight or age of a patient, or the method of administration, but those skilled in the art can choose an appropriate dosage properly. If the compound is encoded by polynucleotide, the polynucleotide can be cloned into a vector for gene therapy, and used for gene therapy. The dosage of the polynucleotide and the method of its administration may vary depending on the weight or age of a patient, or the symptoms, but those skilled in the art-can choose properly.

[0258] The present invention further relates to databases comprising at least a sequence of polynucleotide and/or polypeptide, or a medium recorded in such databases, selected from the sequence data of the nucleotide and/or the amino acids indicated in Table 1. The term “database” means a set of accumulated information as machine-searchable and readable information of nucleotide sequence. The databases of the present invention comprise at least one of the novel nucleotide sequences of polynucleotides provided by the present invention. The databases of the present invention can consist of only the sequence data of the novel polynucleotides provided by the present invention or can comprise other information on nucleotide sequences of known full-length cDNAs or ESTs. The databases of the present invention can be comprised of not only the information on the nucleotide sequences but also the information on the gene functions revealed by the present invention. Additional information such as names of DNA clones carrying the full-length cDNAs can be recorded or linked together with the sequence data in the databases.

[0259] The database of the present invention is useful for gaining complete gene sequence information from partial sequence information of a gene of interest. The database of the present invention comprises nucleotide sequence information of full-length cDNAs. Consequently, by comparing the information in this database with the nucleotide sequence of a partial gene fragment yielded by differential display method or subtraction method, the information on the full-length nucleotide sequence of interest can be gained from the sequence of the partial fragment as a starting clue.

[0260] The sequence information of the full-length cDNAs constituting the database of the present invention contains not only the information on the complete sequences but also extra information on expression frequency of the genes as well as homology of the genes to known genes and known polypeptides. Thus the extra information facilitates rapid functional analyses of partial gene fragments. Further, the information on human genes is accumulated in the database of the present invention, and therefore, the database is useful for isolating a human homologue of a gene originating from other species. The human homologue can be isolated based on the nucleotide sequence of the gene from the original species.

[0261] At present, information on a wide variety of gene fragments can be obtained by differential display method and subtraction method. In general, these gene fragments are utilized as tools for isolating the full-length sequences thereof. When the gene fragment corresponds to an already-known gene, the full-length sequence is easily obtained by comparing the partial sequence with the information in known databases. However, when there exists no information corresponding to the partial sequence of interest in the known databases, cDNA cloning should be carried out for the full-length cDNA. It is often difficult to obtain the full-length nucleotide sequence using the partial sequence information as an initial clue. If the full-length of the gene is not available, the amino acid sequence of the polypeptide encoded by the gene remains unidentified. Thus the database of the present invention can contribute to the identification of full-length cDNAs corresponding to gene fragments, which cannot be revealed by using databases of known genes.

[0262] The present invention has provided 2443 polynucleotides. As has not yet proceeded the isolation of full-length cDNA within the human, the invention has great significance. It is known that secretory proteins, membrane proteins, signal transduction-related proteins, glycoprotein-related proteins, transcription-related proteins, and so on are involved in many diseases. The genes and proteins involved in diseases are useful for developing a diagnostic marker or medicines for regulation of their expression and activity, or as a target of gene therapy.

[0263] In particular, cDNA assumed to encode secretory proteins, which were provided by this invention, are very important for the industry since the encoded proteins themselves are expected to be useful as pharmaceutical agents and many disease-related genes may be included in them. In addition, membrane proteins, signal transduction-related proteins, transcription-related proteins, disease-related proteins, and genes encoding them can be used as indicators for diseases, etc. These cDNA are also very important for the industry, which are expected to regulate the activity or expression of the encoded protein to treat diseases, etc.

[0264] Any patents, patent applications, and publications cited herein are incorporated by reference.

[0265] The invention is illustrated more specifically with reference to the following examples, but is not to be construed as being limited thereto.

### EXAMPLE 1

### Preparation of cDNA Library by Oligo-Capping

[0266] (1) Extraction and Purchase of mRNA

[0267] Total RNAs as mRNA sources were extracted from human tissues (shown below) by the method as described in the reference (J. Sambrook, E. F. Fritsch & T. Maniatis, Molecular Cloning Second edition, Cold Spring harbor Laboratory Press, 1989). Further, by the method as described in the reference (J. Sambrook, E. F. Fritsch & T. Maniatis, Molecular Cloning Second edition, Cold Spring harbor Laboratory Press, 1989) , total RNAs as mRNA sources were extracted from human culture cells and human primary culture cells (shown below) which had been cultivated by the methods described in the catalogs.

[0268] The library names and the origins are indicated below in the order of “Library name: Origin”. When a library was prepared by the subtraction method, the item is followed by a description of how to prepare the subtracted library. <Extraction of mRNA from human tissues>NTONG: Normal tongue; CTONG: Tongue cancer; FCBBF: Fetal brain; OCBBF: Fetal brain; PLACE: Placenta; SYNOV: Synovial membrane tissue (from rheumatioid arthritis); CORDB: Cord blood. <Extraction of mRNA from culture cells>BNGH4: H4 cells (ATCC #HTB-148); IMR32: IMR32 cells (ATCC #CCL-127); SKNMC: SK-N-MC cells (ATCC #HTB-10); 3NB69: NB69 cells (RCB #RCB0480); BGGIl: GIl cells (RCB #RCB0763); NB9N4: NB9 cells (RCB #RCB0477); - SKNSH: SK-N-SH cells (RCB #RCB0426); AHMSC: Human mesenchymal (HMSC) cells; CHONS: Chondrocytes; ERLTF: TF-1 cells (erythroleukemia); HELAC: HeLa cells; JCMLC: Leukemia, myelogenous; MESTC: Mesenchyme stem cells; NLESE: Mesenchymal stem cells; NCRRM: Embryonal carcinoma; NCRRP: Embryonal carcinoma treated with retinoic acid (RA) to induce the differentiation; TLESE: Mesenchymal stem cells treated with trichostatin and 5- azacytidine to induce the differentiation; NT2RM: NT2 cells (STARATAGENE #204101);

[0269] NT2RP: NT2 cells treated with retinoic acid (RA) for 5 weeks to induce the differentiation;

[0270] NT2RI: NT2 cells treated with RA for 5 weeks to induce the differentiation, followed by the treatment with the growth inhibitor for 2 weeks;

[0271] NT2NE: NT2 cells were treated with RA and the growth inhibitor for the neuronal differentiation, and the resultant neurons were concentrated and harvested (NT2 Neuron);

[0272] NTISM: NT2 cells (STARATAGENE #204101) were treated with RA for 5 weeks to induce the differentiation, and then treated with the growth inhibitor for 2 weeks; mRNA was prepared from the cells and a cDNA library was constructed from the mRNA; the cDNAs of the library whose nucleotide sequences were shared by those of mRNAs from undifferentiated NT2 cells were subtracted by using a Subtract Kit (Invitrogen #K4320-01); the subtracted library (NT2RI-NT2RM) was provided by this procedure.

[0273] RCB indicates that the cell was provided by the Cell Bank, RIKEN GENE BANK, The Institute of Physical and Chemical Research; ATCC indicates that the cell was provided by American Type Culture Collection. <Extraction of mRNA from primary culture cells>ASTRO: Normal human astrocyte NHA5732, Takara Shuzo #CC2565; DFNES: Normal human dermal fibroblast (neonatal skin); NHDF-Neo NHDF2564, Takara Shuzo #CC2509;

[0274] MESAN: Normal human mesangial cell NHMC56046-2, Takara Shuzo #CC2559; 51 NHNPC: Normal human neural progenitor cell NHNP5958, Takara Shuzo #CC2599;

[0275] PEBLM: Normal human peripheral blood mononuclear cell HPBMC5939, Takara Shuzo #CC2702;

[0276] HSYRA: Human synoviocyte HS-RA (from rheumatioid arthritis), 10 Toyobo #T404K-05;

[0277] PUAEN: Normal human pulmonary artery endothelial cells, Toyobo #T302K-05;

[0278] UMVEN: Normal human umbilical vein endothelial cell HUVEC, Toyobo #T200K-05; 15 HCASM: Normal human coronary artery smooth muscle cell HCASMC, Toyobo #T305K-05;

[0279] HCHON: Normal human chondrocyte HC, Toyobo #T402K-05;

[0280] HHDPC: Normal human dermal papilla cell HDPC, Toyobo #THPCK-001;

[0281] CD34C: CD34+cells (AllCells, LLC #CB14435M); 20 D30ST: CD34+cells treated with the osteoclast differentiation factor (ODF) for 3 days to induce the differentiation;

[0282] D60ST: CD34+cells treated with ODF for 6 days to induce the differentiation;

[0283] D9OST: CD34+cells treated with ODF for 9 days to induce the 25 differentiation;

[0284] ACTVT: Activated T-cells;

[0285] LYMPB: Lymphoblasts, EB virus transferred B cells;

[0286] NETRP: Neutrophils.

[0287] Then, total RNAs extracted from the following human tissues were purchased and used as mRNA sources. The library names and the origins are indicated below in the order of “Library name: Origin”. When a library was prepared by the subtraction method, the item is followed by a description of how to prepare the subtracted library. <Purchase of total RNA containing mRNA extracted from human tissues>ADRGL: Adrenal gland, CLONTECH #64016-1; BRACE: Brain (cerebellum), CLONTECH #64035-1; BRAWH: Whole brain, CLONTECH #64020-1; FEBRA: Fetal brain, CLONTECH #64019-1; FELIV: Fetal liver, CLONTECH #64018-1; HEART: Heart, CLONTECH #64025-1; HLUNG: Lung, CLONTECH #64023-1; KIDNE: Kidney, CLONTECH #64030-1; LIVER: Liver, CLONTECH #64022-1; MAMGL: Mammary Gland, CLONTECH #64037-1; PANCR: Pancreas, CLONTECH #64031-1; PROST: Prostate, CLONTECH #64038-1; SALGL: Salivary Gland, CLONTECH #64026-1; .SKMUS: Skeletal Muscle, CLONTECH #64033-1; SMINT: Small Intestine, CLONTECH #64039-1; SPLEN: Spleen, CLONTECH #64034-1; STOMA: Stomach, CLONTECH #64090-1; TBAES: Breast (Tumor), CLONTECH #64015-1; TCERX: Cervix (Tumor), CLONTECH #64010-1; TCOLN: Colon (Tumor), CLONTECH #64014-1; TESTI: Testis, CLONTECH #64027-1; THYMU: Thymus, CLONTECH #64028-1; TLUNG: Lung (Tumor), CLONTECH #64013-1; TOVAR: Ovary (Tumor), CLONTECH #64011-1; TRACH: Trachea, CLONTECH #64091-1; TUTER: Uterus (Tumor), CLONTECH #64008-1; UTERU: Uterus, CLONTECH #64029-1; ADIPS: Adipose, Invitrogen #D6005-01; BLADE: Bladder, Invitrogen #D6020-01; BRALZ: Cerebral cortex from an Alzheimer patient (Brain, cortex, Alzheimer), Invitrogen #D6830-01; CERVX: Cervix-, Invitrogen #D6047-01; COLON: Colon, Invitrogen #D6050-0; NESOP: Esophagus, Invitrogen #D6060-01; PERIC: Pericardium, Invitrogen #D6105-01; RECTM: Rectum, Invitrogen #D6110-01; TESOP: Esophageal (Tumor), Invitrogen #D6860-01; TKIDN: Kidney (Tumor), Invitrogen #D6870-01; TLIVE: Liver (Tumor), Invitrogen #D6880-01; TSTOM: Stomach (Tumor), Invitrogen #D6920-01; BEAST: Adult breast, STARATAGENE #735044; FEHRT: Fetal heart, STARATAGENE #738012; FEKID: Fetal kidney, STARATAGENE #738014; FELNG: Fetal lung, STARATAGENE #738020; NOVAR: Adult ovary, STARATAGENE #735260;

[0288] BRASW: subtracted library (BRALZ-BRAWH). A cDNA library was constructed from mRNA prepared from tissues of cerebral cortex obtained from an Alzheimer patient [BRALZ: Cerebral cortex from an Alzheimer patient (Brain, cortex, Alzheimer), Invitrogen #D6830-01]; the cDNAs of this library whose nucleotide sequences were shared by those of mRNAs from whole brain tissue [BRAWH: Whole brain, CLONTECH #64020-1] were subtracted by using a Subtract Kit (Invitrogen #K4320-01).

[0289] Further, mRNAs extracted and purified as poly A(+) RNAs from the human tissues shown below were purchased. A cDNA library was prepared from an RNA mixture in which the poly A(+) RNA from each tissue had been combined with poly A(−) RNA. The poly A(−) RNA was prepared by removing poly A(+) RNA from the total RNA of whole brain tissue (CLONTECH #64020-1) by using oligo dT cellulose. The library names and the origins are indicated below in the order of “Library name: Origin”. <Purchase of mRNAs of human tissues as poly A(+) RNAs>BRAMY: Brain (amygdala), CLONTECH #6574-1; BRCAN: Brain (caudate nucleus), CLONTECH #6575-1; BRCOC: Brain (corpus callosum), CLONTECH #6577-1; BRHIP: Brain (hippocampus), CLONTECH #6578-1; BRSSN: Brain (substantia nigra), CLONTECH #6580-1; BRSTN: Brain (subthalamic nucleus), CLONTECH #6581-1; BRTHA: Brain (thalamus), CLONTECH #6582-1.

[0290] (2) Preparation of cDNA library

[0291] cDNA library was prepared from each RNA by the improved method (WO 01/04286) of oligo capping [M. Maruyama and S. Sugano, Gene, 138: 171-174 (1994)]. A series of procedures, BAP (Bacterial Alkaline Phosphatase) treatment, TAP (Tobacco Acid Pyrophosphatase) treatment, RNA ligation, first strand cDNA synthesis and RNA removal, were carried out using the oligo-cap linker (SEQ ID NO: 5455) and oligo dT primer (SEQ ID NO: 5456) as described in WO 01/04286. Then, the single-stranded cDNA was converted to a double-stranded cDNA by PCR (polymerase chain reaction) using 5′ (SEQ ID NO: 5457) and 3′ (SEQ ID NO: 5458) PCR primers, and then digested with SfiI. Then, a fraction of cDNA fragments, typically 2 -kb or longer (3 -kb or longer in some cases), was unidirectionally cloned into a DraIII-digested pME18SFL3 vector (FIG. 1) (GenBank AB0D9864, Expression vector); the cDNA library was thus prepared.

[0292] The names of cDNA libraries, which were used in the 15 analysis of full-length cDNA sequences, and their origins are shown in Table 2.

TABLE 2

| Library | Type | Origin, etc. |
|---|---|---|
| 3NB69 | Culture | NB69 cells (RCB #RCB0480) |
| | cell | |
| ADIPS | Tissue | Adipose (Invitrogen #D6005-01) |
| ADRGL | Tissue | Adrenal gland (CLONTECH #64016-1) |
| ASTRO | Primary | Normal Human Astrocyte NHA5732 |
| | culture | (Takara Shuzo #CC2565) |
| | cell | |
| BEAST | Tissue | Adult Breast (STARATAGENE #735044) |
| BGGI1 | Culture | GI1 cells (RCB #RCB0763) |
| | cell | |
| BLADE | Tissue | Bladder (Invitrogen #D6020-01) |
| BNGH4 | Culture | H4 cells (ATCC #HTB-148) |
| | cell | |
| BRACE | Tissue | Brain, cerebellum (CLONTECH |
| | | #64035-1) |
| BRALZ | Tissue | Brain, cortex, Alzheimer (Invitrogen |
| | | #D6830-01) |
| BRAMY | Tissue | Brain, amygdala (CLONTECH #6574-1) |
| BRAWH | Tissue | Brain, whole (CLONTECH #64020-1) |
| BRCAN | Tissue | Brain, caudate nucleus (CLONTECH |
| | | #6575-1) |
| BRCOC | Tissue | Brain, corpus callosum (CLONTECH |
| | | #6577-1) |
| BRHIP | Tissue | Brain, hippocampus (CLONTECH |
| | | #6578-1) |
| BRSSN | Tissue | Brain, substantia nigra (CLONTECH |
| | | #6580-1) |
| BRSTN | Tissue | Brain, subthalamic nucleus (CLONTECH |
| | | #6581-1) |
| BRTHA | Tissue | Brain, thalamus (CLONTECH #6582-1) |
| CD34C | Primary | CD34+ cells (AllCells, LLC |
| | culture | #CB14435M) |
| | cell | |
| COLON | Tissue | Colon (Invitrogen #D6050-0) |
| CTONG | Tissue | Tongue, Cancer |
| D3OST | Primary | CD34+ cells (ODF induction for |
| | culture | 3 days) |
| | cell | |
| D6OST | Primary | CD34+ cells (ODF induction for |
| | culture | 6 days) |
| | cell | |
| D9OST | Primary | CD34+ cells (ODF induction for |
| | culture | 9 days) |
| | cell | |
| DFNES | Primary | Normal Human Dermal Fibroblasts |
| | culture | (Neonatal Skin); NHDF-Neo NHDF2564 |
| | cell | (Takara Shuzo #CC2509) |
| FCBBF | Tissue | Brain, Fetal |
| FEBRA | Tissue | Brain, Fetal (CLONTECH #64019-1) |
| FEHRT | Tissue | Heart, Fetal (STARATAGENE #738012) |
| FELNG | Tissue | Lung, Fetal (STARATAGENE #738020) |
| HCASM | Primary | Human coronary artery smooth muscle |
| | culture | cells HCASMC (Toyobo #T305K-05) |
| | cell | |
| HCHON | Primary | Human Chondrocytes HC (Toyobo |
| | culture | #T402K-05) |
| | cell | |
| HEART | Tissue | Heart (CLONTECH #64025-1) |
| HHDPC | Primary | Human dermal papilla cells HDPC |
| | culture | (Toyobo #THPCK-001) |
| | cell | |
| HLUNG | Tissue | Lung (CLONTECH #64023-1) |
| IMR32 | Culture | IMR32 cells (ATCC #CCL-127) |
| | cell | |
| KIDNE | Tissue | Kidney (CLONTECH #64030-1) |
| LIVER | Tissue | Liver (CLONTECH #64022-1) |
| MAMGL | Tissue | Mammary Gland (CLONTECH #64037-1) |
| MESAN | Primary | Normal human mesangial cells NHMC56046-2 |
| | culture | (Takara Shuzo #CC2559) |
| | cell | |
| NESOP | Tissue | Esophagus (Invitrogen #D6060-01) |
| NOVAR | Tissue | Adult Ovary (STARATAGENE #735260) |
| NT2NE | Culture | NT2 cells concentrated after |
| | cell | differenciation (NT2 Neuron) |
| NT2RI | Culture | NT2 cells treated by growth inhibitor |
| | cell | for 2 weeks after RA induction for 5 weeks |
| NT2RP | Culture | NT2 cells treated by RA for 5 weeks |
| | cell | |
| NTONG | Tissue | Tongue |
| OCBBF | Tissue | Brain, Fetal |
| PANCR | Tissue | Pancreas (CLONTECH #64031-1) |
| PEBLM | Primary | Human peripheral blood mononuclear |
| | culture | cells HPBMC5939 (Takara Shuzo #CC2702) |
| | cell | |
| PERIC | Tissue | Pericardium (Invitrogen #D6105-01) |
| PLACE | Tissue | Placenta |
| PROST | Tissue | Prostate (CLONTECH #64038-1) |
| PUAEN | Primary | Human pulmonary artery endothelial cells |
| | culture | (Toyobo #T302K-05) |
| | cell | |
| RECTM | Tissue | Rectum (Invitrogen #D6110-01) |
| SALGL | Tissue | Salivary Gland (CLONTECH #64026-1) |
| SKMUS | Tissue | Skeletal Muscle (CLONTECH #64033-1) |
| SKNMC | Culture | SK-N-MC cells (ATCC #HTB-10) |
| | cell | |
| SKNSH | Culture | SK-N-SH cells (RCB #RCB0426) |
| | cell | |
| SMINT | Tissue | Small Intestine (CLONTECH #64039-1) |
| SPLEN | Tissue | Spleen (CLONTECH #64034-1) |
| STOMA | Tissue | Stomach (CLONTECH #64090-1) |
| SYNOV | Tissue | Synovial membrane tissue from rheumatioid |
| | | arthritis |
| TBAES | Tissue | Breast, Tumor (CLONTECH #64015-1) |
| TCOLN | Tissue | Colon, Tumor (CLONTECH #64014-1) |
| TESOP | Tissue | Esophageal, Tumor (Invitrogen |
| | | #D6860-01) |
| TESTI | Tissue | Testis (CLONTECH #64027-1) |
| THYMU | Tissue | Thymus (CLONTECH #64028-1) |
| TKIDN | Tissue | Kidney, Tumor (Invitrogen #D6870-01) |
| TOVAR | Tissue | Ovary, Tumor (CLONTECH #64011-1) |
| TRACH | Tissue | Trachea (CLONTECH #64091-1) |
| TSTOM | Tissue | Stomach, Tumor (Invitrogen #D6920-01) |
| TUTER | Tissue | Uterus, Tumor (CLONTECH #64008-1) |
| UMVEN | Primary | Human umbilical vein endothelial cells |
| | culture | HUVEC (Toyobo #T200K-05) |
| | cell | |
| UTERU | Tissue | Uterus (CLONTECH #64029-1) |

[0293] The CDNA library with the high fullness ratio (the fullness ratio of 5′-end, which was calculated for each cDNA library by using the protein coding region found in known mRNA species as 5 an index, was 90% in average) prepared by the improved oligo-capping method was constructed by using a eukaryotic expression vector pMEl8SFL3. The vector contains SRa promoter and SV40 small t intron in the upstream of the cloning site, and SV40 polyA added signal sequence site in the downstream. As the cloning site of pME18SFL3 has asymmetrical DraIII sites, and the ends of cDNA fragments contain SfiI sites complementary to the DraIII sites, the cloned cDNA fragments can be inserted into the downstream of the SRa promoter unidirectionally. Therefore, clones containing full-length cDNA can be expressed transiently by introducing the obtained plasmid directly into COS cells, etc. Thus, the clones can be analyzed very easily in terms of the proteins that are the gene products of the clones, or in terms of the biological activities of the proteins.

[0294] (3) Assessment of the 5′-end completeness of clones derived from the cDNA library prepared by oligo-capping

[0295] With respect to the plasmid DNAs of clones derived from the libraries, the nucleotide sequences of cDNA 5′-ends (3′-ends as well in some cases) were determined in a DNA sequencer (ABI PRISM 3700, PE Biosystems), after sequencing reaction was conducted by using a DNA sequencing reagent (BigDye Terminator Cycle Sequencing FS Ready Reaction Kit, PE Biosystems) according to the manual. A database was constructed based on the obtained data.

[0296] The 5′-end completeness of about 1110,000 clones derived from the human cDNA libraries prepared by the improved oligo-capping method was determined by the following method. The clones whose 5′-end sequences were consistent with those of known human mRNA in the public database were judged to be “full-length” if they had a longer 5′-end sequence than that of the known human mRNA; or even though the 5′-end sequence was shorter, if it contained the translation initiation codon it was judged to have the “full-length” sequence. Clones which did not contain the translation initiation codon were judged to be “not-full-length”. The fullness ratio ((the number of full-length clones)/(the number of full-length and not-full-length clones)) at the 5′-end of the cDNA clones was determined by comparing with known human mRNA. As a result, the fullness ratio of the 5′-ends was 90%. The result indicates that the fullness ratio at the 5′-end sequence was extremely high in the human cDNA clones obtained by the oligo-capping method.

### EXAMPLE 2

### Sequencing Analysis of cDNA Ends and Selection of Full-Length Clones

[0297] With respect to the plasmid DNAs of clones obtained from each cDNA library, the 5′-end nucleotide sequences of the cDNAs were determined in a DNA sequencer (ABI PRISM 3700, PE Biosystems) , after sequencing reaction was conducted by using a DNA sequencing reagent (Dye Terminator Cycle Sequencing FS Ready Reaction Kit, dRhodamine Terminator Cycle Sequencing FS Ready Reaction Kit or BigDye Terminator Cycle Sequencing FS Ready Reaction Kit, PE Biosystems) according to the manual. A database was constructed using the data obtained.

[0298] For the analyzed 5′-end sequences of cDNA clones, the data with the annotation of “complete cds” in the GenBank and UniGene were searched by BLAST homology search. When identical to certain human mRNA sequences, such cDNA clones were excluded. Then, clustering was carried out. When the identity was 90% or higher, and the length of consensus sequence was 50 base pairs or longer, the cDNA clones were assumed to belong to an identical cluster, and thus clustered. cDNA clones longer in the 5′ direction were selected from the members belonging to a cluster; if required, the 3′-end sequences of the selected clones were determined by the same analysis method as used to determine the 5′-end sequences. The data of the end sequences obtained were analyzed, and then the clones forming a sequence contig at 5′- and 3′-ends were excluded. Further, as mentioned above, the data was analyzed again by BLAST homology search; when identical to certain human mRNA sequences (including sequences patented and applied for), the cDNA clones were excluded. Thus, the cDNAs clones to be analyzed for their nucleotide sequence were obtained.

### EXAMPLE 3

### Analysis of the Full-Length Nucleotide Sequences

[0299] The full-length nucleotide sequences of the selected clones were determined. The nucleotide sequence determination was mainly performed by primer walking method comprising the dideoxy terminator method using custom-made synthetic DNA primers. Namely, the nucleotide sequences of the DNAs were determined in a sequencer from PE Biosystems, after sequencing reaction was carried out with a DNA sequencing reagent from the same supplier using the custom-made synthetic DNA primers according to the manual. A part of the clones were analyzed with a DNA sequencer from Licor.

[0300] Further, the nucleotide sequences of a part of the clones were determined by the shotgun method where the plasmids containing the cDNAs were digested at random were used, instead of the use of custom-made primers, by the same method in the DNA sequencer. The full-length nucleotide sequences were finally determined by completely assembling the partial nucleotide sequences obtained by the above method.

[0301] Then, the regions translatable to proteins were deduced from the determined full-length nucleotide sequences, and thereby the amino acid sequences were determined. SEQ ID NOs corresponding to the respective sequences are shown in Table 1.

### EXAMPLE 4

### Functional Prediction by Homology Search

[0302] For the determined nucleotide sequences, GenBank, SwissProt, UniGene, and nr were searched by BLAST. The clones exhibiting higher homology, which were convenient to predict their functions based on the nucleotide sequences and deduced amino acid sequences, were selected based on the BLAST search hit data whose P value or E value was 10⁻⁴ or lower and for which the length of consensus sequence×homology=30 or higher in the amino acid database search. Further, from them, representative clones were selected, which are shown as Homology Search Result Data in the last part herein. Accordingly, the data shown herein are merely the representative data, and the molecule exhibiting homology to each clone is not limited thereto. Further, with respect to a part of clones, the BLAST search hit data that did not meet the criteria as described above are not shown herein.

### EXAMPLE 5

### Search for Signal Sequence, Transmembrane Domain and Other Functional Domains in the Deduced Amino Acid Sequences

[0303] With respect to the amino acid sequences deduced from the full-length nucleotide sequences, the prediction was made for the presence of signal sequence at the amino terminus, the presence of transmembrane domain, and the presence of functional protein domains (motifs). The signal sequence at the amino terminus was searched for by PSORT [K. Nakai & M. Kanehisa, Genomics, 14: 897-911 (1992)]; the transmembrane domain, by SOSUI [T. Hirokawa et al., Bioinformatics, 14: 378-379 (1998)] (Mitsui Knowledge Industry); the function domain, by Pfam (http://www.sanger.ac.uk/Software/Pfam/index.shtml). The amino acid sequence in which the signal sequence at the amino terminus or transmembrane domain had been predicted to be present by PSORT or SOSUI were assumed to be a secretory or membrane protein. Further, when the amino acid sequence hit a certain functional domain by the Pfam functional domain search, the protein function can be predicted based on the hit data, for example, by referring to the function categories on the PROSITE (http://www.expasy.ch/cgi-bin/prosite-list.pl). In addition, the functional domain search can also be carried out on the PROSITE.

[0304] The search results obtained with the respective programs are shown below.

[0305] The clones whose deduced amino acid sequences were detected to have the signal sequences by PSORT are as follows. ADRGL20013520, ASTRO20005330, ASTRO20055750, BNGH420088500, BRACE20038000, BRACE20081720, BRACE20101710, BRACE20224480, BRACE20257100, BRACE20273890, BRALZ20013500, BRALZ20054710, BRALZ20077930, BRAMY20063970, BRAMY20284910, BRAWH20016860, BRAWH20064050, BRCOC10000870, BRCOC20078640, BRCOC20090520, BRCOC20101230, BRCOC20114180, BRCOC20121720, BRCOC20134480, BRCOC20136750, BRHIP20179200, BRHIP20198190, BRHIP20217620, BRSSN20003120, BRSSN20137020, COLON10001350, COLON20093370, CTONG20158660, CTONG20267700, D30ST20036070, D30ST20038560, D60ST20005070, FCBBF10001210, FCBBF10002430, FCBBF10003760, FCBBF10005740, FCBBF20042560, FCBBF30086440, FCBBF30095260, FCBBF30172550, FCBBF30238870, FEBRA20009090, FEBRA20029860, FEBRA20086620, FEBRA20092890, FEBRA20111460, FEBRA20130190, FEBRA20145780, FEBRA20235500, HCHON20064590, HCHON20067700, HCHON20086720, HEART20049410, HHDPC20001040, HHDPC20014320, KIDNE20011400, KIDNE20022620, KIDNE20126130, KIDNE20127450, LIVER20064690, MESAN10001260, MESAN20038510, MESAN20115970, MESAN20152770, MESAN20153910, NT2NE20118960, NT2NE20124480, NT2NE20183760, NT2RI20003480, NT2RI20023910, NT2RI20028470, NT2RI20040930, NT2RP70134990, NTONG20029700, NTONG20063010, OCBBF20019830, OCBBF20078920, OCBBF20086400, OCBBF20087010, OCBBF20116850, OCBBF20122620, OCBBF20130910, OCBBF20188730, PEBLM20075980, PLACE60086400, PROST20175290, SKNSH20028660, SMINT20009840, SMINT20022020, SMINT20073650, SMINT20095050, SMINT20105330, SMINT20127930, SMINT20153260, SMINT20157450, SMINT20173240, SMINT20178550, SMINT20191420, SMINT20192000, SPLEN20079510, SPLEN20095810, SPLEN20118300, SPLEN20141360, SPLEN20157880, SPLEN20171890, SPLEN20213830, STOMA20005390, STOMA20056640, STOMA20080500, STOMA20088380, SYNOV20001520, SYNOV20001730, SYNOV20002790, SYNOV20002970, SYNOV20004260, SYNOV20007000, SYNOV20008240, SYNOV20009230, SYNOV20010880, SYNOV20011110, SYNOV20013000, TESOP20005690, TESTI20123560, TESTI20208400, TESTI20211220, TESTI20272960, TESTI20309170, TESTI20316870, TESTI20385960, TESTI20390260, TESTI20391770, TEST120396130, TESTI20415170, TESTI20421490, TESTI20441940, TEST120444180, TESTI20463580, THYMU10005360, THYMU20027560, THYMU20032870, THYMU20039810, THYMU20066100, THYMU20106710, THYMU20111830, THYMU20161640, THYMU20162190, THYMU20194420, THYMU20222890, THYMU20241850, TKIDN20005210, TRACH20029540, TRACH20034840, TRACH20050040, TRACH20069180, TRACH20085400, TRACH20136710, TRACH20145440, TRACH20180840, UTERU20158300, UTERU20158800, UTERU20161570

[0306] The clones whose deduced amino acid sequences were detected to have the transmembrane domains by SOSUI are as follows. Numerals indicate the numbers of transmembrane domains detected in the deduced amino acid sequences. Of the search result, the clone name and the number of transmembrane domains are demarcated by a double slash mark (//). ADIPS10000640//3, ADRGL20018540//l, ADRGL20035850//2, ASTRO20001410//l, ASTRO20005330//3, ASTRO20058630//4, ASTRO20190390//1, BEAST20004540//1, BGGI110000240//2, BRACE20006400//l, BRACE20038470//l, BRACE20039040//1, BRACE20039540//l, BRACE20051380//l, BRACE20059370//1, BRACE20061050//1, BRACE20063630//2, BRACE20067430//1, BRACE20069090//2, BRACE20101700//2, BRACE20116110//2, BRACE20147800//1, BRACE20153680//5, BRACE20163350//1, BRACE20179340//6, BRACE20188470//4, BRACE20195100//1, BRACE20201570//1, BRACE20210140//1, BRACE20224480//1, BRACE20224500//1, BRACE20228480//1, BRACE20232840//1, BRACE20238000//2, BRACE20274080//1, BRALZ20013500//2, BRALZ20064740//1, BRALZ20069760//3, BRALZ20073760//3, BRAMY20000860//2, BRAMY20002770//2, BRAMY20025840//1, BRAMY20039260//3, BRAMY20060920//1, BRAMY20063970//3, BRAMY20111960//1, BRAMY20112800//2, BRAMY20134140//2, BRAMY20135900//1, BRAMY20136210//1, BRAMY20144620//3, BRAMY20152110//1, BRAMY20174550//4, BRAMY20181220//2, BRAMY20195090//1, BRAMY20211390//1, BRAMY20211420//10, BRAMY20215230//1, BRAMY20218250//10, BRAMY20218670//3, BRAMY20229800//1, BRAMY20231720//1, BRAMY20247280//1, BRAMY20252180//2, BRAMY20273960//1, BRAMY20277170//5, BRAWH20015350//1, BRAWH20015890//2, BRAWH20016860//3, BRAWH20018730//10, BRAWH20030250//4, BRAWH20110790//3, BRAWH20121640//11, BRAWH2-0122580//2, BRAWH20132190//2, BRCAN20064010//2, BRCAN20071190//1, BRCAN20091560//1, BRCAN20103740//1, BRCAN20224720//1, BRCAN20273550//5, BRCAN20280360//6, BRCAN20285450//2, BRCOC20004040//4, BRCOC20006370//2, BRCOC20041750//1, BRCOC20077690//2, BRCOC20090520//1, BRCOC20091960//2, BRCOC20101230//6, BRCOC20107300//1, BRCOC20114180//3, BRCOC20121720//7, BRCOC20134480//3, BRCOC20136750//2, BRHIP20000870//2, BRHIP20003120//3, BRHIP20111200//1, BRHIP20118380//1, BRHIP20118910//2, BRHIP20121410//3, BRHIP20135100//1, BRHIP20183690//9, BRHIP20191490//2, BRHIP20191770//1, BRHIP20207430//1, BRHIP20208270//1, BRHIP20208590//2, BRHIP20217620//1, BRHIP20233090//1, BRHIP20234380//1, BRHIP20238880//1, BRHIP20283030//1, BRSSN20003120//7, BRSSN20043040//2, BRSSN20066110//2, BRSSN20137020//2, BRSSN20142940//1, BRSSN20146100//3, BRSSN20151990//2, BRSSN20169050//2, BRSTN20002200//1, BRTHA20046290//2, BRTHA20046420//5, CTONG10000100//6, CTONG10000940//1, CTONG10001650//1, CTONG20004690//5, CTONG20092570//7, CTONG20092580//2, CTONG20095340//5, CTONG20099380//2, CTONG20103480//1, CTONG20105080//9, CTONG20114290//2, CTONG20114740//3, CTONG20119200//2, CTONG20120770//1, CTONG20124220//3, CTONG20124730//1, CTONG20131490//1, CTONG20132220//1, CTONG20133480//2, CTONG20139340//2, CTONG20149950//1, CTONG20155400//1, CTONG20158660//9, CTONG20161850//2, CTONG20267700//1, D30ST10001090//5, D30ST20036070//1, D30ST20038560//1, D30ST30002580//2, D90ST20002780//2, D90ST20015470//2, D90ST20026730//1, D90ST20040180//7, DFNES20025880//1, FCBBF10000240//8, FCBBF10000380//1, FCBBF10001150//1, FCBBF10001210//2, FCBBF10001550//1, FCBBF10002700//2, FCBBF10003220//1, FCBBF10005460//1, FCBBF20032970//1, FCBBF20042560//3, FCBBF20051220//2, FCBBF30008470//2, FCBBF30012350//1, FCBBF30024750//1, FCBBF30078290//1, FCBBF30086440//3, FCBBF30090690//1, FCBBF30095260//2, FCBBF30123470//3, FCBBF30172550//1, FCBBF30175310//9, FCBBF30190850//1, FCBBF30215060//4, FCBBF30238870//1, FCBBF30251420//1, FCBBF30279030//5, FEBRA20002100//5, FEBRA20037260//1, FEBRA20080810//5, FEBRA20093520//1, FEBRA20095880//1, FEBRA20111460//1, FEBRA20125070//1, FEBRA20130190//1, FEBRA20140100//3, FEBRA20145780//2, FEBRA20211710//1, FEBRA20229630//3, FEBRA20235500//10, HCHON20000380//2, HCHON20007510//1, HCHON20008180//1, HCHON20016650//7, HCHON20035130//1, HCHON20040020//1, HCHON20067700//1, HCHON20068710//4, HEART20003060//1, HEART20005410//1, HEART20034320//2, HEART20049800//1, HEART20072310//2, HHDPC10000830//3, HHDPC20001040//1, HHDPC20.014320//1, HHDPC20034720//1, HHDPC20068620//1, HHDPC20084140//1, HHDPC20091780//2, HLUNG10000550//2, KIDNE20003940//10, KIDNE20007770//2, KIDNE20021910//4, KIDNE20022620//1, KIDNE20100070//2, KIDNE20101510//2, KIDNE20109730//2, KIDNE20121880//5, KIDNE20125630//2, KIDNE20126010//1, KIDNE20130450//2, KIDNE20131580//7, KIDNE20137340//4, KIDNE20181660//1, LIVER20035110//l, LIVER20045650//1, LIVER20062510//1, LIVER20075680//1, LIVER20087060//1, LIVER20091180//1, MESAN20014500//6, MESAN20027090//2, MESAN20038510//1, MESAN20089360//1, MESAN20103120//5, MESAN20115970//4, MESAN20139360//1, MESAN20153910//1, NOVAR20000380//1, NT2NE20010050//1, NT2NE20021620//1, NT2NE20118960//4, NT2NE20131890//1, NT2NE20132170//9, NT2NE20155110//1, NT2NE20156260//1, NT2NE20159740//3, NT2NE20177520//2, NT2RI20023910//2, NT2RI20025400//2, NT2RI20054050//8, NT2RI20076290//8, NT2RI20086220//4, NT2RI20091940//3,-NT2RI20244600//6, NT2RP70072690//1, NT2RP70081610//6, NT2RP70122910//2, NT2RP70125160//3, NT2RP70133740//4, NT2RP70137290//1, NT2RP70179710//1, NT2RP70188020//1, NTONG20028070//1, NTONG20048060//1, NTONG20049910//1, NTONG20051530//1, NTONG20061870//1, NTONG20067830//1, NTONG20092330//2, OCBBF10001750//2, OCBBF20013890//3, OCBBF20023570//1, OCBBF20026630//1, OCBBF20037440//1, OCBBF20050770//1, OCBBF20059560//2, OCBBF20063320//1, OCBBF20072320//1, OCBBF20080050//2, OCBBF20086400//1, OCBBF20086910//1, OCBBF20088140//1, OCBBF20091150//1, OCBBF20107090//2, OCBBF20116850//2, OCBBF20120390//12, OCBBF20130910//2, OCBBF20132850//3, OCBBF20155060//2, OCBBF20178880//1, OCBBF20180120//10, OCBBF20180840//1, PANCR10000910//3, PEBLM20024320//2, PEBLM20040150//2, PEBLM20074370//1, PERIC20004220//4, PLACE60121080//1, PLACE60161600//2, PLACE60177140//6, PROST20005050//1, PROST20050670//1, PROST20107820//4, PROST20116600//2, PROST20120160//1, PROST20127800//3, PROST20146010//3, PROST20164440//3, PROST20169800//1, PROST20170980//1, PROST20191640//1, PUAEN20003740//2, PUAEN20030180//2, SALGL10001710//5, SKMUS20007800//7, SKMUS20011640//3, SKMUS20020840//3, SKMUS20028210//1, SKMUS20028400//1, SKMUS20077400//1, SKNSH20031740//1, SKNSH20051940//1, SKNSH20063040//3, SMINT20011990//1, SMINT20022020//4, SMINT20029760//1, SMINT20040860//7, SMINT20049090//1, SMINT20053870//1, SMINT20095050//2, SMINT20100680//1, SMINT20105330//1, SMINT20144890//1, SMINT20157450//5, SMINT20173240//3, SMINT20178550//3, SMINT20192000//1, SPLEN20003070//2, SPLEN20008740//4, SPLEN20026950//1, SPLEN20029310//3, SPLEN20095810//1, SPLEN20097330//1, SPLEN20118300//9, SPLEN20141360//1, SPLEN20141990//1, SPLEN20144520//3, SPLEN20152760//2, SPLEN20157880//1, SPLEN20165310//1, SPLEN20167200//1, SPLEN20169220//2, SPLEN20169720//1, SPLEN20171890//4, SPLEN20172120//2, SPLEN20186430//6, SPLEN20211570//2, SPLEN20211940//3, SPLEN20213830//2, SPLEN20273950//1, SPLEN20292950//7, SPLEN20293800//4, SPLEN20304950//2, SPLEN20329240//1, STOMA20006780//2, STOMA20008880//1, STOMA20051200//1, STOMA20056670//1, STOMA20062130//1, STOMA20077450//2, STOMA20080500//4, -SYNOV20013560//1, SYNOV30001840//4, TBAES20003150//2, TESOP20005690//3, TESTI20001720//3, TESTI20036380//6, TESTI20037560//1, TESTI20082330//1, TESTI20094120//8, TESTI20110280//1, TESTI20123080//1, TESTI20123560//3, TESTI20128350//1, TESTI20136100//2, TESTI20136710//2, TESTI20143390//8, TESTI20148000//1, TESTI20164100//3, TESTI20193360//1, TESTI20209810//1, TESTI20209990//1, TESTI20214250//2, TESTI20230250//1, TESTI20231940//1, TESTI20237520//2, TESTI20242990//2, TESTI20254220//7, TESTI20254860//1, TESTI20265970//2, TESTI20271850//2, TESTI20272960//8, TESTI20284880//2, TESTI20291310//4, TESTI20291960//5, TESTI20303360//1, TESTI20303420//1, TESTI20307700//2, TESTI20316870//1, TESTI20333000//2, TESTI20347180//6, TESTI20347300//l, TESTI20355020//1, TESTI20357960//1, TESTI20370810//9, TESTI20373820//l, TESTI20383880//1, TESTI20390410//1, TESTI20391770//3, TESTI20393530//1, TESTI20397760//2, TESTI20401280//1, TESTI20422640//2, TESTI20441940//5, TESTI20444130//l, TESTI20449200//6, TESTI20463520//1, TESTI20463580//1, THYMU20027560//4, THYMU20032870//1, THYMU20039810//3, THYMU20100410//2, THYMU20106710//1, THYMU20111830//1, THYMU20141670//1, THYMU20147770//1, THYMU20159430//1, THYMU20161640//4, THYMU20162190//2, THYMU20173980//2, THYMU20208300//l, THYMU20216840//2, THYMU20229220//1, THYMU20241850//2, THYMU20277390//7, TRACH20002870//3, TRACH20003590//l, TRACH20016210//1, TRACH20029540//1, TRACH20033230//6, TRACH20042920//6, TRACH20050040//2, TRACH20068660//6, TRACH20076740//4, TRACH20085400//2, TRACH20085830//1, TRACH20109650//2, TRACH20111130//1, TRACH20128110//5, TRACH20134950//1, TRACH20140820//1, TRACH20145440//1, TRACH20168350//1, UMVEN20000690//l, UTERU20030570//5, UTERU20040610//1, UTERU20055480//2, UTERU20076390//4, UTERU20094350//l, UTERU20135860//2, UTERU20158300//3, UTERU20158800//2, UTERU20161570//6, UTERU20178100//1, UTERU20186740//1

[0307] The Names of clones whose deduced amino acid sequences were detected to have functional domains with Pfam, and the name of hit functional domains are as follows. The search result is indicated as “clone name//functional domain name”. When the clone has multiple hit functional domains, they are listed and demarcated by a double slash mark (//). When the clone has multiple hits of an identical functional domain, each is listed without abridgment. 3NB6910001910//tRNA synthetases class II (A)// tRNA synthetases class II (A)// DHHA1 domain 3NB6920014590//Homeobox domain ADIPS20004250//Zinc finger, C2H2 type// DNA binding domain with preference for// Zinc finger, C2H2 type// Zinc finger, C2H2 type// Zinc finger, C2H2 type// Zinc finger, C2H2 type// TRAF-type zinc finger// Zinc finger, C2H2 type// UvrD/REP helicase// Zinc finger, C2H2 type// Zinc finger, C2H2 type// Zinc finger, C2H2 type ADRGL10001470//Cytochrome P450// Cytochrome P450 ADRGL20011190//Calponin homology (CH) domain// Calponin homology (CH) domain// Pou domain - N-terminal to homeobox domain ADRGL20018300//TPR Domain// TPR Domain// TPR Domain// TPR Domain// PPR repeat// TPR Domain ADRGL20035850//Cytochrome P450 ADRGL20048330//PHD-finger// Rabphilin-3A effector domain// C2 domain// C2 domain ASTRO20008010//Zinc finger, C2H2 type// Zinc finger, C2H2 type// Zinc finger, C2H2 type// Zinc finger, C2H2 type// Zinc finger, C2H2 type ASTR020012490//Eukaryotic initiation factor 1A ASTRO20027430//Leucine Rich Repeat// Leucine Rich Repeat// Leucine Rich Repeat// Leucine Rich Repeat// Leucine Rich Repeat// Leucine Rich Repeat// Leucine Rich Repeat ASTRO20033160//Mitochondrial carrier proteins// Mitochondrial carrier proteins// Mitochondrial carrier proteins ASTR020055750//Collagen triple helix repeat (20 copies)// Heavy-metal- associated domain ASTR020058630//Vacuolar sorting protein 9 (VPS9) domain ASTR020064750//Zinc finger, C2H2 type// Nuclear transition protein 2 ASTR020072210//PDZ domain (Also known as DHR or GLGF). ASTR020084250//KH domain// Zinc finger, C3HC4 type (RING finger) ASTR020105820//FAD binding domain ASTRO20106150//Calpain family cysteine protease// Calpain large subunit, domain III ASTRO20108190//Rap/ran-GAP ASTR020125520//DnaJ domain ASTRO20130500//ThiF family// Repeat in ubiquitin-activating (UBA) pro ASTR020143630//KH domain// Bacterial regulatory proteins, crp family ASTR020155290//TPR Domain// TPR Domain// TPR Domain ASTR020168470//Zinc finger, C2H2 type// Zinc finger, C2H2 type// Zinc finger, C2H2 type// Zinc finger, C2H2 type// Zinc finger, C2H2 type// Zinc finger, C2H2 type// Zinc finger, C2H2 type// TRAF-type zinc finger// Zinc finger, C2H2 type// Transcription factor S-II (TFIIS)// Zinc finger, C2H2 type// Zinc finger, C2H2 type BGGI110001930//UBX domain BGGI120006160//Fumarylacetoacetate (FAA) hydrolase fam BLADE20003400//Zinc finger, C2H2 type// Zinc finger, C2H2 type// Zinc finger, C2H2 type// PHD-finger// Zinc finger, C2H2 type// Zinc finger, C2H2 type lo BLADE20003890//KRAB box// Zinc finger, C2H2 type// Zinc finger, C2H2 type// Src homology domain 2// Zinc finger, C2H2 type// Zinc finger, C2H2 type// Zinc finger, C2H2 type// Zinc finger, C2H2 type// Zinc finger, C2H2 type// Zinc finger, C2H2 type// Zinc finger, C2H2 type// Zinc finger, C2H2 type// Zinc finger, C2H2 type// Src homology domain 2// Zinc finger, C2H2 type// Zinc finger, C2H2 type// Zinc finger, C2H2 type// Zinc finger, C2H2 type// Zinc finger, C2H2 type BNGH420088500//SAM domain (Sterile alpha motif) BRACE20003070//SAM domain (Sterile alpha motif) BRACE20011070//F-box domain. BRACE20027620//Dienelactone hydrolase family// Dienelactone hydrolase family BRACE20038000//ATP synthase, Delta/Epsilon chain// Dual specificity phosphatase, catalytic. d BRACE20039540//Immunoglobulin domain// Adenovirus E3 region protein CR2 BRACE20050900//TPR Domain// TPR Domain// TPR Domain// TPR Domain BRACE20052160//SAM domain (Sterile alpha motif) BRACE20053280//PDZ domain (Also known as DHR or GLGF). BRACE20053480//Ribosomal protein L22p/Ll7e// Glycosyl hydrolases family 38 BRACE20053630//Plant thionins// Mitochondrial carrier proteins// Mitochondrial carrier proteins BRACE20057620//Eukaryotic initiation factor 4E BRACE20058580//L1 (late) protein BRACE20059370//FERM domain (Band 4.1 family) BRACE20060550//Ank repeat// Ank repeat// Ank repeat// PEP-utilizing enzymes BRACE20060720//WD domain, G-beta repeat// WD domain, G-beta repeat BRACE20060890//Zinc finger, C2H2 type// Zinc finger, C2H2 type// Zinc finger, C2H2 type// TRAF-type zinc finger// Zinc finger, C2H2 type// Zinc finger, C2H2 type BRACE20062640//Alanine racemase// RNB-like proteins BRACE20063780//NOLI/NOP2/sun family BRACE20064880//KH domain// KH domain// KH domain BRACE20068590//KRAB box// Zinc finger, C2H2 type// Zinc finger, C2H2 type// Zinc finger, C2H2 type// Zinc finger, C2H2 type// Zinc finger, C2H2 type// Zinc finger, C2H2 type// Zinc finger, C2H2 type// Zinc finger, C2H2 type// Zinc finger, C2H2 type// Zinc finger, C2H2 type// Zinc finger, C2H2 type// Zinc finger, C2H2 type BRACE20096200//Sir2 family// Sir2 family BRACE20107530//short chain dehydrogenase BRACE20115920//Spectrin repeat// Fes/CIP4 homology domain// Interleukin 10 BRACE20148240//Ras family BRACE20151320//Zinc finger, C3HC4 type (RING finger) BRACE20153680//Sir2 family// Ion transport protein BRACE20163350//Immunoglobulin domain// Immunoglobulin domain BRACE20177200//RanBPl domain. BRACE20188470//ABC transporter// Thymidylate kinase BRACE20190040//Integrase DNA binding domain BRACE20192440//Translation initiation factor IF-3 BRACE20223330//3′-5exonuclease// Adenylylsulfate kinase// Protein of unknown function DUF82 BRACE20232840//4Fe-4S binding domain// ABC transporter// ABC transporter// ATPases associated with various cellular act .BRACE20240740//Ribosomal protein L36 BRACE20253330//PDZ domain (Also known as DHR or GLGF). BRACE20269200//Heat-labile enterotoxin alpha chain BRACE20273890//UBA domain BRACE20284100//Polysaccharide lyase family 8 BRACE20286360//Alpha adapt in carboxyl-terminal domain BRALZ20013500//Keratin, high sulfur B2 protein// u-PAR/Ly-6 domain .BRALZ20054710//Zinc finger, C3HC4 type (RING finger)// TRAF-type zinc finger BRALZ20058880//STAT protein BRALZ20077930//Ribosomal protein S27a BRAMY20000520//RNA recognition motif. (a.k.a. RRM, RBD, or RNP domain) BRAMY20002770//DB module BRAMY20025840//Sec7 domain BRAMY20045240//Flagellar L-ring protein BRAMY20054880//Pou domain - N-terminal to homeobox domain BRAMY20103570//DNA binding domain with preference for A/T r BRAMY20104640//Eukaryotic protein kinase domain// Protein kinase C terminal domain BRAMY20111960//Ribosomal protein L36 BRAMY20121620//TPR Domain// TPR Domain// TPR Domain// TPR Domain// PPR repeat BRAMY20124260//ZU5 domain// Death domain BRAMY20148130//WD domain, G-beta repeat// WD domain, G-beta repeat// WD domain, G-beta repeat// WD domain, G-beta repeat// TBC domain BRAMY20153110//ACT domain// Biopterin-dependent aromatic amino acid hydroxylase BRAMY20157820//Kinesin motor domain BRAMY20162510//MAGE family BRAMY20167060//Collagen triple helix repeat (20 copies) BRAMY20174550//ABC transporter transmembrane region.// Phosphoribulokinase// Adenylylsulfate kinase// FtsK/SpoIIIE family// ABC transporter BRAMY20211390//Zinc finger, C3HC4 type (RING finger) BRAMY20211420//Transient receptor// GGL domain BRAMY20213100//LIM domain containing proteins// GATA zinc finger// Paired box domain BRAMY20215230//ribonuclease. BRAMY20217460//EF hand// EF hand// EF hand BRAMY20218250//Ion transport protein// Sir2 family// Ion transport protein BRAMY20240040//Nuclear transition protein 2 BRAMY20245300//Fanconi anaemia group C protein// Metallo-beta-lactamase superfamily BRAMY20248490//Sodium:sulfate symporter transmembrane BRAMY20260910//Zinc finger, C2H2 type// PHD-finger// Zinc finger, C2H2 type// Zinc finger, C2H2 type// Zinc finger, C2H2 type BRAMY20270730//Zinc finger, C2H2 type// Zinc finger, C2H2 type// Transcription factor S-II (TFIIS)// Zinc finger, C2H2 type// Zinc finger, C2H2 type// PHD-finger// Zinc finger, C2H2 type// Zinc finger, C2H2 type// Zinc finger, C2H2 type// Zinc finger, C2H2 type// Zinc finger, C3HC4 type (RING finger)// Zinc finger, C2H2 type// Zinc finger, C2H2 type// Zinc finger, C2H2 type BRAMY20271400//Phorbol esters/diacylglycerol binding dom// PHD-finger BRAMY20277170//K+channel tetramerisation domain// NADH- ubiquinone/plastoquinone oxidoreduc// Ion transport protein// Transmembrane region cyclic Nucleotide G BRAMY20285160//NTR/C345C module BRAWH20002320//Leucine Rich Repeat// Leucine Rich Repeat// Leucine Rich Repeat// Leucine Rich Repeat BRAWH20011710//Ank repeat// Ank repeat// Ank repeat// CAP-Gly domain// CAP- Gly domain BRAWH20012390//EF hand// EF hand// EF hand BRAWH20016620//Eukaryotic protein kinase domain// EIAV coat protein, gp9O BRAWH20018730//Sugar (and other) transporter BRAWH20028110//4Fe-4S binding domain// LIM domain containing proteins// LIM domain containing proteins// LIM domain containing proteins// LIM domain containing proteins// Villin headpiece domain BRAWH20030250//jmjN domain BRAWH20064050//Sushi domain (SCR repeat)// EGF-like domain// Trypsin Inhibitor like cysteine rich domain// EGF-like domain// Granulins// Granulins// EGF-like domain BRAWH20075700//Zinc finger, C2H2 type// Zinc finger, C2H2 type// Zinc finger, C2H2 type// Transcription factor S-II (TFIIS)// Zinc finger, C2H2 type// Zinc finger, C2H2 type// Zinc finger, C2H2 type// Zinc finger, C2H2 type// Zinc finger, C2H2 type BRAWH20096780//KRAB box// Zinc finger, C2H2 type// Zinc finger, C2H2 type// PHD-finger// Zinc finger, C2H2 type// Zinc finger, C2H2 type// Zinc finger, C2H2 type// Zinc finger, C2H2 type// Transcription factor S-II (TFIIS)// Zinc finger, C2H2 type// Zinc finger, C2H2 type// Zinc finger, C2H2 type// Zinc finger, C2H2 type// Zinc finger, C2H2 type// Zinc finger, C2H2 type BRAWH20101360//Hexokinase BRAWH20103290//CRAL/TRIO domain.// Spectrin repeat// Extracellular link domain// RhoGEF domain// PH domain BRAWH20110960//PCI domain BRAWH20112940//Similarity to lectin domain of ricin beta-chain, 3 copies. BRAWH20114000//Glutamate/Leucine/Phenylalanine/Valine dehydrogenase BRAWH20117950//Carboxylesterases BRAWH20118230//Transforming growth factor beta like domain BRAWH20121640//eubacterial secY protein// Transmembrane amino acid transporter protein BRAWH20132190//Acetyltransferase (GNAT) family BRAWH20137480//Villin headpiece domain BRAWH20138660//Adaptor complexes medium subunit family BRAWH20149340//IQ calmodulin-binding motif// RhoGEF domain BRAWH20164460//Sigma-54 interaction domain// ATPases associated with various cellular activities (AAA) BRAWH20171030//Adenylate kinase// NB-ARC domain// ATPases associated with various cellu BRAWH2O185060//Integrase core domain BRCAN10001490//chromo (CHRromatin Organization MOdifier) BRCAN20003460//Thioredoxin BRCAN20071190//Ubiquitin family// UBX domain BRCAN20091560//Rieske [2Fe-2S] domain// Phosphoglucose isomerase// FAD binding domain// Pyridine nucleotide-disulphide oxidoreductase// Phytoene dehydrogenase related enzyme BRCAN20124080//WD domain, G-beta repeat// WD domain, G-beta repeat// WD domain, G-beta repeat// WD domain, G-beta repeat// WD domain, G-beta repeat// WD domain, G-beta repeat// WD domain, G-beta repeat// WD domain, G-beta repeat// WD domain, G-beta repeat BRCAN20273550//FATC domain BRCAN20273640//Formin Homology 2 Domain BRCAN20280210//Zinc finger, C2H2 type// Zinc finger, C2H2 type// Zinc finger, C2H2 type// Zinc finger, C2H2 type// Zinc finger, C2H2 type BRCAN20280360//PAP2 superfamily BRCOC20001860//FliP family// Glycosyl hydrolase family 47 BRCOC20004040//7 transmembrane receptor (rhodopsin family)// Neurohypophysial hormones, C-terminal Domain BRCOC20006370//Plexin repeat BRCOC20008160//Spectrin repeat// Spectrin repeat// Tropomyosins// Spectrin repeat// Adenylate cyclase// Spectrin repeat// FF domain// Spectrin repeat// Spectrin repeat// Spectrin repeat BRCOC20008500//Vacuolar sorting protein 9 (VPS9) domain// Ras association (RalGDS/AF-6) domain BRCOC20023230//Reverse transcriptase (RNA-dependent DNA polymerase) BRCOC20026640//Gag P30 core shell protein BRCOC20027510//Leucine Rich Repeat// Leucine Rich Repeat// Leucine Rich Repeat// Leucine Rich Repeat// Leucine Rich Repeat// Leucine Rich Repeat// Leucine Rich Repeat BRCOC20031250//Triosephosphate isomerase BRCOC20035130//14-3-3 proteins BRCOC20037320//Apolipoprotein A1/A4/E family BRCOC20055420//Helix-loop-helix DNA-binding domain// Myristoyl-CoA BRCOC20074760//Herpesvirus UL25 family// Beige/BEACH domain BRCOC20110100//Integrase core domain BRCOC20121720//PHD-finger BRCOC20144000//Helicases conserved C-terminal domain BRCOC20178270//Zinc finger, C2H2 type// Zinc finger, C2H2 type// Zinc finger, C2H2 type// Zinc finger, C2H2 type// Zinc finger, C2H2 type// Transcription factor S-I1 (TFIIS)// Zinc finger, C2H2 type// Zinc finger, C2H2 type// Zinc finger, C2H2 type BRCOC20178560//LIM domain containing proteins// LIM domain containing proteins// LIM domain containing proteins// Ribosomal protein L24e// LIM domain containing proteins BRHIP10001290//Ribosomal protein S3, C-terminal domai// Similarity to lectin domain of ricin b BRHIP20001630//Protein of unknown function DUFl6 BRHIP20003120//Dehydrins// Reticulon BRHIP20005530//ThiF family BRHIP20096850//ICE-like protease (caspase) p20 domain// Aminotransferases class-I BRHIP20115080//PH domain BRHIP20118910//Fibronectin type I domain BRHIP20119330//KRAB box// Zinc finger, C2H2 type// Zinc finger, C2H2 type// Zinc finger, C2H2 type// Zinc finger, C2H2 type// Zinc finger, C2H2 type// Zinc finger, C2H2 type// Zinc finger, C2H2 type// Zinc finger, C2H2 type// Zinc finger, C2H2 type// Zinc finger, C2H2 type// Zinc finger, C2H2 type// Zinc finger, C2H2 type// Transcription factor S-II (TFIIS)// Zinc finger, C2H2 type// Zinc finger, C2H2 type// Zinc finger, C2H2 type// Zinc finger, C2H2 type// Zinc finger, C2H2 type// Zinc finger, C2H2 type// Zinc finger, C2H2 type// Zinc finger, C2H2 type// TRAF-type zinc finger// Zinc finger, C2H2 type// Zinc finger, C2H2 type// Zinc finger, C2H2 type BRHIP20132860//PDZ domain (Also known as DHR or GLGF). BRHIP20143730//MYND finger BRHIP20153600//RNA recognition motif. (a.k.a. RRM, RBD, or BRHIP20174040//GAF domain// GAF domain// Transposase, Mutator family// 35′- cyclic nucleotide phosphodiesterase BRHIP20176420//RNA recognition motif. (a.k.a. RRM, RBD, or RNP domain) BRHIP20183690//DEAD/DEAH box helicase// Integral membrane protein DUF6// Integral membrane protein DUF7 BRHIP20189980//bZIP transcription factor BRHIP20191860//Helix-loop-helix DNA-binding domain BRHIP20207990//Phorbol esters/diacylglycerol binding dom// Zinc finger, C3HC4 type (RING finger)// PHD-finger BRHIP20222280//Zinc finger, C2H2 type// Zinc finger, C2H2 type// Zinc finger, C2H2 type// Zinc finger, C2H2 type// Zinc finger, C2H2 type// Zinc finger, C2H2 type// Transcription factor S-II (TFIIS)// Zinc finger, C2H2 type// Zinc finger, C2H2 type// Zinc finger, C2H2 type// Zinc finger, C2H2 type// Zinc finger, C2H2 type// Zinc finger, C2H2 type// Zinc finger, C2H2 type// Zinc finger, C2H2 type BRHIP20236950/Outer Capsid protein VP4 (Hemagglutinin) BRHIP20238600//WD domain, G-beta repeat// WD domain, G-beta repeat// WD domain, G-beta repeat// WD domain, G-beta repeat BRHIP20238880//wnt family of developmental signaling protei BRHIP20249110//Hexokinase// Hexokinase BRHIP20252450//Spectrin repeat// Spectrin repeat// Spectrin repeat// Phosphoenolpyruvate carboxykinase// Spectrin repeat// Spectrin repeat// Spectrin repeat// eRFl-like proteins// Spectrin repeat BRHIP20253660//SH3 domain BRHIP20283030//Cadherin domain// Cadherin domain// Cadherin domain// Cadherin domain// Cadherin domain// Cadherin domain// Cadherin domain// Cadherin domain BRHIP20285830//Intermediate filament proteins BRHIP30004570//Sushi domain (SCR repeat)// Sushi domain (SCR repeat)// Sushi domain (SCR repeat)// Sushi domain (SCR repeat) BRHIP30004880//Immunoglobulin domain// Immunoglobulin domain// Immunoglobulin domain// Immunoglobulin domain// Immunoglobulin domain// Immunoglobulin domain// Fibronectin type III domain// Fibronectin type III domain BRSSN20003120//7 transmembrane receptor (metabotropic gluta BRSSN20013420//Histone deacetylase family// Zn-finger in ubiquitin-hydrolases and o BRSSN20014260//Leucine Rich Repeat// Leucine Rich Repeat// Leucine Rich Repeat// Leucine Rich Repeat// Leucine Rich Repeat BRSSN20015790//Pyridoxal-dependent decarboxylase BRSSN20021600//BTB/POZ domain// Kelch motif// Kelch motif// Kelch motif// Kelch motif// Kelch motif// Kelch motif BRSSN20038200//Guanine nucleotide exchange factor for Ras-like GTPases; N- terminal motif// Initiator RepB protein// RasGEF domain BRSSN20039370//KRAB box// Zinc finger, C2H2 type// Zinc finger, C2H2 type BRSSN20046790//Zinc finger, C2H2 type// Zinc finger, C2H2 type// Zinc finger, C2H2 type// Zinc finger, C2H2 type// Zinc finger, C2H2 type// Zinc finger, C2H2 type// Zinc finger, C2H2 type// PHD-finger// Zinc finger, C2H2 type BRSSN20101100//° Cold-shock DNA-binding domain BRSSN20105870//ATPases associated with various cellular activities (AAA) BRSSN20117990//short chain dehydrogenase BRSSN20120810//Trypsin BRSSN20146100//Adenylate and Guanylate cyclase catalytic domain// Adenylate and Guanylate cyclase catalytic domain// Zinc finger, C4 type (two domains)// Adenylate and Guanylate cyclase catalytic domain BRSSN20176820//Wiskott Aldrich syndrome homology region 2 BRSSN20177570//Phosducin BRSSN20187310//Ank repeat// Ank repeat// Ank repeat// Ank repeat// Ank repeat BRSTN10000830//Kelch motif// Kelch motif// Kelch motif// Kelch motif BRSTN20005360//TPR Domain// TPR Domain BRTHA20000570/IReverse transcriptase (RNA-dependent DNA pol BRTHA20004740//Phosphoglycerate kinases// lactate/malate dehydrogenase// Flavoprotein// short chain dehydrogenase// Zinc-binding dehydrogenases BRTHA20046290//Transmembrane 4 family CD34C30004240//RhoGAP domain COLONIOOO1350//Immunoglobulin domain// Immunoglobulin domain// Immunoglobulin domain// Immunoglobulin domain// Immunoglobulin domain CTONG10000220//Leucine Rich Repeat// Leucine Rich Repeat// Leucine Rich Repeat CTONG10000620//Sec7 domain// PH domain// Josephin CTONG10000930//Armadillo/beta-catenin-like repeats CTONG10000940//Ank repeat// Ank repeat// Ank repeat CTONG10002770//Calponin homology (CH) domain// Calponin homology (CH) domain CTONG20009770//Proteasome/cyclosome repeat// Proteasome/cyclosome repeat// Proteasome/cyclosome repeat// Proteasome/cyclosome repeat// Proteasome/cyclosome repeat// Proteasome/cyclosome repeat// Proteasome/cyclosome repeat CTONG20014280//WD domain, G-beta repeat// WD domain, G-beta repeat// WD domain, G-beta repeat// WD domain, G-beta repeat// WD domain, G-beta repeat// WD domain, G-beta repeat// WD domain, G-beta repeat CTONG20027090//Glypican// Leucine Rich Repeat// Leucine Rich Repeat CTONG20050280//KRAB box// Zinc finger, C2H2 type// Zinc finger, C2H2 type// Zinc finger, C2H2 type// Zinc finger, C2H2 type// Zinc finger, C2H2 type// Zinc finger, C2H2 type// TRAF-type zinc finger// Zinc finger, C2H2 type// Zinc finger, C2H2 type// Zinc finger, C2H2 type// Zinc finger, C2H2 type// Zinc finger, C2H2 type CTONG20075860//Ribulose bisphosphate carboxylase, smal CTONG20076130//Hepatitis C virus non-structural protein NS2 CTONG20085950//SCAN domain// Zinc finger, C2H2 type// Zinc finger, C2H2 type// Zinc finger, C2H2 type// Zinc finger, C2H2 type// Zinc finger, C2H2 type// Zinc finger, C2H2 type CTONG20092570//Integral membrane protein DUF6// Uncharacterized protein family UPF0005 CTONG20092700//BTB/POZ domain CTONG20093950//Zinc finger, C2H2 type// Zinc finger, C2H2 type// Zinc finger, C2H2 type// Zinc finger, C2H2 type// Zinc finger, C2H2 type// Zinc finger, C2H2 type// Zinc finger, C2H2 type CTONG20095340//El-E2 ATPase CTONG20096750//Disintegrin CTONG20098440//Acyltransferase CTONG20099550//GGL domain CTONG20105080//Integral membrane protein DUF6 CTONG20106520//Pyridoxal-phosphate dependent enzyme CTONG20114290//Apolipoprotein Al/A4/E family CTONG20118150//WD domain, G-beta repeat// WD domain, G-beta repeat// WD domain, G-beta repeat// WD domain, G-beta repeat// WD domain, G-beta repeat// WD domain, G-beta repeat// WD domain, G-beta repeat// WD domain, G-beta repeat// WD domain, G-beta repeat// WD domain, G-beta repeat// WD domain, G- beta repeat CTONG20118250//Eukaryotic-type carbonic anhydrase CTONG20121010//Zinc finger, C2H2 type// CONSTANS family zinc finger// Zinc finger, C2H2 type// Zinc finger, C2H2 type// Transcription factor S-II (TFIIS)// Zinc finger, C2H2 type// Zinc finger, C2H2 type// Zinc finger, C2H2 type// Zinc finger, C2H2 type// Zinc finger, C2H2 type// Zinc finger, C2H2 type// Zinc finger, C2H2 type// Zinc finger, C2H2 type// Zinc finger, C2H2 type CTONG20121580//Kinesin motor domain// FHA domain// Histidine carboxylase PI chain CTONG20124010//WD domain, G-beta repeat// WD domain, G-beta repeat// WD domain, G-beta repeat// WD domain, G-beta repeat// WD domain, G-beta repeat CTONG20125640//Ribosomal protein LlO// 60s Acidic ribosomal protein CTONG20128430//Beta/Gamma crystallin// Beta/Gamma crystallin// Beta/Gamma crystallin// Beta/Gamma crystallin// Beta/Gamma crystallin// Similarity to tectin domain of ricin b CTONG20129960//F-box domain.// UvrD/REP helicase// UvrD/REP helicase// Viral (Superfamily 1) RNA helicase CTONG20131560//PDZ domain (Also known as DHR or GLGF). CTONG20133390//Zinc finger, C2H2 type// Transcription factor S-II (TFIIS)// Zinc finger, C2H2 type// Zinc finger, C2H2 type// Zinc finger, C2H2 type// Zinc finger, C2H2 type// Zinc finger, C2H2 type// Zinc finger, C2H2 type// Zinc finger, C2H2 type// Zinc finger, C2H2 type// Zinc finger, C2H2 type// Zinc finger, C3HC4 type,(RING finger)// Zinc finger, C2H2 type// Zinc finger, C2H2 type CTONG20133520//KRAB box// Zinc finger, C2H2 type// Zinc finger, C2H2 type// Zinc finger, C2H2 type// Zinc finger, C2H2 type// Zinc finger, C2H2 type// Zinc finger, C2H2 type// Zinc finger, C2H2 type// Zinc finger, C2H2 type CTONG20139860//Ank repeat// Ank repeat// Ank repeat CTONG20140580//Domain of unknown function DUF25// SNF2 and others N-terminal domain// SNF2 and others N-terminal domain// Small cytokines (intecrine/chemokine), inter CTONG20143690//MYND finger CTONG20146300//Reverse transcriptase (RNA-dependent DNA pol CTONG20149460//BTB/POZ domain// Kelch motif// Kelch motif// Kelch motif// Domain of unknown function// Kelch motif// Kelch motif// Kelch motif CTONG20153300//C.elegans Srg family integral membrane prote// TBC domain CTONG20153580//F-box domain.// Leucine Rich Repeat// Leucine Rich Repeat// Leucine Rich Repeat// Leucine Rich Repeat// Leucine Rich Repeat CTONG20155180//RNA helicase CTONG20156780//RNA recognition motif. (a.k.a. RRM, RBD, or RNP domain) CTONG20158040//UTP--glucose-l-phosphate uridylyltransferase CTONG20158660//Latrophilin/CL-l-like GPS domain// 7 transmembrane receptor (Secretin family) CTONG20159530//Glypican CTONG20160560//DNA binding domain with preference for A/T rich regions CTONG20161850//Immunoglobulin domain CTONG20165050//Keratin, high sulfur B2 protein CTONG20186320//Kelch motif// Kelch motif// Kelch motif// Kelch motif CTONG20200310//RNB-like proteins D30ST20006180//Dual specificity phosphatase, catalytic domain D30ST20036070//Leucine Rich Repeat D90ST20023970//Glycosyl hydrolases family 18// Glycosyl hydrolases family 18 D90ST20026730//Leucine Rich Repeat// Leucine Rich Repeat// Leucine Rich Repeat// Leucine Rich Repeat// Leucine Rich Repeat// Leucine Rich Repeat// Leucine Rich Repeat// Leucine Rich Repeat// Leucine Rich Repeat D90ST20033970//KRAB box// Zinc finger, C2H2 type// Zinc finger, C2H2 type// PHD-finger// Zinc finger, C2H2 type// Zinc finger, C2H2 type// Zinc finger, C2H2 type// Zinc finger, C2H2 type// Zinc finger, C2H2 type// Zinc finger, C2H2 type// Zinc finger, C2H2 type// Zinc finger, C2H2 type// Zinc finger, C2H2 type// Zinc finger, C2H2 type// Zinc finger, C2H2 type// Zinc finger, C2H2 type// Putative zinc finger in N-recognin// Zinc finger, C2H2 type// Zinc finger, C2H2 type D90ST20035940//Mitochondrial carrier proteins// Mitochondrial carrier proteins D90ST20040180//7 transmembrane receptor (rhodopsin family) DFNES20037420//Elongation factor Tu family DFNES20071130//Phosphotriesterase family// Phosphotriesterase family// Phosphotriesterase family FCBBF10000240//Phosphoenolpyruvate carboxylase// Bacterial Cytochrome Ubiquinol Oxidas// Glycosyl transferase FCBBF10000630//Molluscan rhodopsin C-terminal tail// WW domain FCBBF10001150//Cadherin domain// Cadherin domain// Cadherin domain// Cadherin domain// Cadherin domain FCBBF10001210//Immunoglobulin domain// Immunoglobulin domain FCBBF10001550//Glutamate/Leucine/Phenylalanine/Valine dehydrogenase FCBBFIO001710//DM DNA binding domain// Zinc finger, C2H2 type// Zinc finger, C2H2 type// Zinc finger, C2H2 type// Zinc finger, C2H2 type// Zinc finger, C2H2 type// Zinc finger, C2H2 type// Zinc finger, C2H2 type// Zinc finger, C2H2 type// Zinc finger, C2H2 type// Zinc finger, C2H2 type// Zinc finger, C2H2 type FCBBF10002800//Immunoglobulin domain// Immunoglobulin domain// Immunoglobulin domain// Immunoglobulin domain// Immunoglobulin domain FCBBF10003670//Ubiquitin carboxyl-terminal hydrolases famil FCBBF10003770//PDZ domain (Also known as DHR or GLGF).// PDZ domain (Also known as DHR or GLGF).// pfkB family carbohydrate kinase// PDZ domain (Also known as DHR or GLGF).// ThiC family// PDZ domain (Also known as DHR or GLGF).// PDZ domain (Also known as DHR or GLGF).// PDZ domain (Also known as DHR or GLGF).// TIR domain FCBBF10004120//RNA recognition motif. (a.k.a. RRM, RBD, or FCBBF10004370//KRAB box// Zinc finger, C2H2 type// Ribosomal protein L37e// Zinc finger, C2H2 type// Zinc finger, C2H2 type// Zinc finger, C2H2 type// Zinc finger, C2H2 type// Zinc finger, C2H2 type// Zinc finger, C2H2 type// Zinc finger, C2H2 type// Zinc finger, C2H2 type// Zinc finger, C2H2 type FCBBF10005060//CRAL/TRIO domain. FCBBF10005460//Immunoglobulin domain// Immunoglobulin domain// Immunoglobulin domain// Fibronectin type III domain// Fibronectin type III domain FCBBF10005500//Keratin, high sulfur B2 protein FCBBF10005740//Mitochondrial carrier proteins// Mitochondrial carrier proteins FCBBF20014270//Acyl CoA binding protein FCBBF20042170//Fibrillar collagen C-terminal domain FCBBF20049300//Olfactomedin-like domain FCBBF20059090//Zinc finger, C2H2 type FCBBF20064520//RNA recognition motif. (a.k.a. RRM, RBD, or FCBBF20067810//Nerve growth factor family// GTP1/OBG family// GTP1/OBG family// GTPase of unknown function// ADP-ribosylation factor family// Ras family FCBBF20068820//Zinc finger, C2H2 type// Zinc finger, C2H2 type// Zinc finger, C2H2 type// Zinc finger, C2H2 type// Zinc finger, C2H2 type// Zinc finger, C2H2 type FCBBF30010810//KRAB box// Rieske [2Fe-2S] domain// Zinc finger, C2H2 type// Zinc finger, C2H2 type// PHD-finger// Zinc finger, C2H2 type// Zinc finger, C2H2 type// Zinc finger, C2H2 type// Zinc finger, C2H2 type// Zinc finger, C2H2 type// Zinc finger, C2H2 type FCBBF30012350//Eukaryotic protein kinase domain FCBBF30012810//Ubiquitin carboxyl-terminal hydrolases famil FCBBF30015940//Methyl-accepting chemotaxis protein (MCP) signaling domain FCBBF30016320//SecA protein, amino terminal region FCBBF30018550//Oxysterol-binding protein FCBBF30025560//Prolyl oligopeptidase family// Pou domain - N-terminal to homeobox doma// Homeobox domain FCBBF30033050//Sm protein FCBBF30039020//Herpesvirus UL6 like// Growth-Arrest-Specific Protein 2 Domain FCBBF30049550//Ank repeat// Ank repeat// Ank repeat// Ank repeat// Ank repeat// Ank repeat// Glutamine amidotransferases class-II// Ank repeat// Ank repeat// Ank repeat// Ank repeat// Ank repeat// Ank repeat// Ank repeat// Ank repeat// Ank repeat// Ank repeat// Ank repeat// Ank repeat// Ank repeat// Ank repeat// Ank repeat// Ank repeat// ZU5 domain FCBBF30054440//PLAT/LH2 domain FCBBF30057290//KRAB box// Zinc finger, C2H2 type// Zinc finger, C2H2 type// Zinc finger, C2H2 type// Zinc finger, C2H2 type// Zinc finger, C2H2 type// Zinc finger, C2H2 type// Zinc finger, C2H2 type// Zinc finger, C2H2 type// Zinc finger, C2H2 type// Zinc finger, C2H2 type// Zinc finger, C2H2 type// Zinc finger, C2H2 type// Zinc finger, C2H2 type// Zinc finger, C2H2 type// Zinc finger, C2H2 type// Zinc finger, C2H2 type// Zinc finger, C2H2 type// Zinc finger, C2H2 type// Zinc finger, C2H2 type FCBBF30078290//DNA binding domain with preference for A/T r FCBBF30086440//Pilin (bacterial filament) FCBBF30090690//Leucine rich repeat N-terminal domain// Leucine Rich Repeat// Leucine Rich Repeat// Leucine Rich Repeat// Leucine Rich Repeat// Leucine Rich Repeat// Leucine rich repeat C-terminal domain FCBBF30095260//DHHC zinc finger domain FCBBF30129630//Zinc finger, C2H2 type// Zinc finger, C2H2 type// Zinc finger, C2H2 type// Zinc finger, C2H2 type// Zinc finger, C2H2 type// Zinc finger, C2H2 type// Zinc finger, C2H2 type// Zinc finger, C2H2 type FCBBF30175310//Clq domain// CDP-alcohol phosphatidyltransferase FCBBF30190850//Sushi domain (SCR repeat)// Sushi domain (SCR repeat)// Sushi domain (SCR repeat)// Keratin, high sulfur B2 protein// Sushi domain (SCR repeat)// Phosphate transporter family FCBBF30195640//PHD-finger// CONSTANS family zinc finger// PHD-finger// PHD- finger// Hsp2O/alpha crystallin family FCBBF30225660//Ank repeat// Ank repeat// Ank repeat// K+channel tetramerisation domain// BTB/POZ domain FCBBF30233680//GlO protein FCBBF30238870//Laminin G domain// Thrombospondin N-terminal -like domains// Laminin G domain// von Willebrand factor type C domain// von Willebrand factor type C domain// EGF-like domain// EB module// EGF-like domain// EGF- like domain// Trypsin Inhibitor like cysteine rich domain// Metallothionein// EGF-like domain// EGF-like domain// EGF-like domain FCBBF30240960//Zinc finger, C2H2 type// Zinc finger, C2H2 type// Zinc finger, C2H2 type// Zinc finger, C2H2 type// Zinc finger, C2H2 type// Zinc finger, C2H2 type// PHD-finger// Zinc finger, C2H2 type// Zinc finger, C2H2 type// Zinc finger, C2H2 type// Zinc finger, C2H2 type FCBBF30246630//Leucine Rich Repeat// Leucine Rich Repeat FCBBF30247930//Uncharacterized protein family UPF0004 FCBBF30262510//Ank repeat// Fibronectin type III domain FCBBF30281880//Regulator of G protein signaling domain// PX domain FCBBF30285280//Keratin, high sulfur B2 protein// Bacterial regulatory proteins, gntR family FCBBF40001730//WD domain, G-beta repeat// WD domain, G-beta repeat// WD domain, G-beta repeat// WD domain, G-beta repeat// WD domain, G-beta repeat// WD domain, G-beta repeat FEBRAl0001880//Eukaryotic protein kinase domain// Eukaryotic protein kinase domain FEBRA10001900//Zinc finger, C2H2 type FEBRA20004620//Rap/ran-GAP FEBRA20007620//Bacterial type II secretion system protein// DEAD/DEAH box helicase// Helicases conserved C-terminal domain FEBRA20018690//Zinc finger, C2H2 type FEBRA20024100//Ank repeat// Ank repeat// Myosin head (motor domain)// Myosin head (motor domain) FEBRA20025270//Sulfotransferase proteins FEBRA20026110//Dictyostelium (slime mold) repeats// Zinc finger, C2H2 type// Dictyostelium (slime mold) repeats// Zinc finger, C2H2 type// Dictyostelium (slime mold) repeats// Zinc finger, C2H2 type// Zinc finger, C2H2 type// Zinc finger, C2H2 type// Zinc finger, C2H2 type// Zinc finger, C2H2 type// Zinc finger, C2H2 type// Zinc finger, C2H2 type// Zinc finger, C2H2 type// Zinc finger, C2H2 type// Zinc finger, C2H2 type// Zinc finger, C2H2 type// Zinc finger, C2H2 type// Dictyostelium (slime mold) repeats// Zinc finger, C2H2 type// Zinc finger, C2H2 type// Zinc finger, C2H2 type// Zinc finger, C2H2 type// Dictyostelium (slime mold) repeats// Zinc finger, C2H2 type// Zinc finger, C2H2 type// Dictyostelium (slime mold) repeats// Zinc finger, C2H2 type FEBRA20034680//Zinc finger, C2H2 type// Zinc finger, C2H2 type// Zinc finger, C2H2 type// DnaJ central domain (4 repeats)// Zinc finger, C2H2 type// Zinc finger, C2H2 type// Zinc finger, C2H2 type// Zinc finger, C2H2 type/I Zinc finger, C2H2 type// Zinc finger, C2H2 type// Zinc finger, C2H2 type// PHD- finger// Zinc finger, C2H2 type FEBRA20040530//KRAB box// Zinc finger, C2H2 type// Transcription factor S-II (TFIIS)// Zinc finger, C2H2 type// Zinc finger, C2H2 type// Zinc finger, C2H2 type// Bacterial dnaA protein// Zinc finger, C2H2 type// Zinc finger, C2H2 type// Zinc finger, C2H2 type// Zinc finger, C2H2 type// Zinc finger, C2H2 type FEBRA20080810//POT family FEBRA20082010//KRAB box// Zinc finger, C2H2 type// PHD-finger// Zinc finger, C2H2 type// Zinc finger, C2H2 type// Zinc finger, C2H2 type// Zinc finger, C2H2 type// Zinc finger, C2H2 type// Zinc finger, C2H2 type// Zinc finger, C2H2 type// Zinc finger, C2H2 type// Zinc finger, C2H2 type FEBRA20086620//Olfactomedin-like domain FEBRA20088360//Alpha adaptin carboxyl-terminal domai FEBRA20090290//Zinc finger, C3HC4 type (RING finger) FEBRA20092890//Immunoglobulin domain// Immunoglobulin domain// Immunoglobulin domain// Immunoglobulin domain// Immunoglobulin domain// Immunoglobulin domain// Fibronectin type III domain FEBRA20097310//SAP domain// RNA recognition motif. (a.k.a. RRM, RBD, or FEBRA20111460//Hemagglutinin FEBRA20130190//Galactosyltransferase// Fringe-like FEBRA20132740//PH domain FEBRA20144170//Eukaryotic protein kinase domain// Protein kinase C terminal domain// Eukaryotic protein kinase domain FEBRA20167390//Sialyltransferase family FEBRA20171380//KRAB box// wnt family of developmental signaling protei// Zinc finger, C2H2 type// Zinc finger, C2H2 type// Zinc finger, C2H2 type// Zinc finger, C2H2 type// Zinc finger, C2H2 type// Transcription factor S-II (TFIIS)// Zinc finger, C2H2 type// Zinc finger, C2H2 type// Zinc finger, C2H2 type// PHD-finger// Zinc finger, C2H2 type// Putative zinc finger in N- recognin// Zinc finger, C2H2 type// Zinc finger, C2H2 type// Zinc finger, C2H2 type FEBRA20184330//PDZ domain (Also known as DHR or GLGF). FEBRA20192420//Cyclin-dependent kinase inhibitor// IQ calmodulin-binding motif// IQ calmodulin-binding motif// IQ calmodulin-binding motif// IQ calmodulin-binding motif// IQ calmodulin-binding motif FEBRA20195820//Zinc finger, C2H2 type// Zinc finger, C2H2 type// Zinc finger, C2H2 type// TRAF-type zinc finger// Zinc finger, C2H2 type FEBRA20196370//Cyclin-dependent kinase inhibitor// IQ calmodulin-binding motif// IQ calmodulin-binding motif// IQ calmodulin-binding motif// IQ calmodulin-binding motif// IQ calmodulin-binding motif FEBRA20196630//DEAD/DEAH box helicase// Helicases conserved C-terminal domain FEBRA20214970//Reverse transcriptase (RNA-dependent DNA pol FEBRA20222040//bZIP transcription factor// K-box region FEBRA20223220//EGF-like domain// EGF-like domain// Cadherin domain FEBRA20229630//NADH-Ubiquinone/plastoquinone (complex I) FEBRA20235500//Sodium Bile acid symporter family// ABC 3 transport family FEBRA20237640//SAM domain (Sterile alpha motif) FEHRT20003250//Phosphatidylinositol 3- and 4-kinases HCASMl0000500//Ribonucleotide reductases// Nucleotidyltransferase domain HCHONlO001760//Histone deacetylase family HCHON20000380//Glucose-6-phosphate dehydrogenase HCHON20003220//Formyl transferase// Phosphopantetheine attachment site// Protein of unknown function DUF132// Aldehyde dehydrogenase family HCHON20007510//Phosphotyrosine interaction domain (PTB/PID)// TBC domain HCHON20008150//RNA recognition motif. (a.k.a. RRM, RBD, or HCHON20008320//Glutamine synthetase// Zinc finger, C2H2 type// Zinc finger, C2H2 type// Zinc finger, C2H2 type// Zinc finger, C2H2 type// Zinc finger, C2H2 type// Zinc finger, C2H2 type// Zinc finger, C2H2 type// Zinc finger, C2H2 type// Zinc finger, C2H2 type// Transcription factor S-Il (TFIIS)// Zinc finger, C2H2 type// Zinc finger, C2H2 type// PHD-finger// Zinc finger, C2H2 type HCHON20009560//Zinc finger, C2H2 type// Zinc finger, C2H2 type// Zinc finger, C2H2 type// Zinc finger, C2H2 type HCHON20010990//TPR Domain HCHON20015350//FtsJ cell division protein HCHON20015980//FG-GAP repeat// von Willebrand factor type A domain HCHON20016040//Insulin-like growth factor binding proteins HCHON20016650//Leucine rich repeat C-terminal domain// Immunoglobulin domain// Latrophilin/CL-l-like GPS domain// 7 transmembrane receptor (Secretin family) HCHON20035130//Zinc finger, C2H2 type// Zinc finger, C2H2 type HCHON20036420//Death effector domain HCHON20040020//Syntaxin HCHON20059870//Bromodomain// Bromodomain HCHON20064590//Alpha-2-macroglobulin family N-terminal regi// Alpha-2- macroglobulin family N-terminal regi HCHON2006841Q//IQ calmodulin-binding motif// IQ calmodulin-binding motif// IQ calmodulin-binding motif// IQ calmodulin-binding motif// IQ calmodulin- binding motif// IQ calmodulin-binding motif// IQ calmodulin-binding motif// IQ calmodulin-binding motif// IQ calmodulin-binding motif// IQ calmodulin- binding motif// IQ calmodulin-binding motif// IQ calmodulin-binding motif// IQ calmodulin-binding motif// IQ calmodulin-binding motif// IQ calmodulin- binding motif// IQ calmodulin-binding motif// IQ calmodulin-binding motif// IQ calmodulin-binding motif// IQ calmodulin-binding motif// IQ calmodulin- binding motif// IQ calmodulin-binding motif// IQ calmodulin-binding motif// IQ calmodulin-binding motif// IQ calmodulin-binding motif// IQ calmodulin- binding motif// IQ calmodulin-binding motif// IQ calmodulin-binding motif// IQ calmodulin-binding motif// IQ calmodulin-binding motif// IQ calmodulin- binding motif// IQ calmodulin-binding motif HCHON20086720//Insulin-like growth factor binding pr// Thyroglobulin type-i repeat HCHON20100740//EGF-like domain// F5/8 type C domain// F5/8 type C domain HEART20003060//Immunoglobulin domain// Immunoglobulin domain HEART20005410//u-PAR/Ly-6 domain HEART20017730//Ank repeat// Ank repeat// Ank repeat// Ank repeat// Ank repeat// Ank repeat// Ank repeat HEART20025980//Calponin homology (CH) domain HEART20034320//Glycosyl hydrolase family 9// Glycosyl hydrolase family 9 HEART20061950//PDZ domain (Also known as DHR or GLGF). HEART20077670//Protein phosphatase 2A regulatory B subunit HEART20083640//NAD-dependent DNA ligase HEART20090000//Inositol polyphosphate phosphatase family, c HHDPC10000830//Zinc finger, C3HC4 type (RING finger) HHDPC20014320//Reprolysin family propeptide I5HHDPC20031130//Zinc finger, C2H2 type// Zinc finger, C2H2 type// Zinc finger, C2H2 type// Zinc finger, C2H2 type// Zinc finger, C2H2 type// Zinc finger, C2H2 type// Zinc finger, C2H2 type// Zinc finger, C2H2 type// Zinc finger, C2H2 type// Zinc finger, C2H2 type// Zinc finger, C2H2 type// Zinc finger, C2H2 type// Zinc finger, C2H2 type// Zinc finger, C2H2 type// Zinc finger, C2H2 type// Zinc finger, C2H2 type// Zinc finger, C2H2 type// Zinc finger, C2H2 type// Zinc finger, C2H2 type HHDPC20034390//Cereal trypsin/alpha-amylase inhibito HHDPC20034720//Glutathione S-transferases. HHDPC20068620//Immunoglobulin domain// Immunoglobulin domain HHDPC20091780//CUB domain// F5/8 type C domain HHDPC20092080//Thyroglobulin type-i repeat HLUNG20016330//Methyl-accepting chemotaxis protein (MCP) s/I PH domain// PH domain// Methanol dehydrogenase beta subunit HLUNG20017120//Peptidyl-tRNA hydrolase domain HLUNG20023340//KH domain HLUNG20033780//Birnavirus VP3 protein// RhoGEF domain// PH domain// SH3 domain IMR3220002430//WD domain, G-beta repeat// WD domain, G-beta repeat// WD domain, G-beta repeat// WD domain, G-beta repeat// WD domain, G-beta repeat KIDNE20002520//tRNA synthetases class I (E and Q)// tRNA synthetases class I (K)// tRNA synthetases class I (E and Q) KIDNE20003940//Phosphotransferase system, EIIC// FecCD transport family// ABC 3 transport family KIDNE20007770//Immunoglobulin domain// Immunoglobulin domain// Immunoglobulin domain KIDNE20008010//Dihydropyridine sensitive L-type calcium KIDNE20009470//G-patch domain// Peptidase family MI KIDNE20017130//MYND finger// DM DNA binding domain// Ribosomal protein L36 KIDNE20020150//Ribosomal protein S13/S18// Hsp7O protein KIDNE20021680//3-hydroxyacyl-CoA dehydrogenase KIDNE20022620//Glycosyl transferase family 8 KIDNE20024830//C2 domain// C2 domain KIDNE20027250//Zinc finger, C2H2 type// Zinc finger, C2H2 type// Zinc finger, C2H2 type// Zinc finger, C2H2 type KIDNE20027950//KRAB box KIDNE20028390//Galactose-l-phosphate uridyl transfer// Galactose-l-phosphate uridyl transfer KIDNE20028720//ATP synthase (C/AC39) subunit KIDNE20028830//K-box region KIDNE20100070//AMP-binding enzyme KIDNE20101510//EGF-like domain// Trypsin Inhibitor like cysteine rich d// EGF-like domain// Keratin, high sulfur B2 protein// Zona pellucida-like domain KIDNE20102710//Ank repeat// Ank repeat// Ank repeat// Ank repeat// Ank repeat KIDNE20107390//Histone-like transcription factor (CBF/// GHMP kinases putative ATP-binding prote KIDNE20107620//Eukaryotic protein kinase domain// Dihydropyridine sensitive L-type calcium KIDNE20109730//Sodium KIDNE20109890//WD domain, G-beta repeat// WD domain, G-beta repeat// WD domain, G-beta repeat// WD domain, G-beta repeat// WD domain, G-beta repeat// Zinc finger, C4 type (two domains)// WD domain, G-beta repeat// WD domain, G- beta repeat KIDNE20121880//PMP-22/EMP/MP20/Claudin family KIDNE20125630//ATPlG1/PLM/MAT8 family KIDNE20127100//Kelch motif// Kelch motif// Kelch motif KIDNE20127750//Bacterial regulatory proteins, tetR family KIDNE20137340//Uncharacterized membrane protein family UPFO KIDNE20182690//BAH domain// ELM2 domain LIVER10004790//EF hand LIVER20002160//Hsp7O protein LIVER20035680//UvrD/REP helicase LIVER20055440//RhoGAP domain LIVER20064690//Serpins (serine protease inhibitors) LIVER20080530//Ank repeat// Ank repeat// Ank repeat// SAM domain (Sterile alpha motif) LIVER20087060//Guanylate-binding protein LIVER20087510//PHD-finger MAMGL10000830//LysM domain MESAN10001260//von Willebrand factor type C domain// von Willebrand factor type C domain// von Willebrand factor type C domain// von Willebrand factor type C domain// TILa domain// von Willebrand factor type C domain// Keratin, high sulfur B2 protein// PEP-utilizing enzymes// von Willebrand factor type D domain// Plant PEC family metallothionein// Trypsin Inhibitor like cysteine rich MESAN20029400//Zinc finger, C3HC4 type (RING finger)// RNA polymerases M/15 Kd subunits MESAN20031900//Zinc finger, C3HC4 type (RING finger)// Peroxidase// Zinc finger, C3HC4 type (RING finger)// B-box zinc finger.// Fibronectin type III domain MESAN20035290//FYVE zinc finger MESAN20036460//Corticotropin-releasing factor family MESAN20038510//Oxidoreductase molybdopterin binding d MESAN20101140//LIM domain containing proteins MESAN20103120//Sodium/calcium exchanger protein MESAN20125860//Transferrin MESAN20127350//Zinc knuckle MESAN20130220//chromo (CHRromatin Organization MOdifier)// Enoyl-CoA hydratase/isomerase family MESAN20136110//KH domain// KH domain// Zinc finger, C3HC4 type (RING finger) MESAN20141920//Troponin// Tropomyosins// Borrelia ORF-A MESAN20154010//Tryptophan synthase alpha chain// Ribulose-phosphate 3 epimerase family// Indole-3-glycerol phosphate synthases MESAN20171520//PH domain MESAN20174170//Regulator of G protein signaling domain MESAN20186700//Hepatitis C virus RNA dependent RNA polymerase NOVAR10000150//Cytosolic long-chain acyl-CoA thioester hydrolase NT2NE20010490//Zinc finger, C2H2 type// Zinc finger, C2H2 type// Zinc finger// Zinc finger, C2H2 type// Zinc finger, C2H2 type// Zinc finger, C2H2 type// Zinc finger, C2H2 type// Zinc finger, C2H2 type// Zinc finger, C2H2 type// Transcription factor S-II (TFIIS)// Zinc finger, C2H2 type// Zinc finger, C2H2 type// DM DNA binding domain// Zinc finger, C2H2 type// PHD- finger// Zinc finger, C2H2 type// Zinc finger, C2H2 type NT2NE20021620//Vacuolar sorting protein 9 (VPS9) domain NT2NE20080170//CRAL/TRIO domain. NT2NE20089970//KRAB box NT2NE20118960//Gram-negative pili assembly chaperone NT2NE20125050//Ezrin/radixin/moesin family NT2NE20130190//Zinc finger, C2H2 type NT2NE20132170//GNS1/SUR4 family// Transmembrane amino acid transporter protein NT2NE20142210//PAS domain// PAS domain NT2NE20157470//von Willebrand factor type A domain// Trypsin NT2NE20158600//Ank repeat// Ank repeat NT2NE20177520//Sushi domain (SCR repeat)// Sushi domain (SCR repeat)// Sushi domain (SCR repeat)// Sushi domain (SCR repeat) NT2NE20181650//Src homology domain 2 NT2NE20183760//Calcitonin / CGRP / IAPP family NT2NE20184900//FF domain NT2RI20001330//Ank repeat// Ank repeat NT2RI20003480//Glypican NT2RI20005750//Cell division protein// Sigma-54 interaction domain// ADP- ribosylation factor family// ABC transporter// Ras family NT2RI20009870//Fringe-like NT2RI20025640//Reverse transcriptase (RNA-dependent DNA pol NT2RI20040930//Mitochondrial carrier proteins// Mitochondrial carrier proteins NT2RI20040990//Ank repeat// Ank repeat// Ank repeat// Ank repeat// Ank repeat// Ank repeat// Ank repeat NT2RI20046080//recA bacterial DNA recombination proteins NT2RI20048840//ADP-ribosylation factor family// G-protein alpha subunit NT2RI20054050//HSF-type DNA-binding domain NT2RI20056700//Spectrin repeat// Apolipoprotein Al/A4/E family// Olfactomedin-like domain NT2RI20091730//Molluscan rhodopsin C-terminal tail NT2RI20240080//TPR Domain// TPR Domain// TPR Domain NT2RI20244600//PAP2 superfamily NT2RI20273230//DEAD/DEAH box helicase NT2RP60000770//Zinc finger, C2H2 type// Zinc finger, C2H2 type// TRAF-type zinc finger// Zinc finger, C2H2 type// Zinc finger, C2H2 type// Zinc finger, C2H2 type// Zinc finger, C2H2 type// Zinc finger, C2H2 type NT2RP60000850//C2 domain NT2RP70027380//PX domain// SH3 domain// RhoGAP domain NT2RP70032610//Peptidase family M20/M25/M40// Enol-ase NT2RP70036880//TBC domain NT2RP70043480//KRAB box// Zinc finger, C2H2 type// Zinc finger, C2H2 type// Zinc finger, C2H2 type// Zinc finger, C2H2 type// Zinc finger, C2H2 type// Zinc finger, C2H2 type// Zinc finger, C2H2 type// Transcription factor S-Il (TFIIS)// Zinc finger, C2H2 type// Zinc finger, C2H2 type// Zinc finger, C2H2 type// Zinc finger, C2H2 type// Zinc finger, C2H2 type// Zinc finger, C2H2 type// Zinc finger, C2H2 type// PHD-finger// Zinc finger,-C2H2 type// Zinc finger, C2H2 type NT2RP70044280//RNA recognition motif. (a.k.a. RRM, RBD, or RNP domain) NT2RP70062230//Zinc finger, C2H2 type// Zinc finger, C2H2 type// Pancreatic hormone peptides// Zinc finger, C2H2 type// Zinc finger, C2H2 type// Zinc finger, C2H2 type NT2RP70063950//RhoGEF domain// Extracellular link domain// PH domain NT2RP70078420//PH domain// Putative GTP-ase activating protein for Arf// Ank repeat// Ank repeat NT2RP70080850//SPRY domain// Adenovirus EB1 55K protein / large t-an NT2RP70102350//Viral methyltransferase// Helix-loop-helix DNA-binding domain NT2RP70105210//Myc amino-terminal region NT2RP70157890//KRAB box NT2RP70159960//PH domain NT2RP70179710//Zinc finger, C3HC4 type (RING finger)// PHD-finger NT2RP70188710//Yeast PIR proteins NT2RP70192730//alpha/beta hydrolase fold NT2RP70194450//Bacterial regulatory proteins, crp family NT2RP70195430//Zinc-binding dehydrogenases NT2RP70198350//PWWP domain NTONG20009770//Coronavirus S2 glycoprotein// Peptidase family M3 NTONG20013620//Sulfotransferase proteins NTONG20015870//Transposase// Outer membrane efflux protein// Intermediate filament proteins NTONG20028070//von Willebrand factor type C domain NTONG20029480//NAD-dependent DNA ligase NTONG20029700//Laminin N-terminal (Domain VI)// Laminin EGF-like (Domains III and V)// Laminin EGF-like (Domains III and V)// Laminin EGF-like (Domains III and V) NTONG20046140//Eukaryotic protein kinase domain// Aminoglycoside phosphotransferase NTONG20051530//Mov34/MPN/PAD-l family// Extracellular link domain// Adhesin lipoprotein// Lectin C-type domain NTONG20056570//WD domain, G-beta repeat// WD domain, G-beta repeat NTONG20063010//EGF-like domain// Trypsin Inhibitor like cysteine rich domain// EGF-like domain// EGF-like domain// Keratin, high sulfur B2 protein// Chitin binding Peritrophin-A domain// Zona pellucida-like domain NTONG20064840//C2 domain// C2 domain NTONG20067830//Ank repeat// Ank repeat// Ank repeat// Ank repeat// Ank repeat NTONG20070200//Zinc finger, C2H2 type// Zinc finger, C2H2 type// Zinc finger, C2H2 type// Zinc finger, C2H2 type// Transcription factor S-II (TFIIS)// Zinc finger, C2H2 type// Zinc finger, C2H2 type// Zinc finger, C2H2 type// Zinc finger, C2H2 type// Zinc finger, C2H2 type// Zinc finger, C2H2 type// Zinc finger, C2H2 type// Zinc finger, C2H2 type NTONG20070340//Collagen triple helix repeat (20 copies)// Collagen triple helix repeat (20 copies)// Collagen triple helix repeat (20 copies) NTONG20075220//RyR domain NTONG20076930//Alpha-2-macroglobulin family NTONG20083650//TPR Domain// TPR Domain// TPR Domain// PPR repeat// TPR Domain// PPR repeat// TPR Domain NTONG20092290//Immunoglobulin domain// Immunoglobulin domain NTONG20092330//Putative membrane protein OCBBF10001850//KRAB box// Zinc finger, C2H2 type// Zinc finger, C2H2 type// Zinc finger, C2H2 type// Zinc finger, C2H2 type// Zinc finger, C2H2 type// Zinc finger, C2H2 type// PHD-finger// Zinc finger, C2H2 type// DM DNA binding domain// Zinc finger, C2H2 type// Zinc finger, C2H2 type// MYND finger// Zinc finger, C2H2 type// Zinc finger, C2H2 type// Zinc finger, C2H2 type OCBBF20019380//Sushi domain (SCR repeat)// CUB domain OCBBF20019830//Fibronectin type III domain// Fibronectin type III domain// EGF-like domain// Metallothionein family 5 OCBBF20020830//Pumilio-family RNA binding domains (aka PUM-HD, Pumilio homology domain)// Pumilio-family RNA binding domains (aka PUM-HD, Pumilio homology domain)// Pumilio-family RNA binding domains (aka PUM-HD, Pumilio homology domain)// Pumilio-family RNA binding domains (aka PUM-HD, Pumilio homology domain)// Pumilio-family RNA binding domains (aka PUM-HD, Pumilio homology domain)// Putative GTP-ase activating protein for Arf// Pumilio- family RNA binding domains (aka PUM-HD, Pumilio homology domain)// Pumilio- family RNA binding domains (aka PUM-HD, Pumilio homology domain)// Pumilio- family RNA binding domains (aka PUM-HD, Pumilio homology domain) OCBBF20022900//IQ calmodulin-binding motif// Dishevelled specific domain// Kunitz/Bovine pancreatic trypsin inhibitor domain OCBBF20028050//Phorbol esters/diacylglycerol binding domain (Cl domain)// Zinc finger, C3HC4 type (RING finger)// PHD-finger OCBBF20028650//Ank repeat// Ank repeat// Helicases conserved C-terminal domain OCBBF20030280//Lipoprotein amino terminal region OCBBF20035930//NSF attachment protein OCBBF20037440//Zinc finger, C3HC4 type (RING finger) OCBBF20046120//Zinc finger, C2H2 type// Zinc finger, C2H2 type// Zinc finger, C2H2 type// PHD-finger// Zinc finger, C2H2 type// Zinc finger, C2H2 type// Transcription factor S-II (TFIIS)// Zinc finger, C2H2 type// Zinc finger, C2H2 type// Zinc finger, C2H2 type// Zinc finger, C2H2 type// Zinc finger, C2H2 type// Zinc finger, C2H2 type// Zinc finger, C2H2 type OCBBF20049300//KRAB box// Zinc finger, C2H2 type// Zinc finger, C2H2 type// Zinc finger, C2H2 type// Zinc finger, C2H2 type// Zinc finger, C2H2 type// Zinc finger, C2H2 type// Zinc finger, C2H2 type// Zinc finger, C2H2 type// Zinc finger, C2H2 type// Zinc finger, C2H2 type// Zinc finger, C2H2 type// Zinc finger, C2H2 type// Zinc finger, C2H2 type// Zinc finger, C2H2 type// Putative zinc finger in N-recognin// Zinc finger, C2H2 type// DM DNA binding domain// Zinc finger, C2H2 type OCBBF20049840//PDZ domain (Also known as DHR or GLGF). OCBBF20050770//Dehydrins// Carnitate acyltransferase OCBBF20053430//Extracellular link domain// Eukaryotic protein kinase domain// Protein kinase C terminal domain OCBBF20053730//Ank repeat// Ank repeat// Ank repeat// Patatin OCBBF20054760//Death domain OCBBF20059560//UvrB/uvrC motif OCBBF20066390//Zinc finger, C2H2 type// Zinc finger, C2H2 type// Zinc finger, C2H2 type// Zinc finger, C2H2 type// Zinc finger, C2H2 type OCBBF20071210//Spectrin repeat OCBBF20071840//Zinc finger, C2H2 type// Transcription factor S-II (TFIIS)// Zinc finger, C2H2 type// Zinc finger, C2H2 type// Zinc finger, C2H2 type// Zinc finger, C2H2 type// Zinc finger, C2H2 type// Zinc finger, C2H2 type// Zinc finger, C2H2 type// Zinc finger, C2H2 type// Zinc finger, C2H2 type// Zinc finger, C3HC4 type (RING finger)// Zinc finger, C2H2 type// Zinc finger, C2H2 type OCBBF20079310//Acetyltransferase (GNAT) family OCBBF20080410//KRAB box// Zinc finger, C2H2 type// Zinc finger, C2H2 type// Zinc finger, C2H2 type// Zinc finger, C2H2 type// Transcription factor S-II (TFIIS)// Zinc finger, C2H2 type// Zinc finger, C2H2 type// Zinc finger, C2H2 type// Zinc finger, C2H2 type// Zinc finger, C2H2 type// Zinc finger, C2H2 type// Zinc finger, C2H2 type// Zinc finger, C2H2 type OCBBF20082830//alpha/beta hydrolase fold OCBBF20086400//ADP-ribosylation factor family// ABC transporter// FtsK/SpoIIIE family// Ras family OCBBF20086910//HMG (high mobility group) box OCBBF20107090//Cadherin domain OCBBF20108190//Zinc finger, C2H2 type// Zinc finger, C2H2 type// IBR domain// Zinc finger, C2H2 type// Zinc finger, C2H2 type// Zinc finger, C2H2 type// Zinc finger, C2H2 type// Zinc finger, C2H2 type// Zinc finger, C2H2 type// Zinc finger, C2H2 type// Zinc finger, C2H2 type// Zinc finger, C2H2 type// Zinc finger, C2H2 type OCBBF20108430//ADP-ribosylation factor family// G-protein alpha subunit OCBBF20108580//Caspase recruitment domain OCBBF20108630//ABC transporter OCBBF20109310//PH domain// Arrestin (or S-antigen) OCBBF20116850//Leucine rich repeat N-terminal domain// Leucine Rich Repeat// Leucine Rich Repeat// Leucine Rich Repeat// Leucine Rich Repeat// Leucine Rich Repeat// Leucine rich repeat C-terminal domain// Immunoglobulin domain OCBBF20120390//Caveolin// Hepatitis C virus core protein// Sodium:neurotransmitter symporter family OCBBF20121390//BTB/POZ domain// Kelch motif// Kelch motif// Kelch motif// Kelch motif// Kelch motif OCBBF20124360//CNH domain OCBBF20125530//Vpu protein// Zinc finger, C3HC4 type (RING finger) OCBBF20127040//Interleukin-6/G-CSF/MGF family OCBBF20127140//WD domain, G-beta repeat// WD domain, G-beta repeat, OCBBF20127550//Outer Capsid protein VP4 (Hemagglutinin) OCBBF20128120//DnaJ domain// DnaJ central domain (4 repeats)// DnaJ C terminal region OCBBF20129360//PH domain// EF hand// Ribosomal RNA adenine dimethylases// EF hand// Sulfotransferase proteins// Somatotropin hormone family// Phosphatidylinositol-specific phospholi// Phosphatidylinositol-specific phospholi// C2 domain OCBBF20132850//Leucine rich repeat N-terminal domain// Leucine Rich Repeat// Leucine Rich Repeat// Leucine Rich Repeat// Leucine Rich Repeat// Leucine Rich Repeat// Leucine Rich Repeat// Leucine Rich Repeat// Leucine rich repeat C-terminal domain// Immunoglobulin domain// Fibronectin type III domain OCBBF20140640//Phosphotyrosine interaction domain (PTB/PID) OCBBF20140890//Ribosomal protein Lll OCBBF20145760//Glypican OCBBF20148280//Zinc finger, C2H2 type// PHD-finger// Zinc finger, C2H2 type// Zinc finger, C2H2 type// Zinc finger, C2H2 type// Zinc finger, C2H2 type OCBBF20148730//BTB/POZ domain// Kelch motif// Kelch motif// Kelch motif// Keich motif OCBBF20155060//EGF-like domain// Laminin EGF-like (Domains III and V)// Laminin G domain// EGF-like domain// Laminin G domain// EGF-like domain OCBBF20173980//Regulator of chromosome condensation// Regulator of chromosome condensation// Regulator of chromosome condensation// Regulator of chromosome condensation// Regulator of chromosome condensation// BTB/POZ domain// Thymidylate synthase OCBBF20178880//Granulins OCBBF20180120//Sodium:sulfate symporter transmembrane// Sodium:sulfate symporter transmembrane// Sodium:sulfate symporter transmembrane PEBLM10000240//Domain found in Dishevelled, Egl-10, and Ple PEBLM20013120//PH domain PEBLM200243201/Cation efflux family PEBLM20042900//Chitin synthase PEBLM20044520//Ubiquitin carboxyl-terminal hydrolase fam// Exonuclease PEBLM20052820//Protein phosphatase 2C PEBLM20060310//IBR domain// Zinc finger, C3HC4 type (RING finger) PEBLM20060360//KRAB box PEBLM20075980//Immunoglobulin domain// Immunoglobulin domain// Immunoglobulin domain PEBLM20078320//Zinc finger, C2H2 type// Zinc finger, C2H2 type// Zinc finger, C2H2 type// Zinc finger, C2H2 type// Zinc finger, C2H2 type// Zinc finger, C2H2 type// Zinc finger, C2H2 type// Zinc finger, C2H2 type// Zinc finger, C2H2 type// PHD-finger// Zinc finger, C2H2 type// Zinc finger, C2H2 type// Zinc finger, C2H2 type// DnaJ central domain (4 repeats)// Zinc finger, C2H2 type// Zinc finger, C2H2 type// Zinc finger, C2H2 type// Zinc finger, C2H2 type// Zinc finger, C2H2 type// Zinc finger, C2H2 type// Zinc finger, C2H2 type PERIC10000250//Prokaryotic DNA topoisomerase PERIC20003870//Ribosomal L32p protein family// NAC domain// TS-N domain PERIC20004220//Domain of unknown function PERIC20004780//bZIP transcription factor PLACE60003480//Chorismate synthase PLACE60060420//Ribosomal protein L44 PLACE60079250//Bacterial flagellin N-terminus// Spectrin repeat// Spectrin repeat// Spectrin repeat// Caulimovirus movement protein// Spectrin repeat// Spectrin repeat// Spectrin repeat// UvrB/uvrC motif// Spectrin repeat// Spectrin repeat// Flagellar hook-associated protein 2// Spectrin repeat// KE2 family protein PLACE60136500//dUTPase PLACE60136720//Porphobilinogen deaminase// GHMP kinases putative ATP-binding prot PLACE60177140//7 transmembrane receptor (rhodopsin family) PROST20047270//CRAL/TRIO domain. PROST20047390//Zinc finger, C2H2 type// Zinc finger, C2H2 type// Zinc finger, C2H2 type// Zinc finger, C2H2 type// Zinc finger, C2H2 type// PHD-finger// Zinc finger, C2H2 type// Zinc finger, C2H2 type// Zinc finger, C2H2 type// Zinc finger, C2H2 type// Zinc finger, C2H2 type// Zinc finger, C2H2 type// Zinc finger, C2H2 type PROST20050670//Endothelin family PROST20066880//Zinc finger, C2H2 type// Zinc finger, C2H2 type// Zinc finger, C2H2 type// Zinc finger, C2H2 type// Zinc finger, C2H2 type PROST20079500//Hepatitis C virus non-structural protein NS4b// Ras association (RalGDS/AF-6) domain PROST20100460//Cystine-knot domain PROST20112970//Sterile alpha motif (SAM)/Pointed domain// SAM domain (Sterile alpha motif) PROST20114390//Integrase DNA binding domain PROST20161950//RasGEF domain PROST20169800//Cytochrome P450 PROST20170980//Immunoglobulin domain// Adenovirus E3 region protein CR1 PROST20171280//Zinc finger, C2H2 type// Zinc finger, C2H2 type// Zinc finger, C2H2 type PROST20176170//LIM domain containing proteins// LIM domain containing proteins// LIM domain containing proteins PROST20185830//GATA zinc finger PROST20189770//KRAB box// Zinc finger, C2H2 type// Zinc finger, C2H2 type// Zinc finger, C2H2 type// Zinc finger, C2H2 type// Zinc finger, C2H2 type// Zinc finger, C2H2 type// Zinc finger, C2H2 type// Zinc finger, C2H2 type// Zinc finger, C2H2 type// Zinc finger, C2H2 type// Transcription factor S-Il (TFIIS)// Zinc finger, C2H2type// Zinc finger, C2H2 type// Zinc finger, C2H2 type PROST20191640//Zinc finger, C3HC4 type (RING finger)// IBR domain// Keratin, high sulfur B2 protein// Zinc finger, C3HC4 type (RING finger) PUAEN10000850//Uncharacterized protein family UPF0025// Secl family PUAEN20011880//ZAP domain// Piwi domain PUAEN20015860//PDZ domain (Also known as DHR or GLGF).// Regulator of G protein signaling domain PUAEN20018820//Sterile alpha motif (SAM)/Pointed domain// Ets-domain PUAEN20030180//Eukaryotic-type carbonic anhydrase PUAEN20040670//FERM domain (Band 4.1 family)// FERM domain (Band 4.1 family) PUAEN20055020//PH domain// START domain PUAEN20078980//PH domain// FYVE zinc finger// Domain of unknown function -DUF123// PH domain PUAEN20083140//EF hand// PH domain// Neuregulin family PUAEN20108240//Ank repeat// Ank repeat// Ank repeat//.Ank repeat// Ank repeat SALGL10001710//ENV polyprotein (coat polyprotein) SKMUS20001980//Nebulin repeat// Nebulin repeat// Nebulin repeat// Nebulin repeat// Nebulin repeat// Nebulin repeat SKMUS20003610//Syndecan domain// Mitochondrial carrier proteins// Mitochondrial carrier proteins// Mitochondrial carrier proteins SKMUS20007800//Matrix protein (MA), pl5// Prenyltransferase and squalene oxidase re SKMUS20016220//Nebulin repeat// Nebulin repeat// Nebulin repeat// Nebulin repeat// Nebulin repeat// Nebulin repeat// Nebulin repeat// Nebulin repeat// Nebulin repeat SKMUS20018230//Ank repeat SKMUS20018500//Coronavirus S2 glycoprotein SKMUS20024750//Leucine Rich Repeat// Leucine Rich Repeat// Leucine Rich Repeat// Leucine Rich Repeat// Leucine Rich Repeat// Leucine Rich Repeat// Leucine Rich Repeat// Leucine Rich Repeat SKMUS20029200//Ank repeat// Respiratory-chain NADH dehydrogenase, 4// Ank repeat// Ank repeat// Ank repeat// Ank repeat SKMUS20048970//Actin// Actin SKMUS20049030//Nebulin repeat// Nebulin repeat// Nebulin repeat// Nebulin repeat// Nebulin repeat// Nebulin repeat SKMUS20084740//Syndecan domain SKNSH20008190//KRAB box// Zinc finger, C2H2 type// Zinc finger, C2H2 type// Zinc finger, C2H2 type//-Zinc finger, C2H2 type// Zinc finger, C2H2 type// Zinc finger, C2H2 type// ANI-like Zinc finger// Zinc finger, C2H2 type// Zinc finger, C2H2 type// PHD- finger// Zinc finger, C2H2 type// Zinc finger, C2H2 type// Zinc finger, C2H2 type// Zinc finger, C2H2 type SKNSH20020540//Arginase family SKNSH20063040//Transmembrane 4 family// Transmembrane 4 family SMINT20001760//PHD-finger// Zinc finger, C2H2 type// Zinc finger, C2H2 type// Zinc finger, C2H2 type// Zinc finger, C2H2 type// Zinc finger, C2H2 type// Zinc finger, C2H2 type// Zinc finger, C2H2 type// Zinc finger, C2H2 type SMINT20009840//Immunoglobulin domain// Immunoglobulin domain SMINT20013480//Metallo-beta-lactamase superfamily SMINT20028820//Eukaryotic protein kinase domain SMINT20035690//Ribosomal L29 protein SMINT20049090//Eukaryotic protein kinase domain SMINT20050750//Kazal-type serine protease inhibitor domain SMINT20068010//Kinesin motor domain SMINT20071400//NOLl/NOP2/sun family SMINT20073650//Immunoglobulin domain// Immunoglobulin domain// Immunoglobulin domain// Immunoglobulin domain// Immunoglobulin domain SMINT20102780//Quinolinate phosphoribosyl transferase SMINT20106290//Formamidopyrimidine-DNA glycosylase SMINT20106720//Immunoglobulin domain// Immunoglobulin domain// Immunoglobulin domain// Immunoglobulin domain SMINT20110330//pKID domain SMINT20112730//Immunoglobulin domain// Immunoglobulin domain// Immunoglobulin domain// Immunoglobulin domain// Immunoglobulin domain SMINT20115880//Zinc finger, C2H2 type// Zinc.finger, C2H2 type// Zinc finger, C2H2 type SMINT20121220//Myosin tail SM1NT20121950//2Fe-2S iron-sulfur cluster binding domains SMINT20122910//START domain SMINT20127930//Immunoglobulin domain// Immunoglobulin domain// Immunoglobulin domain// Immunoglobulin domain// Immunoglobulin domain SMINT20130320//NB-ARC domain// ATPases associated with various cellular act SMINT20131810//ENV polyprotein (coat polyprotein) SMINT20136130//Immunoglobulin domain SMINT20138900//Hrl repeat motif// Apolipoprotein Al/A4/E family// Intermediate filament proteins SMINT20144430//Immunoglobulin domain SMINT20144800//KRAB box// Zinc finger, C2H2 type// Zinc finger, C2H2 type// Zinc finger, C2H2 type// Zinc finger, C2H2 type// Zinc finger, C2H2 type// Zinc finger, C2H2 type// Zinc finger, C2H2 type// Zinc finger, C2H2 type// Zinc finger, C2H2 type SMINT20152940//Sigma-54 interaction domain// ATPases associated with various cellular activities (AAA) SMINT20154540//Glutathione S-transferases. SMINT20163960//Immunoglobulin domain SMINT20168570//Fasciclin domain SMINT20174360//haloacid dehalogenase-like hydrolase SMINT20177360//RNA recognition motif. (a.k.a. RRM, RBD, or SMINT20179740//Immunoglobulin domain// Immunoglobulin domain// Immunoglobulin domain// Immunoglobulin domain// Immunoglobulin domain SMINT20183530//ABC transporter// ABC transporter SMINT20190170//Immunoglobulin domain// Immunoglobulin domain// Immunoglobulin domain// Immunoglobulin domain// Immunoglobulin domain SMINT20191530//DEAD/DEAH box helicase// Helicases conserved C-terminal domain SPLEN20006070//Ank repeat// Ank repeat// Ank repeat// Ank repeat// Ank repeat// Ank repeat// Ank repeat// Ank repeat// Ank repeat// Ank repeat// Ank repeat// Ank repeat// Ank repeat// Ank repeat// Ank repeat// Ank repeat// Ank repeat// Ank repeat// Ank repeat// Ank repeat// Ank repeat// Ank repeat// Ank repeat// Ank repeat// Ank repeat// Ank repeat SPLEN20008740//Importin beta binding domain// Armadillo/beta-catenin-like repeats// Armadillo/beta-catenin-like repeats SPLEN20011410//RhoGAP domain SPLEN20026950//SNF2 and others N-terminal domain// Bromodomain// Helicases conserved C-terminal domain// Bromodomain SPLEN20027440//Zinc finger present in dystrophin, CBP/p300// Ank repeat// Ank repeat// Ank repeat// Ank repeat// Ank repeat// Ank repeat// Ank repeat SPLEN20039240//Ribosomal protein S13/S18// Hsp7O protein SPLEN20054290//Zinc finger, C2H2 type// Transcription factor S-II (TFIIS)// Zinc finger, C2H2 type// Zinc finger, C2H2 type// Zinc finger, C2H2 type// Zinc finger, C2H2 type// Zinc finger, C2H2 type// Zinc finger, C2H2 type// Zinc finger, C2H2 type// Zinc finger, C2H2 type// Zinc finger, C2H2 type// Zinc finger, C2H2 type SPLEN20077500//PH domain// Transposase SPLEN20079260//Zinc finger, C2H2 type// Zinc finger, C2H2 type// Zinc finger, C2H2 type// Zinc finger, C2H2 type// Zinc finger, C2H2 type// Zinc finger, C2H2 type// Zinc finger, C2H2 type// Zinc finger, C2H2 type// Zinc finger, C2H2 type// Zinc finger, C2H2 type// Zinc finger, C2H2 type SPLEN20084600//BTB/POZ domain// Kelch motif// Kelch motif// Kelch motif// Kelch motif// Kelch motif SPLEN20095410//Zinc finger, C2H2 type// Zinc finger, C2H2 type// Zinc-finger, C2H2 type// Zinc finger, C2H2 type// Zinc finger, C2H2 type// Zinc finger, C2H2 type// Zinc finger, C2H2 type// Zinc finger, C2H2 type SPLEN20095550//bZIP transcription factor// bZIP transcription factor// Hpt domain SPLEN20099700//Sigma-54 interaction domain// ATPases associated with various cellular ac// Thymidine kinase from herpesvirus SPLEN20103950//Ribosomal S17 SPLEN20118300//Transmembrane amino acid transporter protein SPLEN20119810//Reverse transcriptase (RNA-dependent DNA polymerase) SPLEN20126190//Lipoate-protein ligase B SPLEN20140800//KRAB box// Zinc finger, C2H2 type// Zinc finger, C2H2 type// Zinc finger, C2H2 type// Zinc finger, C2H2 type// Zinc finger, C2H2 type// Zinc finger, C2H2 type// PHD-finger// DnaJ central domain (4 repeats)// Zinc finger, C2H2 type// Zinc finger, C2H2 type// Zinc finger, C2H2 type// Zinc finger, C2H2 type// Zinc finger, C2H2 type SPLEN20142100//von Willebrand factor type A domain SPLEN20143180//Src homology domain 2 SPLEN20145720//PH domain SPLEN20147110//HECT-domain (ubiquitin-transferase). SPLEN20147390//KRAB box// Zinc finger, C2H2 type// Zinc finger, C2H2 type// Zinc finger, C2H2 type// Zinc finger, C2H2 type// Zinc finger, C2H2 type// Zinc finger, C2H2 type// Zinc finger, C2H2 type// Zinc finger, C2H2 type// Zinc finger, C2H2 type SPLEN20149110//Dishevelled specific domain SPLEN20150940//Histone deacetylase family SPLEN20151210//FERM domain (Band 4.1 family)// FERM domain (Band 4.1 family)// Isocitrate lyase SPLEN20157880//Immunoglobulin domain SPLEN20163560//Kinesin motor domain SPLEN20165310//Immunoglobulin domain// Immunoglobulin domain// Immunoglobulin domain// Immunoglobulin domain SPLEN20170310//PH domain SPLEN20171470//Keratin, high sulfur B2 protein SPLEN20173510//TPR Domain// TPR Domain// TPR Domain// TPR Domain// TPR Domain// NADH-ubiquinone/plastoquinone oxidoreduct SPLEN20174260//Penicillin amidase// Bacterial regulatory proteins, laci f// Vacuolar sorting protein 9 (VPS9) dom SPLEN20179180//EF hand SPLEN20179810//S-adenosylmethionine synthetase SPLEN20181810//Phorbol esters/diacylglycerol binding domain (Cl domain)// FYVE zinc finger SPLEN20186430//7 transmembrane receptor (rhodopsin family)// 7 transmembrane receptor (rhodopsin family) SPLEN20211220//Metalloenzyme superfamily SPLEN20212730//Calpain large subunit, domain III// EF hand// EF hand// EF hand SPLEN20222270//PTB domain (IRS-1 type) SPLEN20245300//Pancreatic hormone peptides SPLEN20250170//RhoGEF domain// PH domain// FYVE zinc finger// Domain of unknown function DUF123// PH domain SPLEN20250390//EF hand// EF hand SPLEN20252190//Zinc finger, C2H2 type// Zinc finger, C2H2 type// Zinc finger, C2H2 type// Transcription factor S-II (TFIIS)// Zinc finger, C2H2 type// Zinc finger, C2H2 type// PHD-finger// Zinc finger, C2H2 type// Zinc finger, C2H2 type// Zinc finger, C2H2 type// Zinc finger, C2H2 type// TRAF-type zinc finger// Zinc finger, C2H2 type SPLEN20267650//KRAB box// Zinc finger, C2H2 type// Zinc finger, C2H2 type// Zinc finger, C2H2 type// Zinc finger, C2H2 type// TRAF-type zinc finger// Zinc finger, C2H2 type// Zinc finger, C2H2 type SPLEN20292950//Phosphoribulokinase// ABC transporter// Aldehyde oxidase and xanthine dehydrogenase, C terminus SPLEN20304950//Transmembrane 4 family SPLEN20305620//Dihydroorotate dehydrogenase STOMA20001830//Immunoglobulin domain// Immunoglobulin domain// Immunoglobulin domain// Immunoglobulin domain// Immunoglobulin domain STOMA20005390//Sodium and potassium ATPases// Immunoglobulin domain// Immunoglobulin domain// Immunoglobulin domain// Immunoglobulin domain// Immunoglobulin domain STOMA20005670//Immunoglobulin domain// Immunoglobulin domain// Immunoglobulin domain// Immunoglobulin domain STOMA20006400//Immunoglobulin domain// Immunoglobulin domain// Immunoglobulin domain// Immunoglobulin domain STOMA20006780//Hepatitis C virus RNA dependent RNA polymera// Somatotropin hormone family STOMA20008880//Olfactomedin-like domain STOMA20032890//Zinc finger, C2H2 type// Transcription factor S-II (TFIIS)// Zinc finger, C2H2 type// Zinc finger, C2H2 type// Zinc finger, C2H2 type STOMA20034770//Immunoglobulin domain// Immunoglobulin domain// Immunoglobulin domain// Immunoglobulin domain// Immunoglobulin domain STOMA20046680//bZIP transcription factor STOMA20056640//Immunoglobulin domain STOMA20056670//Immunoglobulin domain// Immunoglobulin domain// Immunoglobulin domain// Immunoglobulin domain// Immunoglobulin domain STOMA20057820//Uncharacterized protein family UPF0024 STOMA20062130//Immunoglobulin domain STOMA20063980//Collagen triple helix repeat (20 copies) STOMA20064470//Leucine Rich Repeat// Leucine Rich Repeat// Leucine Rich Repeat// Leucine Rich Repeat// Leucine Rich Repeat// Leucine Rich Repeat// Leucine Rich Repeat STOMA20069040//Keratin, high sulfur B2 protein STOMA20077450//Repeat in ubiquitin-activating (UBA) pro// Repeat in ubiquitin-activating (UBA) pro STOMA20080500//ABC transporter STOMA20083610//Immunoglobulin domain// Immunoglobulin domain//IImmunoglobulin domain// Immunoglobulin domain// Immunoglobulin domain STOMA20088380//Immunoglobulin domain// Immunoglobulin domain// Immunoglobulin domain// Immunoglobulin domain// Immunoglobulin domain STOMA20092530//Immunoglobulin domain// Immunoglobulin domain// Immunoglobulin domain// Immunoglobulin domain STOMA20092890//Myosin head (motor domain) SYNOV20001520//Iimmunoglobulin domain// Immunoglobulin domain SYNOV20001730//Immunoglobulin domain// Immunoglobulin domain// Immunoglobulin domain// Immunoglobulin domain SYNOV20002510//Immunoglobulin domain// Immunoglobulin domain// Immunoglobulin domain// Immunoglobulin domain SYNOV20002790//Immunoglobulin domain// Immunoglobulin domain// Immunoglobulin domain// Immunoglobulin domain SYNOV20002970//Immunoglobulin domain// Immunoglobulin domain// Immunoglobulin domain// Immunoglobulin domain SYNOV20004260//Immunoglobulin domain// Immunoglobulin domain// Immunoglobulin domain// Immunoglobulin domain SYNOV20007000//Immunoglobulin domain// Immunoglobulin domain// Immunoglobulin domain// Immunoglobulin domain SYNOV20008240//Immunoglobul in domain// Immunoglobulin domain// Immunoglobul in domain// Immunoglobulin domain SYNOV20009230//Immunoglobulin domain// Immunoglobulin domain// Immunoglobulin domain// Immunoglobulin domain// Immunoglobulin domain SYNOV20010880//Immunoglobulin domain// Immunoglobulin domain// Immunoglobulin domain// Immunoglobulin domain SYNOV20011110//Immunoglobulin domain// Immunoglobulin domain// Immunoglobulin domain// Immunoglobulin domain SYNOV20013000//Immunoglobulin domain// Immunoglobulin domain// Immunoglobulin domain// Immunoglobulin domain SYNOV20013560//Immunoglobulin domain// Immunoglobulin domain// Immunoglobulin domain// Immunoglobulin domain SYNOV20013900//Immunoglobulin domain// Immunoglobulin domain// Immunoglobulin domain// Immunoglobulin domain SYNOV20017080//UBX domain SYNOV30001840//Asparagine synthase// AMP-binding enzyme 5 TBAES20000590//Cytochrome P450// Cytochrome P450 TBAES20002550//Peptidase family M1// Sigma-70 factor (ECF subfamily) TBAES20003150//Cytochrome P450 TESOP20004000//Papain family cysteine protease TESOP20005270//Sulfotransferase proteins 10 TESTI20001000//Formamidopyrimidine-DNA glycosylase TESTI20001170//HORMA domain TESTI20002780//Leucine Rich Repeat// Leucine Rich Repeat// Leucine Rich Repeat// PEP-utilizing enzymes TESTI20017950//Regulator of G protein signaling domain 15 TESTI20023510//Transcription termination factor nusG TESTI20031810//Bacterial luciferase// Domain of unknown function DUF28 TESTI20035960//Coproporphyrinogen III oxidase// WD domain, G-beta repeat// WD domain, G-beta repeat// WD domain, G-beta repeat// WD domain, G-beta repeat// WD domain, G-beta repeat// WD domain, G-beta repeat// WD domain, G-beta 20 repeat// WD domain, G-beta repeat TESTI20036380//Sulfate transporter family// Sodium Bile acid symporter family// STAS domain TESTI20041690//Zinc finger, C3HC4 type (RING finger)// PHD-finger// IBR domain// Zinc finger, C3HC4 type (RING finger)// B-box zinc finger.// 25 lactate/malate dehydrogenase// Fibronectin type III domain TEST120044230//Nucleosome assembly protein (NAP)// Nucleosome assembly protein (NAP)// Nucleosome assembly protein (NAP) TESTI20044310//Leucine Rich Repeat// Leucine Rich Repeat// Leucine Rich Repeat// Leucine Rich Repeat// Chorismate synthase// UvrB/uvrC motif 30U TESTI20046750//Respiratory-chain NADH dehydrogenase, 4 TEST120057750//RNase H// Integrase Zinc binding domain TESTI20061110//Heavy-metal-associated domain// ATPases associated with various cellular act TESTI20063830//Transposase 35 TESTI20066670//Acyl-CoA dehydrogenase TESTI20067200//K-box region// Homeobox domain TESTJ20082330//Tudor domain TESTI20083200//Dual specificity phosphatase, catalytic doma TESTI20083940//Progesterone receptor TESTI20088220//KRAB box// Zinc finger, C2H2 type// Zinc finger, C2H2 type// PHD-finger// Zinc finger, C2H2 type// Zinc finger, C2H2 type// Zinc finger, C2H2 type// Zinc finger, C2H2 type// BolA-like protein// Zinc finger, C2H2 type// Zinc finger, C2H2 type// Snake toxin// Zinc finger, C2H2 type// Zinc finger, C2H2 type// Zinc finger, C2H2 type// Zinc finger, C2H2 type// Zinc finger, C2H2 type// Zinc finger, C2H2 type// Zinc finger, C2H2 type// Zinc finger, C2H2 type TESTI20094470//Ets-domain TESTI20098350//VAT-Nn domain TESTI20108720//Protein phosphatase 2C TEST120121550//Putative GTP-ase activating protein for Arf TESTI20127760//Cyclin// Calcitonin / CGRP / IAPP family TESTI20130010//Zinc finger, C2H2 type// Zinc finger, C2H2 type// Zinc finger, C2H2 type// Zinc finger, C2H2 type// Zinc finger, C2H2 type TESTI20136710//Glypican// PHD-finger TEST120143390//Integral membrane protein DUF6// Integral membrane protein DUF6 TESTI20148000//Thioredoxin// Calsequestrin// Thioredoxin TEST120152460//Putative zinc finger in N-recognin// PHD-finger TESTI20156100//Zinc finger, C2H2 type// Zinc finger, C2H2 type// Zinc finger, C2H2 type TEST120157520//K+channel tetramerisation domain// K+channel tetramerisation domain TESTI20168480//Immunoglobulin domain// Immunoglobulin domain// Immunoglobulin domain// MAM domain.// Immunoglobulin domain TESTI20170350//Cystine-knot domain TESTI20184620//PH domain// Oxysterol-binding protein TEST120185650//AN1-like Zinc finger TESTI20189410//PHD-finger TESTI20192800//HC03- transporter family// Ank repeat// Ank repeat// Ank repeat// Alpha-2-macroglobulin family TESTI20197940//Domain of unknown function DUF27// Aconitase family (aconitate hydratase) TESTI20200710//PHD-finger// LIM domain containing proteins TESTI20202650//Repeat in HSl/Cortactin TEST120204450//Zinc finger, C2H2 type// Zinc finger, C2H2 type// Homeobox domain 5 TESTI20208400//NOL1/NOP2/sun family TESTI20208710//WD domain, G-beta repeat// WD domain, G-beta repeat TESTI20211160//Hydroxyethylthiazole kinase family TESTI20214250//Mitochondrial carrier proteins// Mitochondrial carrier proteins 10 TESTI20215990//F-box domain.// Leucine Rich Repeat// Leucine Rich Repeat// Leucine Rich Repeat// Leucine Rich Repeat// Leucine Rich Repeat// Leucine Rich Repeat// Leucine Rich Repeat TESTI20216370//Carboxylesterases TESTI20226230//Adenylate kinase// Pou domain - N-terminal to homeobox d 15 TESTI20229600//EGF-like domain// Metallothionein family 5// Replication ,protein// Laminin G domain// EGF-like domain// Laminin G domain// Insulin- like growth factor binding prot// EGF-like domain// Laminin G domain TESTI20230850//PAS domain TESTI20231920/-/Gag P30 core shell protein 20 TESTI20232140//Phosphatidylinositol-specific phospholipase// Phosphatidylinositol-specific phospholipase TESTI20234140//EF hand// WD domain, G-beta repeat// WD domain, G-beta repeat// WD domain, G-beta repeat// WD domain, G-beta repeat TESTI20234360//WW domain// PPIC-type PPIASE domain. 25- TESTI20238610//MAGE family// Uncharacterized protein family UPF0057 TESTI20242830//E2 (early) protein, C terminal// Syndecan domain TESTI20244190//Immunoglobulin domain// Immunoglobulin domain// Immunoglobulin domain// Immunoglobulin domain TESTI20254860//Immunoglobulin domain// Immunoglobulin domain// Immunoglobulin 30 domain// Immunoglobulin domain// Reeler domain// Fibronectin type III domain// Fibronectin type III domain TESTI20255820//FERM domain (Band 4.1 family)// FERM domain (Band 4.1 family)// Isocitrate lyase TESTI20258460//PH domain 35 TESTI20265970//Guanylate-binding protein TESTI20266740//Nucleotidyltransferase domain TEST120272960//7 transmembrane receptor (rhodopsin family) TESTI20275030//WD domain, G-beta repeat// WD domain, G-beta repeat TESTI20288910//SH3 domain TESTI20291960//Rhomboid family TESTI20303220//Immunoglobulin domain// Immunoglobulin domain// Immunoglobulin domain// Immunoglobulin domain// Fibronectin type III domain// Alphaherpesvirus glycoprotein E// Fibronectin type III domain// Fibronectin type III domain// Fibronectin type III domain TESTI20303360//ENV polyprotein (coat polyprotein) TESTI20305540//Hantavirus nucleocapsid protein// Troponin// Apolipoprotein Al/A4/E family TESTI20308600//Homeobox domain TESTI20309170//TPR Domain// Zinc finger, C3HC4 type (RING finger)// Aldo/keto reductase family// ATP-dependent protease La (LON) domain TESTI20314180//Trypsin// Trypsin TESTI20317600//Terpene synthase family TESTI20318090//Zinc finger, C2H2 type// Zinc finger, C2H2 type// Zinc finger, C2H2 type// Zinc finger, C2H2 type// Zinc finger, C2H2 type TESTI20320440//Thioredoxin TESTI20320670//RNA recognition motif. (a.k.a. RRM, RBD, or RNP domain)// RNA recognition motif. (a.k.a. RRM, RBD, or RNP domain) TESTI20326810//RanBP1 domain. TESTI20327680//EF hand// EF hand TESTI20328280//KE2 family protein// Troponin TESTI20333000//Immunoglobulin domain// Immunoglobulin domain TESTI20334410//DEAD/DEAH box helicase// Helicases conserved C-terminal domain TESTI20335050//Zinc finger, C3HC4 type (RING finger) TESTI20335200//Immunoglobulin domain TESTI20343070//Transcription factor E2F/dimerisation partner (TDP) TESTI20351830//K-box region TESTI20352620//Saposin A-type domain TESTI20355020//Tudor domain TESTI20358980//Homeobox domain// Collagen triple helix repeat (20 copies) TESTI20366910//Pyridine nucleotide-disulphide oxidoreductase TESTI20368330//Rhodanese-like domain TESTI20369690//PHD-finger TESTI20370020//Bleomycin resistance protein TESTI20370810//Ion transport protein// Polysaccharide biosynthesis protein// Sugar (and other) transporter TESTI20371030//Kelch motif// Kelch motif// Kelch motif// Kelch motif// Kelch motif TESTI20375340//Phosphatidylinositol-specific phospholi// UvrD/REP helicase// Phosphatidylinositol-specific phospholi// C2 domain TEST12⁰377230//Thymidylate synthase TEST120378190//KRAB box// Zinc finger, C2H2 type// Zinc finger, C2H2 type// Zinc finger, C2H2 type// Zinc finger, C2H2 type// Zinc finger, C2H2 type// Zinc finger, C2H2 type// Transcription factor S-II (TFIIS)// Zinc finger, C2H2 type// Zinc finger, C2H2 type// Zinc finger, C2H2 type TESTI20381040//Putative zinc finger in N-recognin TESTI20382750//Kinesin motor domain TESTI20383880//DnaJ domain TESTI20385960//Zinc finger, C3HC4 type (RING finger)// SPRY domain TESTI20390410//Arsenical pump membrane protein TESTI20391210//IQ calmodulin-binding motif TESTI20391770//Domain of unknown function DUFI9// Thioredoxin TESTI20392250//PH domain// Phorbol esters/diacylglycerol binding domain (Cl domain) TESTI20392270//Cyclin TEST120392760//Leucine Rich Repeat// Leucine Rich Repeat// Leucine Rich Repeat// Leucine Rich Repeat// Leucine Rich Repeat// Leucine Rich Repeat// Leucine Rich Repeat TESTI20393530//Mitochondrial carrier proteins TEST120397760//El-E2 ATPase TEST120400940//K-box region TESTI20401020//Mitochondrial carrier proteins// Mitochondrial carrier proteins TESTI20408150//Keratin, high sulfur B2 protein TESTI20416640//Choline/ethanolamine kinase TESTI20432750//Cytochrome C and Quinol oxidase polypeptide TESTI20432820//Zinc finger, C2H2 type// Zinc finger, C2H2 type// Zinc finger, C2H2 type// Zinc finger, C2H2 type// Zinc finger, C2H2 type// Zinc finger, C2H2 type// Zinc finger, C2H2 type// Zinc finger, C2H2 type// Zinc finger, C2H2 type//Zinc finger, C2H2 type// Zinc finger, C2H2 type// Transcription factor S-II (TFIIS)// Zinc finger, C2H2 type// Zinc finger, C2H2 type// Zinc finger, C2H2 type TESTI20436560//Spectrin repeat// Intermediatelfilament proteins// Intermediate filament tail domain TESTI20442760//Immunoglobulin domain// Immunoglobulin domain// Immunoglobulin domain// Immunoglobulin domain// Immunoglobulin domain TESTI20443090//SAP domain// Zinc knuckle// Zinc finger, C3HC4 type (RING finger) TEST120444130//ENV polyprotein (coat polyprotein) TEST120449200//7 transmembrane receptor (metabotropic gluta TESTI20451990//SAP domain TESTI20455090//Intermediate filament proteins TESTI20455620//Hsp70 protein TESTI20456110//B-box zinc finger.// Spectrin repeat// SPRY domain TESTI20463580//Ubiquitin carboxyl-terminal hydrolases famil// Immunoglobulin domain// Ubiquitin carboxyl-terminal hydrolase family TESTI20467320//Wiskott Aldrich syndrome homology region 2 TESTI20467970//Neurohypophysial hormones, N-terminal Domain// Neurohypophysial hormones, N-terminal Domain// Neurohypophysial hormones, N terminal Domain// Neurohypophysial hormones, N-terminal Domain// Neurohypophysial hormones, N-terminal Domain// Neurohypophysial hormones, N- terminal Domain// Neurohypophysial hormones, N-terminal Domain// Neurohypophysial hormones, N-terminal Domain// Neurohypophysial hormones, N- terminal Domain TESTI20471410//Protein phosphatase 2C TESTI20478850//Herpesvirus Glycoprotein B THYMU10005360//Immunoglobulin domain// Viral coat protein// Immunoglobulin domain THYMU10005540//Immunoglobulin domain// Immunoglobulin domain// Immunoglobulin domain// Immunoglobulin domain THYMU20023380//Copper/zinc superoxide dismutase (SODC) THYMU20027560//Domain of unknown function THYMU20039810//MAC/Perforin domain THYMU20105190//Myosin head (motor domain) THYMU20106710//Immunoglobulin domain THYMU20111180//Domain of unknown function DUF27// Aconitase family (aconitate hydratase) THYMU20115850//Reverse transcriptase (RNA-dependent DNA pol THYMU20118520//Ubiquitin family THYMU20122730//VHS domain THYMU20126900//3-hydroxyacyl-CoA dehydrogenase// UDP-glucose/GDP-mannose dehydrogenase fa THYMU20130890//Ribosomal protein S9/S16 THYMU20141670//Phorbol esters/diacylglycerol binding dom// PHD-finger// FYVE zinc finger THYMU20142040//Wiskott Aldrich syndrome homology region 2 THYMU20143270//Cytochrome C oxidase subunit II THYMU20147770//Immunoglobulin domain// Immunoglobulin domain// Immunoglobulin domain// Immunoglobulin domain THYMU20159430//Immunoglobulin domain// Immunoglobulin domain// Immunoglobulin domain// Immunoglobulin domain// Immunoglobulin domain THYMU20161640//PMP-22/EMP/MP20/Claudin family// Integral membrane protein DUF6 THYMU20169680//Ank repeat// Ank repeat THYMU20172150//WD domain, G-beta repeat THYMU20194360//Kelch motif THYMU20201980//PH domain// Phorbol esters/diacylglycerol binding domain (Cl domain)// FYVE zinc finger// PH domain THYMU20202890//Eukaryotic protein kinase domain THYMU20209590//PH domain// Dynamin GTPase effector domain THYMU20216840//PHD-finger THYMU20229220//Closterovirus coat protein THYMU20239000//Collagen triple helix repeat (20 copies) THYMU20240710//tRNA synthetases class I (E and Q) THYMU20241850//Class II histocompatibility antigen, beta// Immunoglobulin domain THYMU20247480//KRAB box// Zinc finger, C2H2 type// Zinc finger, C2H2 type// Zinc finger, C2H2 type// Zinc finger, C2H2 type// Zinc finger, C2H2 type// Zinc finger, C2H2 type THYMU20279750//Immunoglobulin domain TKIDN1OOOOOOI//Mitochondrial import inner membrane transloc TKIDN20004640//GHMP kinases putative ATP-binding protei TKIDN20047480//Eukaryotic protein kinase domain TOVAR20004760//Leucine Rich Repeat// Leucine Rich Repeat// Leucine Rich Repeat TRACH20002870//PMP-22/EMP/MP20/Claudin family TRACH20003590//Cytochrome P450 TRACH20005020//Ank repeat// MutT-like domain TRACH20005400//ADP-ribosylation factor family// Ras family TRACH20016210//Fucosyl transferase TRACH20019960//Na+/K+ATPase C-terminus TRACH20028030//DnaJ domain// DnaJ central domain (4 repeats)// DnaJ C terminal region TRACH20033230//Nucleoside transporter// Sugar (and other) transporter// Influenza RNA-dependent RNA polymerase subunit PB2 TRACH20041830//Thioredoxin// Thioredoxin TRACH20042920//Glutamine synthetase TRACH20048450//Phospholipase D. Active site motif// Phospholipase D. Active site motif TRACH20050040//Plexin repeat TRACH20067620//Core-2/I-Branching enzyme TRACH20069180//Immunoglobulin domain// Immunoglobulin domain// Immunoglobulin domain// Immunoglobulin domain TRACH20076740//Reduced folate carrier TRACH20076760//Keratin, high sulfur B2 protein TRACH20077540//Zinc finger, C2H2 type// G-patch domain TRACH20079690//KRAB box// Zinc finger, C2H2 type// Zinc finger, C2H2 type// TRAF-type zinc finger// Zinc finger, C2H2 type// Zinc finger, C2H2 type// Zinc finger, C2H2 type// Zinc finger, C2H2 type// Transcription factor S-II (TFIIS)// Zinc finger, C2H2 type// Zinc finger, C2H2 type TRACH20084720//tRNA synthetases class I (C)// tRNA synthetases class I (I, L, M and V) TRACH20085400//Immunoglobulin domain// Immunoglobulin domain// Immunoglobulin domain// Immunoglobulin domain// Immunoglobulin domain// Immunoglobulin domain TRACH20085830//Cytochrome P450 TRACH20096610//Intermediate filament proteins// Intermediate filament tail domain TRACH20105870//Regulatory subunit of type II PKA R- subunit// eIF4- gamma/eIF5/eIF2-epsilon TRACH20121380//Raf-like Ras-binding domain// Leptin// Raf-like Ras-binding domain// LGN motif, putative GEF specific for G-alpha GTPase TRACH20128230//Immunoglobulin domain// Chitin synthase// Immunoglobulin domain// Immunoglobulin domain// Immunoglobulin domain TRACH20135520//TBC domain// Rhodanese-like domain TRACH20136710//Immunoglobulin domain TRACH20141240//Granulins TRACH20145440//von Willebrand factor type D domain TRACH20154860//Squash family of serine protease inhibito// Zinc finger, C4 type (two domains)// T-box// Zinc finger, C4 type (two domains)// Ligand- binding domain of nuclear hormone TRACH20163170//Homeobox domain TRACH20164980//Zinc finger, C2H2 type// Zinc finger, C2H2 type// Zinc finger, C2H2 type// Zinc finger, C2H2 type// Zinc finger, C2H2 type// Zinc finger, C2H2 type// Zinc finger, C2H2 type// Zinc finger, C2H2 type// Zinc finger, C2H2 type// Zinc finger, C2H2 type// Zinc finger, C2H2 type// PHD-finger// Transcription factor S-II (TFIIS)// Zinc finger, C2H2 type// Zinc finger, C2H2 type// Zinc finger, C2H2 type// Zinc finger, C2H2 type TRACH20167220//wnt family of developmental signaling protei// PLAT/LH2 domain// Fibroblast growth factor TRACH20184490//KRAB box// Zinc finger, C2H2 type// Zinc finger, C2H2 type// Zinc finger, C2H2 type// Zinc finger, C2H2 type// Zinc finger, C2H2 type// Zinc finger, C2H2 type// Zinc finger, C2H2 type// Zinc finger, C2H2 type// Zinc finger, C2H2 type// Zinc finger, C2H2 type TRACH20190240//EGF-like domain// EGF-like domain// Trypsin Inhibitor like cysteine rich domain// EGF-like domain TSTOM20005690//BTB/POZ domain// Kelch motif// Kelch motif// Kelch motif TUTER20002830//RNA recognition motif. (a.k.a. RRM, RBD, or RNP domain) UMVEN10001860//PH domain// RhoGAP domain// bZIP transcription factor UMVEN20000690//F5/8 type C domain UTERU20030570//ABC 3 transport family// Voltage gated chloride channels// CBS domain// CBS domain UTERU20046640//Rotavirus NS26 UTERU20046980//EB module// TNFR/NGFR cysteine-rich region// Furin-like cysteine rich region// Thrombospondin type 1 domain UTERU20050690//Androgen receptor UTERU20055330//Reverse transcriptase (RNA-dependent DNA polymerase) UTERU20055480//AMP-binding enzyme UTERU20055930//Helper component proteinase UTERU20064000//Peptidase family Ml UTERU20065930//Hrl repeat motif// PDZ domain (Also known as DHR or GLGF). UTERU20115740//KRAB box UTERU20116570//Villin headpiece domain UTERU20119060//ADP-ribosyl cyclase UTERU20144640//Choloylglycine hydrolase UTERU20145480//KRAB box// Zinc finger, C2H2 type// Transcription factor S-II (TFIIS)// Zinc finger, C2H2 type// TRAF-type zinc finger// Zinc finger, C2H2 type// Zinc finger, C2H2 type// wnt family of developmental signaling proteins// Zinc finger-, C2H2 type// Zinc finger, C2H2 type// Zinc finger, C2H2 type// Zinc finger, C2H2 type// Zinc finger, C2H2 type// Zinc finger, C2H2 type// Zinc finger, C2H2 type// Zinc finger,- C2H2 type// Zinc finger, C2H2 type// Zinc finger, C2H2 type// Zinc finger, C2H2 type// Zinc finger, C2H2 type// Zinc finger, C2H2 type// Zinc finger, C2H2 type// Zinc finger, C2H2 type UTERU20146310//Diacylglycerol kinase accessory domain (pres UTERU20161570//7 transmembrane receptor (rhodopsin family) UTERU20168220//Cell division protein// Integrase Zinc binding domain// GTPase of unknown function UTERU20176130//Putative GTP-ase activating protein for Arf UTERU20176320//SMC domain N terminal domain// Tropomyosins UTERU20178100//Aminotransferases class-III pyridoxal-pho UTERU20179880//TPR Domain// TPR Domain// TPR Domain// TPR Domain UTERU20183640//Immunoglobulin domain UTERU20185230//DUP family of yeast membrane proteins

### EXAMPLE 6

### Functional Categorization Based on the Full-Length Nucleotide Sequences

[0308] The functional prediction and categorization of the proteins encoded by the clones were carried out based on the result of homology search of the databases of GenBank, Swiss-Prot, UniGene and nr (see the Homology Search Result Data) for the full-length nucleotide sequences and the result of domain search of the amino acid sequences deduced from the full-length nucleotide sequences (see Example 5).

[0309] The clone predicted to belong to the category of secretory protein/membrane protein means a clone having hit data with some annotation, such as growth factor, cytokine, hormone, signal, transmembrane, membrane, extracellular matrix, receptor, G-protein coupled receptor, ionic channel, voltage-gated channel, calcium channel, cell adhesion, collagen, connective tissue, etc., suggesting that it is a secretory or membrane protein, or means a clone in which the presence of nucleotide sequence encoding a signal sequence or transmembrane domain was suggested by the results of PSORT and SOSUI analyses for deduced ORF.

[0310] The clone predicted to belong to the category of glycoprotein-related protein means a clone having hit data with some annotation, such as glycoprotein, suggesting that the clone encodes a glycoprotein-related protein.

[0311] The clone predicted to belong to the category of signal transduction-related protein means a clone having hit data with some annotation, such as serine/threonine-protein kinase, tyrosine-protein kinase, SH3 domain, SH2 domain, etc., suggesting that the clone encodes a signal transduction-related protein.

[0312] The clone predicted to belong to the category of transcription-related protein means a clone having hit data with some annotation, such as transcription regulation, zinc finger, homeobox, etc., suggesting that the clone encodes a transcription-related protein.

[0313] The clone predicted to belong to the category of disease-related protein means a clone having hit data with some annotation, such as disease mutation, syndrome, etc., suggesting that the clone encodes a disease-related protein, or means a clone whose full-length nucleotide sequence has hit data for Swiss-Prot, GenBank, or UniGene, where the hit data corresponds to genes or proteins which have been deposited in the Online Mendelian Inheritance in Man (OMIM) (http://www.ncbi.nlm.nih.gov/omim/), which is the human gene and disease database.

[0314] The clone predicted to belong to the category of enzyme and/or metabolism-related protein means a clone having hit data with some annotation, such as metabolism, oxidoreductase, E. C. No. (Enzyme commission number) , etc., suggesting that the clone encodes an enzyme and/or metabolism-related protein.

[0315] The clone predicted to belong to the category of cell division and/or cell proliferation-related protein means a clone having hit data with some annotation, such as cell division, cell cycle, mitosis, chromosomal protein, cell growth, apoptosis, etc., suggesting that the clone encodes a cell division and/or cell proliferation-related protein.

[0316] The clone predicted to belong to the category of cytoskeleton-related protein means a clone having hit data with some annotation, such as structural protein, cytoskeleton, actin-binding, microtubles, etc., suggesting that the clone encodes a cytoskeleton-related protein.

[0317] The clone which is predicted to belong to the category of nuclear protein and/or RNA synthesis-related protein means a clone having hit data with some annotation, such as nuclear protein, RNA splicing, RNA processing, RNA helicase, polyadenylation, etc., suggesting that the clone encodes a nuclear protein and/or RNA synthesis-related protein.

[0318] The clone predicted to belong to the category of protein synthesis and/or transport-related protein means a clone having hit data with some annotation, such as translation regulation, protein biosynthesis, amino-acid biosynthesis, ribosomal protein, protein transport, signal recognition particle, etc., suggesting that the clone encodes a protein synthesis and/or transport-related protein.

[0319] The clone predicted to belong to the category of cellular defense-related protein means a clone having hit data with some annotation, such as heat shock, DNA repair, DNA damage, etc., suggesting that the clone encodes a cellular defense-related protein.

[0320] The clone predicted to belong to the category of development and/or differentiation-related proteins means a clone having hit data with some annotation, such as developmental protein, etc., suggesting that the clone encodes a development and/or differentiation-related protein.

[0321] The clone predicted to belong to the category of DNA-binding and/or RNA-binding protein means a clone having hit data with some annotation, such as DNA-binding, RNA-binding, etc.

[0322] The clone predicted to belong to the category of ATP-binding and/or GTP-binding protein means a clone having hit data with some annotation, such as ATP-binding, GTP-binding, etc.

[0323] In this functional categorization, when a single clone corresponded to multiple categories of those shown above, the clone was assigned to the multiple categories. However, the function of a protein is not restricted to the functional category in this classification, and there is the possibility that other functions are newly assigned to the protein.

[0324] The clones predicted to belong to the category of secretory protein and/or membrane protein are the following 632 clones. ADIPS10000640, ADRGL10001470, ADRGL20013520, ADRGL20018540, ADRGL20035850, ASTRO20001410, ASTRO20005330, ASTRO20033160, ASTRO20055750, ASTRO20058630, ASTRO20190390, BEAST20004540, BGGI110000240, BNGH420088500, BRACE20006400, BRACE20038000, BRACE20038470, BRACE20039040, BRACE20039540, BRACE20051380, BRACE20053630, BRACE20059370, BRACE20060550, BRACE20061050, BRACE20063630, BRACE20067430, BRACE20069090, BRACE20081720, BRACE20101700, BRACE20101710, BRACE20116110, BRACE20147800, BRACE20153680, BRACE20163350, BRACE20179340, BRACE20188470, BRACE20195100, BRACE20201570, BRACE20210140, BRACE20224480, BRACE20224500, BRACE20228480, BRACE20232840, BRACE20238000, BRACE20273890, BRACE20274080, BRALZ20013500, BRALZ20054710, BRALZ20064740, BRALZ20069760, BRALZ20073760, BRALZ20077930, BRAMY20000860, BRAMY20002770, BRAMY20025840, BRAMY20039260, BRAMY20060920, BRAMY20063970, BRAMY20111960, BRAMY20112800, BRAMY20124260, BRAMY20134140, BRAMY20135900, BRAMY20136210, BRAMY20144620, BRAMY20152110, BRAMY20174550, BRAMY20181220, BRAMY20195090, BRAMY20211390, BRAMY20211420, BRAMY20215230, BRAMY20218250, BRAMY20218670, BRAMY20229800, BRAMY20231720, BRAMY20247280, BRAMY20252180, BRAMY20273960, BRAMY20277170, BRAMY20284910, BRAMY20285160, BRAWH20015350, BRAWH20015890, BRAWH20016860, BRAWH20018730, BRAWH20030250, BRAWH20064050, BRAWH20110790, BRAWH20112940, BRAWH20117950, BRAWH20118230, BRAWH20121640, BRAWH20122580, BRAWH20132190, BRCAN20064010, BRCAN20071190, BRCAN20091560, BRCAN20103740, BRCAN20224720, BRCAN20273550, BRCAN20280360, BRCAN20285450, BRCOC10000870, BRCOC20004040, BRCOC20006370, BRCOC20041750, BRCOC20077690, BRCOC20078640, BRCOC20090520, BRCOC20101230, BRCOC20107300, BRCOC20114180, BRCOC20121720, BRCOC20134480, BRCOC20136750, BRHIP10001290, BRHIP20000870, BRHIP20003120, BRHIP20103090, BRHIP20111200, BRHIP20118380, BRHIP20118910, BRHIP20121410, BRHIP20135100, BRHIP20174040, BRHIP20179200, BRHIP20183690, BRHIP20191490, BRHIP20191770, BRHIP20198190, BRHIP20207430, BRHIP20208270, BRHIP20208590, BRHIP20217620, BRHIP20233090, BRHIP20234380, BRHIP20238880, BRHIP20283030, BRHIP30004570, BRSSN20003120, BRSSN20043040, BRSSN20066110, BRSSN20120810, BRSSN20137020, BRSSN20142940, BRSSN20146100, BRSSN20151990, BRSSN20169050, BRSTN20002200, BRTHA20004740, BRTHA20046290, BRTHA20046420, COLON10001350, COLON20093370, CTONG10000100, CTONG10000940, CTONG10001650, CTONG20004690, CTONG20009770, CTONG20092570, CTONG20092580, CTONG20095340, CTONG20099380, CTONG20103480, CTONG20105080, CTONG20114740, CTONG20119200, CTONG20120770, CTONG20124730, CTONG20131490, CTONG20132220, CTONG20133480, CTONG20139340, CTONG20149950, CTONG20155400, CTONG20158660, CTONG20159530, CTONG20161850, CTONG20267700, D30ST10001090, D30ST20036070, D30ST20038560, .D30ST30002580, D60ST20005070, D90ST20002780, D90ST20015470, D90ST20023970, D90ST20026730, D90ST20035940, D90ST20040180, DFNES20025880, FCBBF10000240, FCBBF10000380, FCBBF10001150, FCBBF10001210, FCBBF10001550, FCBBF10002430, FCBBF10002700, FCBBF10003220, FCBBF10003760, FCBBF10005460, FCBBF10005740, FCBBF20032970, FCBBF20042560, FCBBF20049300, FCBBF20051220, FCBBF30008470, FCBBF30024750, FCBBF30078290, FCBBF30083620, FCBBF30086440, FCBBF30090690,-FCBBF30095260, FCBBF30123470, FCBBF30172550, FCBBF30175310, FCBBF30190850, FCBBF30215060, FCBBF30238870, FCBBF30251420, FCBBF30279030, FEBRA20002100, FEBRA20004620, FEBRA20009090, FEBRA20029860, FEBRA20037260, FEBRA20080810, FEBRA20086620, FEBRA20092890, FEBRA20093520, FEBRA20095880, FEBRA20111460, FEBRA20125070, FEBRA20130190, FEBRA20140100, FEBRA20145780, FEBRA20211710, FEBRA20223220, FEBRA20229630, FEBRA20235500, HCHON20000380, HCHON20008180, HCHON20015980, HCHON20016040, HCHON20016650, HCHON20040020, HCHON20064590, HCHON20067700, HCHON20068710, HCHON20086720, HCHON20100740, HEART20003060, HEART20005410, HEART20034320, HEART20049410, HEART20049800, HEART20072310, HHDPC20001040, HHDPC20014320, HHDPC20034720, HHDPC20068620, HHDPC20084140, HHDPC20091780, HHDPC20092080, HLUNG10000550, KIDNE20003940, KIDNE20007770, KIDNE20011400, KIDNE20021910, KIDNE20022620, KIDNE20100070, KIDNE20101510, KIDNE20109730, KIDNE20121880, KIDNE20125630, KIDNE20126010, KIDNE20126130, KIDNE20127450, KIDNE20130450, KIDNE20131580, KIDNE20137340, KIDNE20181660, LIVER20035110, LIVER20045650, LIVER20055200, LIVER20062510, LIVER20064690, LIVER20075680, LIVER20087060, LIVER20091180, MESAN10001260, MESAN20014500, MESAN20027090, MESAN20038510, MESAN20089360, MESAN20103120, MESAN20115970, MESAN20125.860, MESAN20139360, MESAN20152770, MESAN20153910, MESAN20174170, NOVAR20000380, NT2NE20010050, NT2NE20021620, NT2NE20068130, NT2NE20118960, NT2NE20124480, NT2NE20131890, NT2NE20132170, NT2NE20155110, NT2NE20156260, NT2NE20157470, NT2NE20159740, NT2NE20177520, NT2NE20183760, NT2RI20003480, NT2RI20023910, NT2RI20025400, NT2RI20028470, NT2RI20040930, NT2RI20054050, NT2RI20056700, NT2RI20076290, NT2RI20086220, NT2RI20091940, NT2RI20244600, NT2RP70072690, NT2RP70081610, NT2RP70122910, NT2RP70125160, NT2RP70133740, NT2RP70134990, NT2RP70137290, NT2RP70179710, NT2RP70188020, NT2RP70192730, NT2RP70198350, NTONG20028070, NTONG20029700, NTONG20048060, NTONG20049910, NTONG20051530, NTONG20061870, NTONG20063010, NTONG20067830, NTONG20076930, NTONG20092330, OCBBF10001750, OCBBF20013890, OCBBF20019830, OCBBF20023570, OCBBF20026630, OCBBF20046690, OCBBF20050770, OCBBF20059560, OCBBF20063320, OCBBF20071210, OCBBF20072320, OCBBF20080050, OCBBF20086400, OCBBF20086910, OCBBF20087010, OCBBF20088140, OCBBF20091150, OCBBF20107090, OCBBF20108630, OCBBF20116850, OCBBF20120390, OCBBF20122620, OCBBF20130910, OCBBF20132850, OCBBF20145760, OCBBF20155060, OCBBF20178880, OCBBF20180120, OCBBF20180840, OCBBF20188730, PANCR10000910, PEBLM1dOOO710, PEBLM20024320, PEBLM20040150, PEBLM20074370, PEBLM20075980, PERIC20004220, PLACE60086400, PLACE60121080, PLACE60161600, PLACE60177140, PROST20005050, PROST20050670, PROST20107820, PROST20116600, PROST20120160, PROST20127800, PROST20146010, PROST20164440, PROST20169800, PROST20170980, PROST20175290, PUAEN20003740, PUAEN20030180, SALGL10001710, SKMUS20003610, SKMUS20007800, SKMUS20011640, SKMUS20020840, SKMUS20028210, SKMUS20028400, SKMUS20077400, SKNSH20028660, SKNSH20031740, SKNSH20051940, SKNSH20063040, SMINT20009840, SMINT20011990, SMINT20022020, SMINT20029760, SMINT20040860, SMINT20050750, SMINT20053870, SMINT20073650, SMINT20095050, SMINT20100680, SMINT20105330, SMINT20106720, SMINT20121950, SMINT20127930, SMINT20144430, SMINT20144890, SMINT20153260, SMINT20154540, SMINT20157450, SMINT20173240, SMINT20178550, SMINT20191420, SMINT20192000, SPLEN20003070, SPLEN20021660, SPLEN20029310, SPLEN20079510, SPLEN20095810, SPLEN20097330, SPLEN20118300, SPLEN20141360, SPLEN20141990, SPLEN20142100, SPLEN20144520, SPLEN20152760, SPLEN20157880, SPLEN20165310, SPLEN20167200, SPLEN20169220, SPLEN20169720, SPLEN20171890, SPLEN20172120, SPLEN20179810, SPLEN20186430, SPLEN20211570, SPLEN20211940, SPLEN20213830, SPLEN20273950, SPLEN20292950, SPLEN20293800, SPLEN20304950, SPLEN20329240, STOMA20005390, STOMA20005670, STOMA20006400, STOMA20006780, STOMA20008880, STOMA20051200, STOMA20056640, STOMA20056670, STOMA20062130, STOMA20077450, STOMA20080500, STOMA20088380, STOMA20092530, SYNOV20001520, SYNOV20001730, SYNOV20002510, SYNOV20002790, SYNOV20002970, SYNOV20004260, SYNOV20007000, SYNOV20008240, SYNOV20009230, SYNOV20010880, SYNOV20011110, SYNOV20013000, SYNOV20013560, SYNOV20013900, SYNOV30001840, TBAES20003150, TESOP20004000, TESOP20005690, TESTI20001720, TESTI20036380, TESTI20037560, TESTI20094120, TESTI20110280, TESTI20123080, TESTI20123560, TESTI20128350, TESTI20136100, TESTI20136710, TESTI20143390, TESTI20148000, TESTI20164100, TESTI20193360, TESTI20209810, TESTI20209990, TESTI20211220, TESTI20214250, TESTI20216370, TESTI20230250, TESTI20231940, TESTI20242990, TESTI20244190, TESTI20254220, TESTI20254860, TESTI20265970, TESTI20271850, TESTI20272960, TESTI20284880, TESTI20291310, TESTI20291960, TESTI20303220, TESTI20303360, TESTI20303420, TESTI20307700, TESTI20309170, TESTI20314180, TESTI20316870, TESTI20333000, TESTI20335200, TESTI20347180, TESTI20347300, TESTI20352620, TESTI20357960, TESTI20370810, TESTI20373820, TESTI20383880, TESTI20390260, TESTI20390410, TESTI20391770, TESTI20393530, TESTI20396130, TESTI20397760, TESTI20401020, TESTI20401280, TESTI20415170, TESTI20421490, TESTI20422640, TESTI20441940, TESTI20442760, TESTI20444130, TESTI20444180, TESTI20449200, TESTI20463520, TESTI20463580, TESTI20465350, THYMU10005360, THYMU10005540, THYMU20027560, THYMU20032870, THYMU20039810, THYMU20066100, THYMU20081490, THYMU20100410, THYMU20106710, THYMU20111830, THYMU20141670, THYMU20147770, THYMU20159430, THYMU20161640, THYMU20162190, THYMU20173980, THYMU20194420, THYMU20208300, THYMU20216840, THYMU20222890, THYMU20229220, THYMU20241850, THYMU20277390, TKIDN20005210, TRACH20002870, TRACH20003590, TRACH20016210, TRACH20019960, TRACH20029540, TRACH20033230, TRACH20034840, TRACH20042920, TRACH20050040, TRACH20067620, TRACH20068660, TRACH20069180, TRACH20076740, TRACH20085400, TRACH20085830, TRACH20109650, TRACH20111130, TRACH20121380, TRACH20128110, TRACH20128230, TRACH20134950, TRACH20136710, TRACH20139820, TRACH20140820, TRACH20145440, TRACH20168350, TRACH20180840, TRACH20190240, UMVEN20000690, UTERU20030570, UTERU20040610, UTERU20046980, UTERU20055480, UTERU20064860, UTERU20076390, UTERU20094350, UTERU20135860, UTERU20144640, UTERU20158300, UTERU20158800, 5 UTERU20161570, UTERU20178100, UTERU20183640, UTERU20186740

[0325] The clones predicted to belong to the category of glycoprotein-related protein are the following 128 clones. ADI PS10000640, BRACE20059370, BRACE20163350, BRAMY20277170, BRAMY20285160, BRAWH20064050, BRAWH20112940, BRAWH20117950, BRAWH20118230, BRCAN20103740, BRCOC20004040, BRCOC20006370, BRHIP10001290, BRHIP20103090, BRHIP20283030, BRHIP30004570, BRSSN20003120, BRSSN20146100, BRTHA20046290, COLON10001350, CTONG20159530, D90ST20023970, D90ST20040180, FCBBF10001150, FCBBF20049300, FCBBF30024750, FCBBF30083620, FCBBF30190850,FCBBF30238870, FEBRA20086620, FEBRA20092890, HCHON20015980, HCHON20016040, HCHON20064590, HCHON20086720, HCHON20100740, HEART20003060, HHDPC20014320, HHDPC20068620, HHDPC20092080, KIDNE20003940, KIDNE20007770, KIDNE20101510, LIVER20064690, MESAN20125860, NT2NE20118960, NT2NE20157470, NT2NE20177520,NT2RI20003480, NT2RI20056700, NT2RP70192730, NTONG20051530, NTONG20076930, OCBBF20107090, OCBBF20108630, OCBBF20120390, OCBBF20145760, OCBBF20155060, PLACE60177140, SMINT20050750, SMINT20073650, SMINT20105330, SMINT20106720, SMINT20112730, SMINT20127930, SMINT20153260, SMINT20179740, SMINT20190170, SPLEN20021660, SPLEN20142100, SPLEN20157880, SPLEN20165310, SPLEN20179810, SPLEN20186430, STOMA20001830, STOMA20005390, STOMA20005670, STOMA20006400, STOMA20008880, STOMA20034770, STOMA20056640, STOMA20056670, STOMA20083610, STOMA20088380, STOMA20092530, SYNOV20001520, SYNOV20001730, SYNOV20002510, SYNOV20002790, SYNOV20002970, SYNOV20004260, SYNOV20007000, SYNOV20008240, SYNOV20009230, SYNOV20010880, SYNOV20011110, SYNOV20013000, SYNOV20013560, SYNOV20013900, TESOP20004000, TESTI20136100, TESTI20216370, TESTI20244190, TESTI20254860, TESTI20303220, TESTI20335200, TESTI20352620, TESTI20358980, TESTI20442760, TESTI20449200, TESTI20455090, THYMU10005360, THYMU10005540, THYMU20147770, THYMU20159430, THYMU20241850, TRACH20016210, TRACH20050040, TRACH20067620, TRACH20069180, TRACH20076740, TRACH20128230, UTERU20046980, UTERU20064860, UTERU20144640, UTERU20158800, UTERU20161570, UTERU20183640

[0326] The clones predicted to belong to the category of signal transduction-related protein are the following 84 clones. ASTRO20108190, BRACE20115920, BRACE20154120, BRACE20177200, BRACE20237270, BRAMY20104640, BRAMY20242470, BRAMY20271400, BRAWH20016620, BRAWH20103290, BRAWH20149340, BRCOC20021550, BRCOC20091960, BRHIP20189980, BRHIP20218580, BRHIP20238600, BRSSN20038200, CD34C30004240, CTONG20118150, CTONG20127450, CTONG20200310, FCBBF30012350, FCBBF40001730, FEBRA10001880, FEBRA20004620, FEBRA20132740, FEBRA20144170, FEHRT20003250, HCHON20007510, HLUNG20033780, IMR3220002430, KIDNE20008010, KIDNE20102710, KIDNE20107620, NT2NE20080170, NT2NE20181650, NT2RP70027380, NT2RP70036880, NT2RP70063950, NT2RP70078420, NT2RP70159960, NTONG20046140, NTONG20056570, OCBBF20028050, OCBBF20053430, OCBBF20054760, OCBBF20124360, OCBBF20127140, OCBBF20149280, OCBBF20173980, PEBLM20013120, PEBLM20085760, PROST20161950, PUAEN20015260, PUAEN20015860, PUAEN20083140, SMINT20028820, SMINT20049090, SMINT20110660, SPLEN20011410, SPLEN20121750, SPLEN20170310, SPLEN2018l810, SPLEN20222270, SPLEN20250170, SPLEN20283650, TESTI20035960, TESTI20288910, TESTI20305540, TESTI20326810, TESTI20369650, TESTI20392250, TESTI20416640, TESTI20432750, TESTI20467320, THYMU20169680, THYMU20172150, THYMU20201980, THYMU20202890, TKIDN20004640, TKIDN20047480, TRACH20057690, UMVEN10001860, UTERU20146310

[0327] The clones predicted to belong to the category of transcription-related protein are the following 144 clones. 3NB6920014590, ADIPS20004250, ASTRO20008010, ASTRO20168470, BLADE20003400, BLADE20003890, BRACE20060890, BRACE20068590, BRACE20257100, BRAMY20210400, BRAMY20260910, BRAMY20270730, BRAWH20028110, BRAWH20075700, BRAWH20096780, BRCAN20280210, BRCOC20144000, BRCOC20178270, BRHIP20005340, BRHIP20096170, BRHIP20119330, BRHIP20191860, BRHIP20195890, BRHIP20222280, BRSSN20039370, BRSSN20046790, BRSSN20176820, CTONG20050280, CTONG20075860, CTONG20085950, CTONG20091080, CTONG20092700, CTONG20121010, CTONG20124220, CTONG20133390, CTONG20133520, D90ST20033970, FCBBF10001710, FCBBF10004370, FCBBF20059090, FCBBF20068820, FCBBF30007680, FCBBF30010810, FCBBF30018550, FCBBF30025560, FCBBF30057290, FCBBF30083820, FCBBF30129630, FCBBF30240960, FCBBF30246230, FEBRA20018690, FEBRA20026110, FEBRA20034680, FEBRA20040530, FEBRA20082010, FEBRA20171380, FEBRA20195820, FEBRA20233770, HCHON20008320, HCHON20009560, HCHON20035130, HHDPC10000830, HHDPC20030490, HHDPC20031130, KIDNE20027250, KIDNE20027950, KIDNE20182690, LIVER20055440, NT2NE20010490, NT2NE20089970, NT2NE20142210,, NT2NE20184900, NT2RP60000770, NT2RP70043480, NT2RP70063950, NT2RP70102350, NT2RP70157890, NTONG20070200, OCBBF10001850, OCBBF20020830, OCBBF20037440, OCBBF20046120, OCBBF20049300, OCBBF20054200, OCBBF20066390, OCBBF20071840, OCBBF20080410, OCBBF20108190, OCBBF20125530, OCBBF20148280, PEBLM20060360, PEBLM20078320, PERIC20003870, PROST10003220, PROST20047390, PROST20066880, PROST20185830, PROST20189770, PROST20191640, SKNSH20008190, SMINT20001760, SMINT20028820, SMINT20130320, SMINT20144800, SPLEN20026950, SPLEN20054290, SPLEN20079260, SPLEN20095410, SPLEN20117660, SPLEN20140800, SPLEN20147390, SPLEN20160450, SPLEN20162680, SPLEN20243830, SPLEN20250170, SPLEN20252190, SPLEN20267650, STOMA20032890, STOMA20063250, TESTI20039400, TESTI20041690, TESTI20067200, TESTI20088220, TESTI20130010, TESTI20156100, TESTI20230850, TESTI20318090, TESTI20320670, TESTI20378190, TESTI20385960, TESTI20409890, TESTI20420620, TESTI20432820, TESTI20456110, THYMU20247480, TRACH20079690, TRACH20154860, TRACH20163170, TRACH20164980, TRACH20184490, UTERU20099720, UTERU20116570, UTERU20145480, UTERU20176130

[0328] The clones predicted to belong to the category of disease-related protein are the following 387 clones. ADIPS20004250, ADRGL10001470, ADRGL20011190, ADRGL20018300, ADRGL20035850, ADRGL20078100, ASTRO10001650, ASTRO20008010, ASTRO20027430, ASTRO20106150, ASTRO20108190, ASTRO20168470, BLADE20003400, BLADE20003890, BRACE20038480, BRACE20039540, BRACE20059370, BRACE20108130, BRACE20108880, BRACE20115920, BRACE20116460, BRACE20232840, BRACE20248260, BRACE20253330, BRACE20284100, BRALZ20013500, BRALZ20017430, BRALZ20018340, BRAMY20000520, BRAMY20025840, BRAMY20120910, BRAMY20134140, BRAMY20135900, BRAMY20162510, BRAMY20174550, BRAMY20210400, BRAMY20211390, BRAMY20242470, BRAMY20245300, BRAMY20266850, BRAMY20285160, BRAWH20016620, BRAWH20028110, BRAWH20064050, BRAWH20096780, BRAWH20110960, BRAWH20113430, BRAWH20114000, BRAWH20118230, BRAWH20121640, BRAWH20128270, BRAWH20137480, BRCAN20103740, BRCAN20224720, BRCAN20279700, BRCAN20280210, BRCAN20283190, BRCOC20001860, BRCOC20006370, BRCOC20027510, BRCOC20055420, BRCOC20099370, BRCOC20178270, BRCOC20178560, BRHIP20003120, BRHIP20005340, BRHIP20174040, BRHIP20176420, BRHIP20191490, BRHIP20191860, BRHIP20194940, BRHIP20195890, BRHIP20222280, BRHIP20249110, BRHIP20285930, BRHIP30004880, BRSSN20013420, BRSSN20038200, BRSSN20039370, BRSSN20046790, BRSSN20066110, BRSSN20101100, BRSSN20120810, BRSSN20187310, BRTHA20046290, CD34C30004240, COLON10001350, CTONG20004690, CTONG20052650, CTONG20099550, CTONG20124220, CTONG20125640, CTONG20128430, CTONG20131560, CTONG20133390, CTONG20153300, CTONG20153580, CTONG20158040, CTONG20159530, D60ST20003580, D90ST20023970, DFNES20001530, DFNES20037420, FCBBF10001210, FCBBF10001710, FCBBF10003770, FCBBF20059090, FCBBF20064520, FCBBF20068820, FCBBF30010810, FCBBF30024750, FCBBF30025560, FCBBF30039020, FCBBF30049550, FCBBF30057290, FCBBF30083620, FCBBF30129630, FCBBF30190850, FCBBF30238870, FCBBF30240960, FCBBF30243640, FCBBF30279030, FCBBF30281880, FCBBF40001730, FEBRA10001880, FEBRA20004620, FEBRA20010120, FEBRA20018690, FEBRA20082010, FEBRA20097310, FEBRA20130190, FEBRA20132740, FEBRA20144170, FEBRA20195820, FEBRA20223220, FEBRA20233770, FEBRA20235500, FEHRT20003250, HCHON10001760, HCHON20007380, HCHON20008320, HCHON20009560, HCHON20015230, HCHON20015980, HCHON20016040, HCHON20035130, HCHON20036420, HCHON20064590, HCHON20067700, HCHON20086720, HCHON20100740, HEART20003060, HEART20017730, HEART20025980, HEART20049410, HHDPC20014320, HHDPC20030490, HHDPC20084140, HHDPC20091140, HHDPC20091780, HHDPC20092080, HLUNG20033780, IMR3220002430, KIDNE20007770, KIDNE20020150, KIDNE20021680, KIDNE20022620, KIDNE20024830, KIDNE20027950, KIDNE20101370, KIDNE20101510, KIDNE20182690, LIVER20002160, LIVER20055200, LIVER20055440, LIVER20059810, LIVER20064690, MESAN20101140, MESAN20125860, MESAN20130220, MESAN20154010, MESAN20174170, NOVAR10000910, NT2NE20010490, NT2NE20118960, NT2NE20157470, NT2RI20040990, NT2RI20041880, NT2RI20048840, NT2RI20050960, NT2RI20240080, NT2RP60000770, NT2RP70027380, NT2RP70032610, NT2RP70037240, NT2RP70192730, NT2RP70198350, NTONG20013620, NTONG20015870, NTONG20028070, NTONG20067830, NTONG20070200, NTONG20090600, NTONG20092330, OCBBF20006770, OCBBF20037440, OCBBF20046120, OCBBF20049300, OCBBF20053490, OCBBF20053730, OCBBF20054760, OCBBF20071840,. OCBBF20072240, OCBBF20078920, OCBBF20108430, OCBBF2010858,0, OCBBF20127140, OCBBF20129360, OCBBF20145760, OCBBF20153350, OCBBF20173980, OCBBF20178880, PEBLM10000710, PEBLM20013120, PERIC10000250, PLACE60060420, PLACE60177140, PROST20100460, PROST20159240, PROST20169800, PROST20176170, PUAEN20018820, PUAEN20030180, PUAEN20055020, PUAEN20083140, SKMUS20018230, SKMUS20018500, SKMUS20021530, SKMUS20024750, SKMUS20029200, SKMUS20048970, SKMUS20049030, SKNSH20008190, SKNSH20089400, SMINT20001760, SMINT20026890, SMINT20028820, SMINT20050750, SMINT20073650, SMINT20105330, SMINT20112730, SMINT20121220, SMINT20127350, SMINT20127930, SMINT20136130, SMINT20138900, SMINT20153260, SMINT20155180, SMINT20179740, SMINT20190170, SMINT20191420, SPLEN20006070, SPLEN20011410, SPLEN20026950, SPLEN20027440, SPLEN20039240, SPLEN20079260, SPLEN20095410, SPLEN20146450, SPLEN20147390, SPLEN20151210, SPLEN20160450, SPLEN20170310, SPLEN20179180, SPLEN20186430, SPLEN20212730, SPLEN20243830, SPLEN20245300, SPLEN20250390, SPLEN20252190, SPLEN20267650, SPLEN20305620, STOMA20001830, STOMA20005390, STOMA20008880, STOMA20010250, STOMA20034770, STOMA20046680, STOMA20056670, STOMA20064470, STOMA20077450, STOMA20080500, STOMA20083610, STOMA20088380, SYNOV20001520, SYNOV20001730, SYNOV20002790, SYNOV20002970, SYNOV20007000, SYNOV20008240, SYNOV20009230, SYNOV20010880, SYNOV20011110, TBAES20003770, TESOP20004000, TESOP20005270, TESTI20031270, TESTI20036380, TESTI20044310, TESTI20067200, TESTI20116830, TESTI20121550, TESTI20156100, TESTI20168480, TESTI20208400, TESTI20215990, TESTI20231940, TESTI20234360, TESTI20237520, TESTI20238610, TESTI20239510, TESTI20249990, TESTI20266740, TESTI20316870, TESTI20318090, TESTI20335050, TESTI20335200, TESTI20343570, TESTI20352620, TESTI20368330, TESTI20369650, TESTI20385960, TESTI20392250, TESTI20400940, TESTI20404240, TESTI20420620, TESTI20436560, TESTI20438570, TESTI20441940, TESTI20442760, TESTI20443090, TESTI20449200, TESTI20455090, TESTI20455620, TESTI20456110, TESTI20463580, TESTI20465350, TESTI20465690, TESTI20467210, THYMU20122730, THYMU20126900, THYMU20130890, THYMU20159430, THYMU20169680, THYMU20172150, THYMU20180280, THYMU20193640, THYMU20209590, THYMU20232090, THYMU20247480, TKIDN10000010, TKIDN20004640, TKIDN20047480, TRACH20016210, TRACH20019960, TRACH20050040, TRACH20057690, TRACH20067620, TRACH20077540, TRACH20079690, TRACH20096610, TRACH20105870, TRACH20121380, TRACH20154860, TRACH20162860, TRACH20163170, TRACH20164980, TRACH20190240, TSTOM20005690, TUTER20002830, UTERU20030570, UTERU20116570, UTERU20144640, UTERU20151980, UTERU20158800, UTERU20183640, UTERU20185230

[0329] In particular, hit data of the following 386 clones for Swiss-Prot, or GenBank, UniGene, or nr corresponded to genes or proteins which had been deposited in the Online Mendelian Inheritance in Man (OMIM), which is the human gene and disease database, (the OMIM Number is shown in the parenthesis after the Clone Name). ADIPS20004250 (601505), ADRGL10001470 (202010;103900), ADRGL20011190 (182790), ADRGL20018300 (600025), ADRGL20035850 (202110), ADRGL20078100 (103270), ASTRO10001650 (126660), ASTRO20008010 (603899), ASTRO20027430 (179555), ASTRO20106150 (602537), ASTRO20108190 (191092), ASTRO20168470 (604077), BLADE20003400 (601276), BLADE20003890 (604077), BRACE20038480 (601504), BRACE20039540 (600169), BRACE20059370 (130500;266140), BRACE20108130 (605413), BRACE20108880 (603758), BRACE20115920 (300023), BRACE20116460 (603150), BRACE20232840 (601213), BRACE20248260 (600813), BRACE20253330 (604990), BRACE20284100 (602415), BRALZ20013500 (602470), BRALZ20017430 (600658), BRALZ20018340 (600547), BRAMY20000520 (164020), BRAMY20025840 (602327), BRAMY20120910 (600188), BRAMY20134140 (603931), BRAMY20135900 (601342), BRAMY20162510 (300098), BRAMY20174550 (605464), BRAMY20210400 (603809), BRAMY20211390 (602212), BRAMY20242470 (605000), BRAMY20245300 (605367), BRAMY20266850 (605609), BRAMY20285160 (120700), BRAWH20016620 (605762), BRAWH20028110 (602330), BRAWH20064050 (135820), BRAWH20096780 (602277), BRAWH20110960 (603481), BRAWH20113430 (602649), BRAWH20114000 (138130), BRAWH20118230 (112267), BRAWH20121640 (604437), BRAWH20128270 (601997), BRAWH20137480 (602330), BRCAN20103740 (602566), BRCAN20224720 (600923;176200), BRCAN20279700 (604205), BRCAN20280210 (194538), BRCAN20283190 (602118), BRCOC20001860 (604346), BRCOC20006370 (603784), BRCOC20027510 (179555), BRCOC20055420 (603801), BRCOC20099370 (606045), BRCOC20178270 (194558), BRCOC20178560 (602567), BRHIP20003120 (604249), BRHIP20005340 (147586), BRHIP20174040 (602658), BRHIP20176420 (164020), BRHIP20191490 (600009), BRHIP20191860 (602272), BRHIP20194940 (604696), BRHIP20195890 (602211), BRHIP20222280 (603899), BRHIP20249110 (142600), BRHIP20285930 (602626), BRHIP30004880 (188840), BRSSN20013420 (300272), BRSSN20038200 (602306), BRSSN20039370 (194531), BRSSN20046790 (604077), BRSSN20066110 (605248), BRSSN20101100 (600188), BRSSN20120810 (142440), BRSSN20187310 (182900), BRTHA20046290 (602644), COLON10001350 (146900), CTONG20004690 (600019), CTONG20052650 (603871), CTONG20099550 (190370), CTONG20124220 (184756), CTONG20125640 (180510), CTONG20128430 (601797), CTONG20131560 (103390), CTONG20133390 (604077), CTONG20153300 (604334), CTONG20153580 (605652), CTONG20158040 (602862), CTONG20159530 (600395), D60ST20003580 (602443), D90ST20023970 (601525), DFNES20001530 (164500), DFNES20037420 (139259), FCBBF10001210 (602461), FCBBF10001710 (194558), FCBBF10003770 (604597), FCBBF20059090 (194542), FCBBF20064520 (164020), FCBBF20068820 (194558), FCBBF30010810 (603899), FCBBF30024750 (603706), FCBBF30025560 (600494), FCBBF30039020 (602835), FCBBF30049550 (106410), FCBBF30057290 (194556), FCBBF30083620 (300022), FCBBF30129630 (603899), FCBBF30190850 (131210), FCBBF30238870 (602320), FCBBF30240960 (604078), FCBBF30243640 (601961), FCBBF30279030 (605208), FCBBF30281880 (602517), FCBBF40001730 (176981), FEBRA10001880 (605451), FEBRA20004620 (600278), FEBRA20010120 (600368), FEBRA20018690 (194542), FEBRA20082010 (602187), FEBRA20097310 (602895), FEBRA20130190 (605863), FEBRA20132740 (602654), FEBRA20144170 (601685), FEBRA20195820 (604074), FEBRA20223220 (604633), FEBRA20233770 (603347), FEBRA20235500 (312090), FEHRT20003250 (600286), HCHON10001760 (605315), HCHON20007380 (600833), HCHON20008320 (604077), -HCHON20009560 (194548), HCHON20015230 (604646), HCHON20015980 (604789), HCHON20016040 (146732), HCHON20035130 (194529), HCHON20036420 (603434), HCHON20064590 (103950), HCHON20067700 (603054), HCHON20086720 (146732), HCHON20100740 (602281), HEART20003060 (109480), HEART20017730 (106410), HEART20025980 (602127), HEART20049410 (603777), HHDPC20014320 (602714), HHDPC20030490 (603795), HHDPC20084140 (605184), HHDPC20091140 (603054), HHDPC20091780 (227400), HHDPC20092080 (146732), HLUNG20033780 (600888), IMR3220002430 (602923), KIDNE20007770 (114890), KIDNE-20020150 (140550;603012), KIDNE20021680 (601609), KIDNE20022620 (603590), KIDNE20024830 (604205), KIDNE20027950 (194531), KIDNE20101370 (602580), KIDNE20101510 (191845), KIDNE20182690 (605226), LIVER20002160 (600816), LIVER20055200 (604814), LIVER20055440 (605277), LIVER20059810 (230350), LIVER20064690 (601841), MESAN20101140 (602567), MESAN20125860 (155750), MESAN20130220 (603778), MESAN20154010 (180480), MESAN20174170 (602516), NOVAR10000910 (159350), NT2NE20010490 (603899), NT2NE20118960 (180490), NT2NE20157470 (217000), NT2RI20040990 (106410), NT2RI20041880 (160775), NT2RI20048840 (139360), NT2RI20050960 (606103), NT2RI20240080 (603419), NT2RP60000770 (603044), NT2RP70027380 (118423), NT2RP70032610 (172430), NT2RP70037240 (604108), NT2RP70192730 (278000), NT2RP70198350 (300043), NTONG20013620 (604125), NTONG20015870 (123940), NTONG20028070 (602369), NTONG20067830 (182900), NTONG20070200 (194558), NTONG20090600 (313440), NTONG20092330 (153700), OCBBF20006770 (154500), OCBBF20037440 (602290), OCBBF20046120 (601262), OCBBF20049300 (602277), OCBBF20053490 (154550;602579), OCBBF20053730 (603604), OCBBF20054760 (603453), OCBBF20071840 (604077), OCBBF20072240 (604331), OCBBF20078920 (602120), OCBBF20108430 (139360), OCBBF20108580 (300103), OCBBF20127140 (139380), OCBBF20129360 (602142), OCBBF20145760 (600395), OCBBF20153350 (601935), OCBBF20173980 (603524), OCBBF20178880 (601617), PEBLM10000710 (601007), PEBLM20013120 (602288), PERIC10000250 (603582), PLACE60060420 (180469), PLACE60177140 (600022), PROST20100460 (158374), PROST20159240 (606019), PROST20169800 (604426), PROST20176170 (605903), PUAEN20018820 (164740), PUAEN20030180 (603263), PUAEN20055020 (604677), PUAEN20083140 (604762), SKMUS20018230 (603768), SKMUS20018500 (601402), SKMUS20021530 (606045), SKMUS20024750 (179555), SKMUS20029200 (605758), SKMUS20048970 (102610), SKMUS20049030 (161650), SKNSH20008190 (604075), SKNSH20089400 (603070), SMINT20001760 (194558), SMINT20026890 (602127), SMINT20028820 (604719), SMINT20050750 (182120), SMINT20073650 (146900), SMINT20105330 (230500;230600;230650;253010), SMINT20112730 (146900), SMINT20121220 (160776), SMINT20127350 (180740), SMINT20127930 (146900), SMINT20136130 (147220), SMINT20138900 (125660;601419), SMINT20153260 (602201), SMINT20155180 (603004), SMINT20179740 (147020), SMINT20190170 (146900), SMINT20191420 (102770), SPLEN20006070 (182900), SPLEN20011410 (602732), SPLEN20026950 (600014), SPLEN20027440 (106410), SPLEN20039240 (140550;603012), SPLEN20079260 (604074), SPLEN20095410 (602277), SPLEN20146450 (602861), SPLEN20147390 (604078), SPLEN20151210 (600267), SPLEN20160450 (604375), SPLEN20170310 (605216), SPLEN20179180 (605890), SPLEN20186430 (600052), SPLEN20212730 (114230), SPLEN20243830 (601796), SPLEN20245300 (606004), SPLEN20250390 (114220), SPLEN20252190 (604077), SPLEN20267650 (602277), SPLEN20305620 (126064), STOMA20001830 (146900), STOMA20005390 (146900), STOMA20008880 (601652;137750), STOMA20010250 (605786), STOMA20034770 (146900), STOMA20046680 (164772), STOMA20056670 (146900), STOMA20064470 (173320), STOMA20077450 (314370), STOMA20080500 (605414),.STOMA20083610 (146900), STOMA20088380 (146900), SYNOV20001520 (147200), SYNOV20001730 (147120), SYNOV20002790 (147120), SYNOV20002970 (147120), SYNOV20007000 (147120), SYNOV20008240 (147120), SYNOV20009230 (146900), SYNOV20010880 (147120), SYNOV20011110 (147120), TBAES20003770 (118990), TESOP20004000 (116810), TESOP20005270 (600641), TESTI20031270 (191161), TESTI20036380 (126650;214700), TESTI20044310 (179555), TESTI20067200 (176312), TESTI20116830 (603142), TESTI20121550 (600862), TESTI20156100 (602253), TESTI20168480 (188840), TESTI20208400 (164031), TESTI20215990 (605652), TESTI20231940 (604200), TESTI20234360 (601052), TESTI20237520 (604212), TESTI20238610 (300097), TESTI20239510 (604334), TESTI20249990 (164500), TESTI20266740 (605198), TESTI20316870 (605497), TESTI20318090 (604077), TESTI20335050 (605209), TESTI20335200 (109770), TESTI20343570 (190470), TESTI20352620 (176801;249900), TESTI20368330 (157680), TESTI20369650 (602052), TESTI20385960 (605970), TESTI20392250 (605541), TESTI20400940 (117143), TESTI20404240 (602725), TESTI20420620 (602955), TESTI20436560 (150330), TESTI20438570 (603577), TESTI20441940 (604119), TESTI20442760 (603491), TES.TI20443090 (602954), TESTI20449200 (604101), TESTI20455090 (148070), TESTI20455620 (140560), TESTI20456110 (109092), TESTI20463580 (603486), TESTI20465350 (123830), TESTI20465690 (605468), TESTI20467210 (600833), THYMU20122730 (604700), THYMU20126900 (603370), THYMU20130890 (603675), THYMU20159430 (146900), THYMU20169680 (601441), THYMU20172150 (605000), THYMU20180280 (600549), THYMU20193640 (603083;164021), THYMU20209590 (602378), THYMU20232090 (601717), THYMU20247480 (604077), TKIDN10000010 (605034), TKIDN20004640 (137028), TKIDN20047480 (602399), TRACH20016210 (136836), TRACH20019960 (182310), TRACH20050040-(603784), TRACH20057690 (164731), TRACH20067620 (600429;110800), TRACH20077540 (300080), TRACH20079690 (604078), TRACH20096610 (150330), TRACH20105870 (600495), TRACH20121380 (602513), TRACH20154860 (180240), TRACH20162860 (603845), TRACH20163170 (601739), TRACH20164980 (602277), TRACH20190240 (604633), TSTOM20005690 (605775), TUTER20002830 (602719), UTERU20030570 (602023;241200), UTERU20116570 (602330), UTERU20144640 (228000), UTERU20151980 (602038), UTERU20158800 (600738), UTERU20183640 (601281), UTERU20185230 (605333)

[0330] The clones predicted to belong to the category of enzyme and/or metabolism-related protein are the following 206 clones. 3NB6910001910, ADRGL10001470, ADRGL20035850, ADRGL20078100, ASTRO20105820, ASTRO20106150, ASTRO20130500, ASTRO20145760, BRACE20027620, BRACE20038000, BRACE20062640, BRACE20096200, BRACE20107530, BRACE20108130, BRACE20108880, BRACE20116460, BRACE20148240, BRACE2018568Q, BRACE20253160, BRALZ20017430, BRALZ20018340, BRAMY20104640, BRAMY20134140, BRAMY20153110, BRAMY20213100, BRAMY20252720, BRAWH20016620, BRAWH20105840, BRAWH20112940, BRAWH20114000, BRAWH20117950, BRAWH20125380, BRAWH20132190, BRAWH20171030, BRCAN20054490, BRCAN20224720, BRCAN20280360, BRCAN20283190, BRCAN20283380, BRCOC20001860, BRCOC20031250, BRCOC20055420, BRCOC20091960, BRCOC20144000, BRHIP10001290, BRHIP20005530, BRHIP20096850, BRHIP20103090, BRHIP20174040, BRHIP20249110, BRSSN20013420, BRSSN20015790, BRSSN20120810, BRSSN20146100, CTONG20095340, CTONG20106520, CTONG20118250, CTONG20127450, CTONG20140580, CTONG20153300, CTONG20158040, D30ST20006180, D60ST20003580, DFNES20031920, DFNES20071130, FCBBF10001820, FCBBF10003670, FCBBF30012350, FCBBF30012810, FCBBF30175310, FCBBF30243640, FEBRA10001880, FEBRA20007620, -FEBRA20130190, FEBRA20144170, FEBRA20167390, FEBRA20196630, FEHRT20003250, HCHON10001760, HCHON20003220, HCHON20015350, HEART20034320, HEART20090000, HHDPC20014320, KIDNE20002520, KIDNE20008010, KIDNE20021680, KIDNE20022620, KIDNE20028390, KIDNE20028720, KIDNE20107620, LIVER20059810, MESAN20154010, NT2NE20118960, NT2NE20157470, NT2RI20005750, NT2RI20244600, NT2RI20273230, NT2RP70032610, NT2RP70045590, NT2RP70192730, NT2RP70195430, NTONG20009770, NTONG20013620, NTONG20046140, OCBBF20028650, OCBBF20030910, OCBBF20046690, OCBBF20050770, OCBBF20053430, OCBBF20053490, OCBBF20053730, OCBBF20054760, OCBBF20078920, OCBBF20124360, OCBBF20129360, OCBBF20178880, PEBLM20044520, PEBLM20052820, PEBLM20060490, PERIC10000250, PLACE50000660, PROST20083600, PROST20169800, PUAEN20015260, PUAEN20030180, SKMUS20018230, SMINT20028820, SMINT20049090, SMINT20102780, SMINT20105330, SMINT20106290, SMINT20110660, SMINT20152940, SMINT20191420, SMINT20191530, SPLEN20021660, SPLEN20026950, SPLEN20121750, SPLEN20145720, SPLEN20149240, SPLEN20150940, SPLEN20151210, SPLEN20173510, SPLEN20212730, SPLEN20250390, SPLEN20305620, STOMA20006860, STOMA20077450, TBAES20002550, TBAES20003150, TESOP20004000, TESOP20005270, TESTI20001000, TESTI20002720, TESTI20002780, TESTI20060400, TESTI20066670, TESTI20082330, TESTI20083200, TESTI20108720, TESTI20116830, TESTI20143390, TESTI20148000, TESTI20216370, TESTI20232140, TESTI20234360, TESTI20237520, TESTI20239510, TESTI20266740, TESTI20314180, TESTI20334410, TESTI20343570, TESTI20352620, TESTI20355020, TESTI20366910, TESTI20368330, TESTI20369650, TESTI2-0375340, TESTI20397760, TESTI20416640, TESTI20432750, TESTI20463580, TESTI20465350, TESTI20471410, TESTI20473830, THYMU20023380, THYMU20111830, THYMU20126900, THYMU20169680, THYMU20202890, TKIDN20004640, TKIDN20047480, TRACH20003590, TRACH20016210, TRACH20019960, TRACH20041830, TRACH20057690, TRACH20067620, TRACH20084720, TRACH20085830, TRACH20162860, UTERU20064860, UTERU20144640, UTERU20146310, UTERU20151980

[0331] The clones predicted to belong to the category of cytoskeleton-related protein are the following 75 clones. ADRGL20011190, ADRGL20018300, ASTRO10001650, ASTRO20055750, BRACE20003070, BRACE20059370, BRACE20163350, BRAMY20121620, BRAMY20157820, BRAMY20242470, BRAWH20028110, BRAWH20137480, BRCAN20003460, BRCOC20008160, BRCOC20059510, BRHIP20115080, BRHIP20137230, BRHIP20167880, BRHIP20283030, BRHIP20285830, BRSSN20187310, CTONG10002770, CTONG20052900, CTONG20121580, FCBBF10001150, FCBBF30013770, FCBBF30015940, FCBBF30049550, FEBRA20024100, FEBRA20237640, HCHON20015980, HCHON20068410, HEART20017730, HEART20025980, HEART20061950, HEART20077670, HLUNG20016330, KIDNE20118580, MESAN20004570, NT2RI20040990, NT2RI20041880, NT2RP70037240, NT2RP70062230, NTONG20015870, NTONG20056570, NTONG20067830, NTONG20090600, OCBBF20107090, OCBBF20155060, PLACE60079250, PUAEN20040670, SKMUS20001980, SKMUS20016220, SKMUS20048970, SKMUS20049030, SMINT20024570, SMINT20026890, SMINT20121220, SMINT20138900, SPLEN20006070, SPLEN20027440, SPLEN20142100, TESTI20063830, TESTI20094230, TEST120278400, TESTI20371030, TESTI20417300, TESTI20436560, TESTI20455090, THYMU20105190, THYMU20172150, THYMU20209590, TRACH20096610, UMVEN10001560, UTERU20116570

[0332] The clones predicted to belong to the category of nuclear protein and/or RNA synthesis-related protein are the following 65 clones. BRACE20057190, BRACE20064880, BRACE20248260, BRACE20253160, BRAMY20000520, BRAMY20120910, BRAWH20113430, BRAWH20171030, BRCAN10001490, BRCAN20283190, BRCOC20037320, BRCOC20178560, BRHIP20106100, BRHIP20176420, BRHIP20243470, BRSSN20101100, CTONG20114290, CTONG20125540, CTONG20131560, CTONG20140580, DFNES20001530, FCBBF20064520, FEBRA20007620, FEBRA20010120, FEBRA20097310, FEBRA20144170, FEBRA20174410, FEBRA20215500, IMR3220002430, MESAN20101140, NT2RI20273230, OCBBF20028650, OCBBF20030910, OCBBF20078920, PROST20104000, PUAEN20018820, SKMUS20007010, SMINT20127350, SMINT20177360, SMINT20191530, SPLEN20008740, SPLEN20146450, STOMA20046680, TESTI20082330, TESTI20094470, TESTI20121550, TESTI20208400, TESTI20234360, TESTI20237520, TESTI20249990, TESTI20334410, TESTI20355020, TESTI20368330, TESTI20392760, TESTI20408970, TESTI20436560, TESTI20438570, TESTI20443090, THYMU20193640, THYMU20202890, THYMU20241210, TRACH20096610, TUTER20002830, UTERU20151980, UTERU20176320

[0333] The clones predicted to belong to the category of protein synthesis and/or transport-related protein are the following 62 clones. 3NB6910001910, ASTRO20106150, ASTRO20130500, ASTRO20141350, BRACE20038480, BRACE20052160, BRACE20057620, BRACE20106840, BRACE20172980, BRACE20192440, BRAWH20110960, BRCOC20037320, BRHIP20005530, BRSSN20120810, BRSTN20005360, CTONG20009770, CTONG20114290, CTONG20125640, CTONG20153300, D60ST20003580, DFNES20037420, FCBBF30012810, FEBRA20080810, HCHON20064590, HHDPC20014320, HHDPC20084140, HLUNG20017120, LIVER20064690, NT2NE20132170, NT2NE20157470, NT2RP70133740, NTONG20009770, NTONG20075220, NTONG20076930, OCBBF20030910, OCBBF20035930, OCBBF20153340, PLACE60060420, SMINT20152940, SPLEN20008740, SPLEN20103950, SPLEN20118300, SPLEN20212730, SPLEN20250390, STOMA20077450, TBAES20002550, TESOP20004000, TESTI20239510, TESTI20278400, TESTI20314180, TESTI20463580, THYMU20111830, THYMU20122730, THYMU20130890, THYMU20232090, TKIDN10000010, TRACH20084720, TRACH20105870, TRACH20139820, TRACH20149970, UTERU20120310, UTERU20188110

[0334] The clones predicted to belong to the category of cellular defense-related protein are the following 15 clones. BRCOC20144000, CTONG20092680, KIDNE20020150, LIVER20002160, NT2RI20050960, NT2RP70045590, OCBBF20128120, PLACE60003480, SKNSH20089400, SMINT20106290, SPLEN20039240, TESTI20001000, TESTI20455620, TRACH20028030, UTERU20176320

[0335] The clones predicted to belong to the category of development and/or differentiation-related protein are the following 13 clones. 3NB6920014590, BRAMY20211390, CTONG20091080, CTONG20121010, FCBBF30024750, KIDNE20027250, NT2NE20142210, OCBBF20054200, PROST10003220, SKMUS20007010, SPLEN20179810, STOMA20063250, TESTI20291960

[0336] The clones predicted to belong to the category of DNA-binding and/or RNA-binding protein are the following 174 clones. 3NB6920014590, ADIPS20004250, ASTRO20008010, ASTRO20168470, BLADE20003400, BLADE20003890, BRACE20057620, BRACE20060890, BRACE20064880, BRACE20068590, BRACE20248260, BRACE20253160, BRAMY20000520, BRAMY20213100, BRAMY20260910, BRAMY20270730, BRAWH20028110, BRAWH20075700, BRAWH20096780, BRAWH20113430, BRCAN10001490, BRCAN20280210, BRCAN20283190, BRCOC20144000, BRCOC20178270, BRCOC20178560, BRHIP20005340, BRHIP20106100, BRHIP20119330, BRHIP20153600, BRHIP20176420, BRHIP20191860, BRHIP20195890, BRHIP20222280, BRSSN20039370, BRSSN20046790, BRSSN20176820, CTONG20050280, CTONG20075860, CTONG20085950, CTONG20091080, CTONG20092700, CTONG20121010, CTONG20124220, CTONG20125540, CTONG20133390, CTONG20133520, CTONG20140580, CTONG20156780, D90ST20033970, FCBBF10001710, FCBBF10004370, FCBBF20059090, FCBBF20064520, FCBBF20068820, FCBBF30007680, FCBBF30010810, FCBBF30018550, FCBBF30025560, FCBBF30057290, FCBBF30083820, FCBBF30129630, FCBBF30240960, FCBBF30246230, FEBRA20010120, FEBRA20018690, FEBRA20026110, FEBRA20034680, FEBRA20040530, FEBRA20082010, FEBRA20097310, FEBRA20171380, FEBRA20195820, FEBRA20196630, FEBRA20233770, HCHON20008320,. HCHON20009560, HCHON20035130, HHDPC10000830, HHDPC20031130, KIDNE20017130, KIDNE20027250, KIDNE20027950, KIDNE20107390, KIDNE20182690, LIVER20055440, MESAN20101140, NT2NE20010490, NT2NE20089970, NT2NE20142210, NT2NE20184900, NT2RP60000770, NT2RP70044280, NT2RP70102350, NT2RP70157890, NTONG20070200, OCBBF10001850, OCBBF20020830, OCBBF20037440, OCBBF20046120, OCBBF20049300, OCBBF20066390, OCBBF20071840, OCBBF20078920, OCBBF20080410, OCBBF20108190, OCBBF20125530, OCBBF20148280, PEBLM20060360, PEBLM20060490, PEBLM20078320, PERIC10000250, PROST10003220, PROST20047390, PROST20066880, PROST20185830, PROST20189770, PROST20191640, PUAEN20018820, SKNSH20008190, SKNSH20089400, SMINT20001760, SMINT20127350, SMINT20144800, SMINT20177360, SMINT20191530, SPLEN20054290, SPLEN20079260, SPLEN20095410, SPLEN20140800, SPLEN20147390, SPLEN20160450, SPLEN20252190, SPLEN20267650, STOMA20010250, STOMA20032890, STOMA20046680, STOMA20063250, TESTI20039400, TESTI20067200, TESTI20088220, TESTI20094470, TESTI20121550, TESTI20130010, TESTI20156100, TESTI20204450, TESTI20230850, TESTI20237520, TESTI20266740, TESTI20318090, TESTI20320670, TESTI20334410, TESTI20355020, TESTI20378190, TESTI20385960, TESTI20432820, TESTI20443090, TESTI20456110, THYMU20193640, THYMU20241210, THYMU20247480, TRACH20079690, TRACH20105870, TRACH20139820, TRACH20154860, TRACH20163170, TRACH20164980, TRACH20184490, TUTER20002830, UTERU20099720, UTERU20116570, UTERU20145480, UTERU20176130, UTERU20185230

[0337] The clones predicted to belong to the category of ATP binding and/or GTP-binding protein are the following 68 clones. 3NB6910001910, BRACE20108130, BRACE20148240, BRAMY20134140, BRAMY20157820, BRAMY20174550, BRAWH20164460, BRCAN20003460, BRCAN20054490, BRCAN20283190, BRCOC20059510, BRCOC20144000, BRHIP20103090, BRHIP20115080, BRHIP20167880, BRSTN20005360, CD34C30004240, CTONG20095340, CTONG20121580, CTONG20200310, DFNES20037420, FCBBF20067810, FCBBF30012350, FCBBF30015940, FEBRA20007620, FEBRA20024100, FEBRA20144170, KIDNE20020150, KIDNE20028720, LIVER20002160, LIVER20087060, NT2RI20005750, NT2RI20041880, NT2RI20048840, NT2RI20273230, OCBBF20028650, OCBBF20046690, OCBBF20054760, OCBBF20108430, OCBBF20108630, SMINT20121220, SMINT20183530, SMINT20191530, SPLEN20026950, SPLEN20039240, SPLEN20099700, SPLEN20145720, SPLEN20179180, STOMA20006860, TESTI20035960, TESTI20355020, TESTI20397760, TESTI20400940, TESTI20417300, TESTI20443090, TESTI20455620, THYMU20105190, THYMU20202890, THYMU20209590, TKIDN20004640, TKIDN20047480, TRACH20005400, TRACH20019960, TRACH20057690, TRACH20084720, UTERU20168220, UTERU20176320, UTERU20185230

[0338] Among the clones other than the ones shown above, BRAMY20248490, FCBBF10002800, NTONG20092290, OCBBF20127040, SMINT20163960, THYMU20279750, TRACH20167220,

[0339] are clones which were predicted to highly possibly belong to the category of secretory protein and/or membrane protein based on the result of domain search by Pfam. FCBBF10002800, NTONG20092290, OCBBF20127040, SMINT20163960, TESTI20478850, THYMU20279750

[0340] The 6 clones shown above are clones which were predicted to highly possibly belong to the category of glycoprotein-related protein based on the result of domain search by Pfam. BRACE20060720, BRACE20223330, BRALZ20058880, BRAMY20148130, BRAWH20101360, BRCAN20124080, BRHIP20253660, CTONG10000620, CTONG20014280, CTONG20124010, KIDNE20109890, MESAN20171520, OCBBF20109310, OCBBF20140640, PROST20079500, PUAEN20078980, SPLEN20077500, SPLEN20143180, TESTI20017950, TESTI20184620, TESTI20208710, TESTI20211160, TEST120226230, TESTI20234140, TESTI20258460, TESTI20275030

[0341] The 26 clones shown above are clones which were predicted to highly possibly belong to the category of signal transduction-related protein based on the result of domain search by Pfam. ADRGL20048330, ASTRO20064750, ASTRO20084250, BRACE20151320, BRALZ20058880, BRHIP20207990, CTONG20093950, FCBBF30195640, FEBRA10001900, FEBRA20090290, FEBRA20214970, FEBRA20222040, KIDNE20109890, LIVER20087510, MESAN20029400,MESAN20031900, MESAN20035290, MESAN20136110, NT2NE20130190, PEBLM20060310, PERIC20004780, PROST20171280, PUAEN20078980, SMINT20115880, SPLEN20095550, TESTI20023510, TESTI20083940, TESTI20152460, TESTI20185650, TESTI20189410, TESTI20200710, TESTI20308600, TESTI20343070, TESTI20369690, TESTI20381040, UTERU20050690

[0342] The 36 clones shown above are clones which were predicted to highly possibly belong to the category of transcription-related protein based on the result of domain search by Pfam. BGGI120006160, BRACE20053480, BRACE20190040, BRACE20223330, BRAWH20101360, BRAWH20185060, BRCOC20023230, BRHIP20252450, BRSSN20105870, BRSSN20117990, BRTHA20000570, CTONG20098440, CTONG20129960, CTONG20146300, CTONG20155180, FEBRA20025270, HEART20083640, KIDNE20009470, LIVER20035680, MESAN20029400, MESAN20031900, MESAN20186700, NOVAR10000150, NTONG20029480, OCBBF20079310, OCBBF20082830, PEBLM20042900, PLACE60136500, PLACE60136720, PROST20114390, SKNSH20020540, SMINT20013480, SMINT20174360, SPLEN20077500, SPLEN20119810, SPLEN20126190, SPLEN20174260, SPLEN20211220, TESTI20046750, TESTI20057750, TESTI20061110, TESTI20197940, TESTI20211160, TESTI20226230, TESTI20255820, TESTI20317600, TESTI20377230, THYMU20111180, THYMU20115850, THYMU20143270, THYMU20240710, UTERU20055330, UTERU20055930, UTERU20064000, UTERU20119060

[0343] The 55 clones shown above are clones which were predicted to highly possibly belong to the category of enzyme and/or metabolism-related protein based on the result of domain search by Pfam. TESTI20127760, TESTI20392270

[0344] The 2 clones shown above are clones which were predicted to highly possibly belong to the category of cell division and/or cell proliferation-related protein based on the result of domain search by Pfam. FCBBF30262510, MESAN20031900, NT2NE20125050, SMINT20068010, SPLEN20163560, STOMA20092890, TESTI20382750

[0345] The 7 clones shown above are clones which were predicted to highly possibly belong to the category of cytoskeleton-related protein based on the result of domain search by Pfam. THYMU20118520

[0346] The clone shown above is clone which were predicted to highly possibly belong to the category of nuclear protein and/or RNA synthesis-related protein based on the result of domain search by Pfam. BRACE20053480, BRACE20240740, KIDNE20009470, OCBBF20140890, SMINT20035690, UTERU20064000

[0347] The 6 clones shown above are clones which were predicted to highly possibly belong to the category of protein synthesis and/or transport-related protein based on the result of domain search by Pfam. ADRGL20048330, ASTRO20064750, ASTRO20084250, BRACE20151320, BRACE20190040, BRACE20223330, BRALZ20058880, BRAMY20103570, BRCOC20023230, BRHIP20207990, BRTHA20000570, CTONG20093950, CTONG20129960, CTONG20146300, CTONG20155180, CTONG20160560, FCBBF10004120, FCBBF30195640, FEBRA10001900, FEBRA20090290, FEBRA20214970, FEBRA20222040, HCHON20008150, HEART20083640, KIDNE20109890, LIVER20035680, LIVER20087510, MESAN20029400, MESAN20031900, MESAN20035290, MESAN20136110, MESAN20186700, NT2NE20130190, NT2RI20025640, NTONG20029480, PEBLM20060310, PERIC20004780, PROST20114390, PROST20171280, PUAEN20078980, SMINT20115880, SPLEN20095550, SPLEN20119810, TESTI20023510, TESTI20057750, TESTI20083940, TESTI20152460, TESTI20185650, TESTI20189410, TESTI20200710, TESTI20308600, TESTI20343070, TESTI20369690, TESTI20381040, THYMU20115850, UTERU20050690, UTERU20055330

[0348] The 57 clones shown above are clones which were predicted to highly possibly belong to the category of DNA-binding and/or RNA-binding protein based on the result of domain search by Pfam. PLACE60136720

[0349] The clone shown above is a clone which was predicted to highly possibly belong to the category of ATP-binding and/or GTP-binding protein based on the result of domain search by Pfam.

[0350] The 213 clones shown below are clones which were unassignable to any of the above-mentioned categories, but have been predicted to have some functions based on homology search for their full-length nucleotide sequences and motif search in their deduced ORFs. Clone Name, Definition in the result of homology search or Motif Name in the motif search, demarcated by a double slash mark (//), are shown below. ADRGL20028570//Rattus norvegicus MG87 mRNA, complete cds. ADRGL20061930//transposon-derived Busterl transposase-like protein ASTR020012490//Eukaryotic initiation factor 1A ASTR020072210//PERIAXIN. ASTR020114370//Mus musculus SMARI mRNA, complete cds. ASTR020125520//dnaj protein [Schizosaccharomyces pombe] ASTR020143630//KH domain// Bacterial regulatory proteins, crp family ASTR020155290//TPR Domain// TPR Domain// TPR Domain ASTR020181690//oocyte-specific protein P100 BGGI110001930//UBX domain BRACE20011070//Mus musculus F-box protein FBX15 mRNA, partial cds. BRACE20039440//Drosophila melanogaster CHARYBDE (charybde) mRNA, complete cds. BRACE20050900//TPR Domain// TPR Domain// TPR Domain// TPR Domain BRACE20053280//Mus musculus Pdz-containing protein (Pdzx) mRNA, complete cds. BRACE20057730//toxin sensitivity protein KTI12 homolog BRACE20058580//Homo sapiens HCMOGT-1 mRNA for sperm antigen, complete cds. BRACE20063780//NOLl/NOP2/sun family BRACE20269200//Heat-labile enterotoxin alpha chain BRACE20276430//Homo sapiens retinoblastoma-associated protein RAP140 mRNA, complete cds. BRACE20286360//Alpha adaptin carboxyl-terminal domain BRAMY10001300//Homo sapiens MAGE-Elb mRNA, complete cds. BRAMY20045240//Flagellar L-ring protein BRAMY20054880//Rattus norvegicus KPL2 (Kpl2) mRNA, complete cds. BRAMY20167060//Collagen triple helix repeat (20 copies) BRAMY20184670//Homo sapiens mRNA for ALEXI, complete cds. BRAMY20217460//Homo sapiens cardiac voltage gated potassium channel modulatory subunit mRNA, complete cds, alternatively spliced. BRAMY20240040//Homo sapiens suppressor of white apricot homolog 2 (SWAP2) mRNA, complete cds. BRAMY20247110//Mus musculus semaphorin cytoplasmic domain-associated protein 3A (Semcap3) mRNA, complete cds. BRAWH20004600//Mus musculus mRNA for NAKAP95, complete cds. BRAWH20011710//cytoplasmic linker 2 BRAWH20012390//Trichomonas vaginalis mRNA for centrin (cel gene). BRAWH20017010//Homo sapiens testes development-related NYD-SP22 mRNA, complete cds. BRAWH20029630//Homo sapiens bet3 (BET3) mRNA, complete cds. BRAWH20138660//Homo sapiens stonin 2 mRNA, complete cds. BRCOC20008500//Human ras inhibitor mRNA, 3end. BRCOC20026640//Gag P30 core shell protein BRCOC20035130//14-3-3 PROTEIN EPSILON (MITOCHONDRIAL IMPORT STIMULATION FACTOR L SUBUNIT) (PROTEIN KINASE C INHIBITOR PROTEIN-1) (KCIP-1) (14-3-3E). BRCOC20074760//CDC4-LIKE PROTEIN (FRAGMENT). BRCOC20110100//Integrase core domain BRCOC20176520//Rattus norvegicus mRNA for type II brain 4.1, complete cds. BRHIP20001630//Protein of unknown function DUF16 BRHIP20132860//Homo sapiens rhophilin-like protein mRNA, complete cds. BRHIP20143730//MYND finger BRHIP20175420//Mus musculus partial mRNA for stretch responsive protein 278 (sr278 gene). BRHIP20236950//Outer Capsid protein VP4 (Hemagglutinin) BRSSN20014260//RIBONUCLEASE INHIBITOR. BRSSN20018690//Homo sapiens NY-REN-25 antigen mRNA, partial cds. BRSSN20021600//RING CANAL PROTEIN (KELCH PROTEIN). BRSSN20177570//Phosducin BRSTN10000830//Kelch motif// Kelch motif// Kelch motif// Kelch motif CTONG10000220//Mus musculus cerebellar postnatal development protein-i (Cpdl) mRNA, partial cds. CTONG10000930//Armadillo/beta-catenin-like repeats CTONG20027090//Glypican// Leucine Rich Repeat// Leucine Rich Repeat CTONG20076130//ZINC FINGER PROTEIN 185 (LIM-DOMAIN PROTEIN ZNF185) (P1-A). CTONG20096750//Disintegrin CTONG20100240//Mus musculus radial spokehead-L protein (Rshll) mRNA, complete cds. CTONG20139860//Homo sapiens nasopharyngeal carcinoma susceptibility protein LZ16 mRNA, complete cds. CTONG20143690//MYND finger CTONG20149460//RING CANAL PROTEIN (KELCH PROTEIN). CTONG20165050//Keratin, high sulfur B2 protein CTONG20186320//RING CANAL PROTEIN (KELCH PROTEIN). D30ST20013280//ARP2/3 COMPLEX 16 KDA SUBUNIT (P16-ARC). D30ST20024360//Homo sapiens neuroendocrine differentiation factor mRNA, complete cds. D90ST20031370//Homo sapiens mRNA for partial putative TCPTP-interacting protein (ptpip5 gene). DFNES20014040//TRICHOHYALIN. FCBBF10000630//Homo sapiens huntingtin interacting protein HYPB mRNA, partial cds. FCBBF10000770//Homo sapiens REC8 mRNA, partial cds. FCBBF10005060//CELLULAR RETINALDEHYDE-BINDING PROTEIN (CRALBP). FCBBF10005500//Keratin, high sulfur B2 protein FCBBF20014270//ACYL-COA-BINDING PROTEIN (ACBP) (DIAZEPAM BINDING INHIBITOR) (DBI) (ENDOZEPINE) (EP). FCBBF20042170//Homo sapiens NIBAN mRNA, complete cds. FCBBF30016320//SecA protein, amino terminal region FCBBF30033050//Sm protein FCBBF30054440//PLAT/LH2 domain FCBBF30225660//Ank repeat// Ank repeat// Ank repeat// K+channel tetramerisation domain// BTB/POZ domain FCBBF30233680//GlO protein FCBBF30246630//H.sapiens mRNA for ZYG homologue. FCBBF30250730//TRICHOHYALIN. FCBBF30252520//Homo sapiens bicaudal-D (BICD) mRNA, alternatively spliced, partial cds. FCBBF30252800//NDRG1 PROTEIN (DIFFERENTIATION-RELATED GENE 1 PROTEIN) (DRG1) (REDUCING AGENTS AND TUNICAMYCIN-RESPONSIVE PROTEIN) (RTP) (NICKEL- SPECIFIC INDUCTION PROTEIN CAP43). FCBBF30252850//Mus musculus peripherial benzodiazepine receptor associated protein (Pap7) mRNA, complete cds. FCBBF30285280//Keratin, high sulfur B2 protein// Bacterial regulatory proteins, gntR family FEBRA20088360//ALPHA-ADAPTIN C (CLATHRIN ASSEMBLY PROTEIN COMPLEX 2 ALPHA-C LARGE CHAIN) (100 KDA COATED VESICLE PROTEIN C) (PLASMA MEMBRANE ADAPTOR HA2/AP2 ADAPTIN ALPHA C SUBUNIT). FEBRA20184330//Rattus norvegicus glutamate receptor interacting protein 2 (GRIP2) mRNA, complete cds. FEBRA20192420//Cyclin-dependent kinase inhibitor// IQ calmodulin-binding motif// IQ calmodulin-binding motif// IQ calmodulin-binding motif// IQ calmodulin-binding motif// IQ calmodulin-binding motif FEBRA20196370//Cyclin-dependent kinase inhibitor// IQ calmodulin-binding motif// IQ calmodulin-binding motif// IQ calmodulin-binding motif// IQ calmodulin-binding motif// IQ calmodulin-binding motif FEBRA20225040//high-glucose-regulated protein 8 HCHON20001560//TRANSCRIPTION FACTOR-LIKE PROTEIN MORF4. HCHON20003440//Homo sapiens cyclin-D binding Myb-like protein mRNA, complete cds. HCHON20010990//TPR Domain HCHON20059870//Hypothetical protein. 1HHDPC20034390//Cereal trypsin/alpha-amylase inhibito HHDPC20057420//Mus musculus proline-rich protein (Bprp) mRNA, complete cds. HHDPC20064600//SUPPRESSOR PROTEIN SRP40. HLUNG20023340//Mus musculus SLM-1 (Slml) mRNA, complete cds. KIDNE20007210//Xenopus laevis mRNA for RPA interacting protein alpha (ripalpha gene). KIDNE20028830//K-box region KIDNE20115080//Homo sapiens mRNA for hNBL4, complete cds. KIDNE20124400//Homo sapiens mRNA for ALEX1, complete cds. KIDNE20127100//Drosophila melanogaster Diablo (dbo) mRNA, complete cds. KIDNE20127750//Homo sapiens partial mRNA for transport-secretion protein 2.1 (TTS-2.1 gene). KIDNE20190740//Rattus norvegicus SNIP-b mRNA, complete cds. LIVER10004790//EF hand LIVER20011130//Homo sapiens F-box protein FBL9 mRNA, partial cds. LIVER20064100//Ciona intestinalis mRNA for myoplasmin-Cl, complete cds. LIVER20080530//Drosophila melanogaster forked mRNA for large Forked protein, complete cds. MAMGL10000830//Drosophila melanogaster L82B (L82) mRNA, complete cds. MESAN20036460//Corticotropin-releasing factor family MESAN20127350//myelin expression factor-3 MESAN20141920//Human ovarian cancer downregulated myosin heavy chain homolog (Docl) mRNA, complete cds. NT2NE20010400//Homo sapiens GLO13 mRNA, complete cds. NT2NE20122430//GLYOXYLATE-INDUCED PROTEIN. NT2NE20158600//erythroid ankyrin - Synechocystis sp. (strain PCC 6803). NT2RI20001330//Homo sapiens KE03 protein mRNA, partial cds. NT2RI20009870//lunatic fringe precursor [Mus musculus] NT2RI20046080//recA bacterial DNA recombination proteins NT2RI20091730//Molluscan rhodopsin C-terminal tail NT2RP60000850//Bos taurus RPGR-interacting protein-i (RPGRIP1) mRNA, complete cds. NT2RP70080850//SPRY domain// Adenovirus EBI 55K protein / large t-an NT2RP70105210//Myc amino-terminal region NT2RP70188710//Yeast PIR proteins NT2RP70194450//Bacterial regulatory proteins, crp family NTONG20052650//Gallus gallus Xin mRNA, complete cds. NTONG20064400//REPETIN. NTONG20064840//Mus musculus slpl mRNA for synaptotagmin-like protein 1, complete cds. NTONG20066460//Mus musculus Gd mRNA for gasdermin, complete cds. NTONG20067090//Mus musculus mRNA for Sh3yll, complete cds. NTONG20070340//collagen alpha 1(IX) chain NTONG20083650//TPR Domain// TPR Domain// TPR Domain// PPR repeat// TPR Domain// PPR repeat// TPR Domain NTONG20088620//Homo sapiens genethonin 3 mRNA, partial cds. OCBBF10000540//Mus musculus rjs (ris) mRNA, complete cds. OCBBF20019380//seizure related gene 6 OCBBF20022900//Homo sapiens SCHIP-1 mRNA, complete cds. OCBBF20030280//Rattus norvegicus hfb2 mRNA, complete cds. OCBBF20046470//ARFAPTIN 1. OCBBF20049840//Homo sapiens mRNA for neurabin II protein. OCBBF20068490//Mus musculus RW1 protein mRNA, complete cds. OCBBF20071960//Coturnix coturnix japonica qMEF2D gene. OCBBF20073540//Homo sapiens p30 DBC mRNA, complete cds. OCBBF20121390//RING CANAL PROTEIN (KELCH PROTEIN). OCBBF20127550//Outer Capsid protein VP4 (Hemagglutinin) OCBBF20148730//RING CANAL PROTEIN (KELCH PROTEIN). OCBBF20178150//Plasmodium falciparum ADA2-like protein gene, partial cds. PEBLM10000240//Domain found in Dishevelled, Egl-10, and Ple PROST20047270//CRAL/TRIO domain. PROST20112970//Sterile alpha motif (SAM)/Pointed domain// SAM domain (Sterile alpha motif) PUAEN10000850//Uncharacterized protein family UPF0025// Secl family PUAEN20011880//Mus musculus mRNA for MIWI (piwi), complete cds. PUAEN20051100//Mus musculus otogelin mRNA, complete cds. PUAEN20108240//Drosophila melanogaster ankyrin 2 (Ank2) mRNA, complete cds. SKMUS20084740//Syndecan domain SMINT20053300//Homo sapiens hepatocellular carcinoma-associated antigen 59 mRNA, complete cds. SMINT20071400//NOL1/NOP2/sun family SMINT20101440//Human cisplatin resistance associated alpha protein (hCRA alpha) mRNA, complete cds. SMINT20110330//pKID domain SMINT20122910//Mus musculus StAR-related protein 1-4E mRNA, partial cds. SMINT20131810//ENV polyprotein (coat polyprotein) SMINT20168570//Homo sapiens mRNA for stabilin-1 (stabl gene). SPLEN20008390//Human placenta (Diff48) mRNA, complete cds. SPLEN20084600//RING CANAL PROTEIN (KELCH PROTEIN). SPLEN20128000//Xenopus laevis XMAB21 (Xmab-21) mRNA, complete cds. SPLEN20149110//Dishevelled specific domain SPLEN20171470//Keratin, high sulfur B2 protein SPLEN20194050//Homo sapiens HOTTL protein mRNA, complete cds. SPLEN20214580//Mus musculus mdgl-l mRNA, complete cds. STOMA20057820//Uncharacterized protein family UPF0024 STOMA20063980//Collagen triple helix repeat (20 copies) STOMA20069040//Keratin, high sulfur B2 protein SYNOV20017080//UBX domain TBAES20000590//Cytochrome P450// Cytochrome P450 TESTI20001170//HORMA domain TESTI20031810//Bacterial luciferase// Domain of unknown function DUF28 TESTI20044230//Mus musculus testis-specific Y-encoded-like protein (Tspyll) mRNA, complete cds. TESTI20098350//VAT-Nn domain TESTI20157520//K+channel tetramerisation domain// K+channel tetramerisation domain TESTI20170350//Cystine-knot domain TESTI20192800//Homo sapiens nasopharyngeal carcinoma susceptibility protein LZ16 mRA, complete cds. TESTI20199750//TRICHOHYALIN. TESTI20202650//Repeat in HS1/Cortactin TESTI20229600//Drosophila-melanogaster SP2353 mRNA, complete cds. TESTI20231920//Gag P30 core shell protein TESTI20242830//E2 (early) protein, C terminal// Syndecan domain TESTI20254540//Homo sapiens hepatocellular carcinoma-associated antigen 59 mRNA, complete cds. TESTI20320440//THIOREDOXIN. TESTI20327680//EF hand// EF hand TESTI20328280//KE2 family protein// Troponin TESTI20351830//K-box region TESTI20370020//Bleomycin resistance protein TESTI20391210//IQ calmodulin-binding motif TESTI20408150//Keratin,-high sulfur B2 protein TEST120451990//SAP domain TESTI20467970//Neurohypophysial hormones, N-terminal Domain// Neurohypophysial hormones, N-terminal Domain// Neurohypophysial hormones, N- terminal Domain// Neurohypophysial hormones, N-terminal Domain// Neurohypophysial hormones, N-terminal Domain// Neurohypophysial hormones, N- terminal Domain// Neurohypophysial hormones, N-terminal Domain// Neurohypophysial hormones, N-terminal Domain// Neurohypophysial hormones, N- terminal Domain THYMU20108310//Mouse NCBP-29 mRNA for PW29, complete cds. THYMU20142040//WISKOTT-ALDRICH SYNDROME PROTEIN HOMOLOG (WASP). THYMU20194360//Kelch motif THYMU20239000//collagen alpha 1(XI) chain TOVAR20004760//Leucine Rich Repeat// Leucine Rich Repeat// Leucine Rich Repeat TRACH20005020//Ank repeat// MutT-like domain TRACH20007020//TRICHOHYALIN. TRACH20048450//PROTEIN K4 (PROTEIN K3). TRACH20068700//Homo sapiens adaptor protein CIKS mRNA, complete cds. TRACH20076760//Keratin, high sulfur B2 protein TRACH20135520//TBC domain// Rhodanese-like domain TRACH20141240//Mus musculus G21 protein mRNA, complete cds. TRACH20183170//Rattus norvegicus Sprague-Dawley SM-20 MRNA, complete cds. UTERU20000740//Human fusion protein mRNA, complete cds. UTERU20004240//CGI-96 protein UTERU20006960//endoplasmic reticulum resident protein 58 UTERU20022940//Human (p23) MRNA, complete cds. UTERU20046640//Mus musculus ldlBp (LDLB) mRNA, complete cds. UTERU20065930//GTP-RHO BINDING PROTEIN 1 (RHOPHILIN). UTERU20115740//Human PMS2 related (hPMSR3) gene, complete cds. UTERU20179880//TPR Domain// TPR Domain// TPR Domain// TPR Domain

[0351] With respect to the remaining 882 clones, there are so far no information available for estimating their functions. However, there is the possibility that the functions of these clones will be revealed in future. Their Clone Names are indicated below. 3NB6920014080, ADRGL20000640, ADRGL20012870, ADRGL20013010, ADRGL20044590, ADRGL20067670, ADRGL20068170, ADRGL20068460, ADRGL20073570, ADRGL20076360, ADRGL20083310, ASTRO20032120, ASTRO20100720, ASTRO20111490, ASTRO20114610, ASTRO20136710, ASTRO20138020, ASTRO20152140, ASTRO20166810, ASTRO20173480, BLADE20004630, BRACE20019540, BRACE20037660, BRACE20038850, BRACE20051690, BRACE20054500, BRACE20055180, BRACE20056810, BRACE20057420, BRACE20058810, BRACE20060840, BRACE20061740, BRACE20062400, BRACE20062740, BRACE20063800, BRACE20063930, BRACE20082950, BRACE20090440, BRACE20096540, BRACE20097320, BRACE20099570, BRACE20106690, BRACE20109370, BRACE20109830, BRACE20111830, BRACE20114780, BRACE20115450, BRACE20118380, BRACE20121850, BRACE20136240, BRACE20141080, BRACE20142320, BRACE20142570, BRACE20148210, BRACE20150310, BRACE20152870, BRACE20163150, BRACE20165830, BRACE20171240, BRACE20175870, BRACE20190440, BRACE20220300, BRACE20223280, BRACE20229280, BRACE20230700, BRACE20235400, BRACE20262930, BRACE20262940, BRACE20266750, BRACE20267250, BRACE20269710, BRACE20283920, BRACE20287410, BRALZ20014450, BRALZ20019660, BRALZ20059500, BRALZ20065600, BRALZ20075450, BRALZ20075760, BRALZ20080310, BRALZ200886-90, BRAMY10001570, BRAMY20004110, BRAMY20011140, BRAMY20071850, BRAMY20102080, BRAMY20110640, BRAMY20116790, BRAMY20121190, BRAMY20137560, BRAMY20147540, BRAMY20160700, BRAMY20163250, BRAMY20163270, BRAMY20167710, BRAMY20168920, BRAMY20170140, BRAMY20178640, BRAMY20182730, BRAMY20183080, BRAMY20196000, BRAMY20204450, BRAMY20205740, BRAMY20229840, BRAMY20230600, BRAMY20250240, BRAMY20250320, BRAMY20261680, BRAMY20267130, BRAMY20268990, BRAMY20277140, BRAMY20280720, BRAMY20285930, BRAMY20286820, BRAWH10000930, BRAWH20012410, BRAWH20014920, BRAWH20016660, BRAWH20100690, BRAWH20103180, BRAWH20106180, BRAWH20107540, BRAWH20110660, BRAWH20111550, BRAWH20122770, BRAWH20126190, BRAWH20126980, BRAWH20139410, BRAWH20142340, BRAWH20147290, BRAWH20155950, BRAWH20158530, BRAWH20160280, BRAWH20162690, BRAWH20166790, BRAWH20173050, BRAWH20182060, BRCAN20006200, BRCAN20006390, BRCAN20060190, BRCAN20126130, BRCAN20143700, BRCAN20147880, BRCAN20216690, BRCAN20237240, BRCAN20263400, BRCAN20273100, BRCAN20273340, BRCAN20275130, BRCAN20280400, BRCAN20284600, BRCOC20004870, BRCOC20020850, BRCOC20031000, BRCOC20031870, BRCOC20037400, BRCOC20093800, BRCOC20105100, BRCOC20117690, BRCOC20119960, BRCOC20122290, BRCOC20128130, BRCOC20135730, BRCOC20147480, BRCOC20148330, BRCOC20155970, BRCOC20158240, BRHIP10001740, BRHIP20104440, BRHIP20105710, BRHIP20107440, BRHIP20110800, BRHIP20115760, BRHIP20123140, BRHIP20129720, BRHIP20139720, BRHIP20140630, BRHIP20142850, BRHIP20143860, BRHIP20149540, BRHIP20153560, BRHIP20169680, BRHIP20169900, BRHIP20170100, BRHIP20173150, BRHIP20180140, BRHIP20186120, BRHIP20186500, BRHIP20190070, BRHIP20196410, BRHIP20205090, BRHIP20208420, BRHIP20214950, BRHIP20227080, BRHIP20230710, BRHIP20232290, BRHIP20238690, BRHIP20240460, BRHIP20254480, BRHIP20277620, BRHIP20284800, BRHIP30001110, BRSSN10000920, BRSSN20006340, BRSSN20015030, BRSSN20028570, BRSSN20038410, BRSSN20046570, BRSSN20046860, BRSSN20097020, BRSSN20105960, BRSSN20108300, BRSSN20121030, BRSSN20152380, BRSSN20159070, BRSSN20159820, BRSTN20000580, BRTHA20046390, CD34C30001250, CD34C30003140, CD34C30004940, COLON20043180, CTONG20002180, CTONG20028410, CTONG20038890, CTONG20049410, CTONG20077790, CTONG20082690, CTONG20091320, CTONG20095270, CTONG20095290, CTONG20096430, CTONG20097660, CTONG20099630, CTONG20101480, CTONG20105660, CTONG20106230, CTONG20108210, CTONG20124470, CTONG20126070, CTONG20128470, CTONG20136300, CTONG20138030, CTONG20139070, CTONG20140320, CTONG20141650, CTONG20146970, CTONG20147050, CTONG20150910, CTONG20158150, CTONG20162170, CTONG20163550, CTONG20164990, CTONG20265130, CTONG20273610, D30ST10002670, D30ST10002700, D30ST20006540, D30ST20007340, D30ST20024170, D30ST20024520, D30ST20037970, D30ST30002910, D60ST20004450, D90ST20000310, D90ST20035800, DFNES10000030, DFNES10001850, DFNES20010910, DFNES20055270, DFNES20082800, FCBBF10003740, FCBBF20006780, FCBBF20023700, FCBBF20035280, FCBBF20054280, FCBBF20056370, FCBBF20071860, FCBBF20072650, FCBBF20075560, FCBBF20076330, FCBBF30001840, FCBBF30016570, FCBBF30019120, FCBBF30028180, FCBBF30052180, FCBBF30062880, FCBBF30070770, FCBBF30071520, FCBBF30170590, FCBBF30178730, FCBBF30189490, FCBBF30199610, FCBBF30240020, FCBBF30242250, FCBBF30262360, FCBBF30266780, FCBBF30266920, FCBBF30278630, FCBBF30284720, FCBBF40001420, FCBBF40005480, FEBRA20003210, FEBRA20017050, FEBRA20018280, FEBRA20025520, FEBRA20026280, FEBRA20027810, FEBRA20034360, FEBRA20037500, FEBRA20042190, FEBRA20052910, FEBRA20060610, FEBRA20072120, FEBRA20079310, FEBRA20082100, FEBRA20095140, FEBRA20098460, FEBRA20161120, FEBRA20166540, FEBRA20176800, FEBRA20197110, FEBRA20204000, FEBRA20204060, FEBRA20216360, FEBRA20226010, FEBRA20229560, FEBRA20232850, FELNG20002410, HCHON20002260, HCHON20008980, HCHON20009350, HCHON20011160, HCHON20014970, HCHON20022470, HCHON20036760, HCHON20043590, HCHON20067220, HCHON20074820, HCHON20076500, HEART20021840, HEART20037810, HEART20049400, HEART20063340, HEART20067870, HEART20067890, HEART20074430, HEART20089940, HEART20095990, HHDPC10000650, HHDPC20006920, HHDPC20057940, HHDPC20095280, HLUNG20016770, HLUNG20084390, KIDNE20006780, KIDNE20011170, KIDNE20013730, KIDNE20018730, KIDNE20018970, KIDNE20021980, KIDNE20029800, KIDNE20067330, KIDNE20079440, KIDNE20096280, KIDNE20096470, KIDNE20100840, KIDNE20102650, KIDNE20104300, KIDNE20106740, KIDNE20107500, KIDNE20112000, KIDNE20120090, KIDNE20122910, KIDNE20132180, KIDNE20138010, KIDNE20141190, KIDNE20144890, KIDNE20148900, KIDNE20163880, KIDNE20180710, KIDNE20186780, LIVER10001260, LIVER20011910, LIVER20028420, LIVER20038540, LIVER20084730, LIVER20085800, MESAN20106640, MESAN20121130, MESAN20132110, MESAN20138450, MESAN20157080, MESAN20161590, MESAN20164090, MESAN20182090, NESOP10001080, NOVAR1,0001020, NOVAR20003520, NT2NE20003740, NT2NE20010210, NT2NE20015240, NT2NE20043780, NT2NE20053580, NT2NE20072200, NT2NE20074250, NT2NE20089610, NT2NE20108540, NT2NE20110360, NT2NE20146810, NT2NE20152750, NT2NE20172590, NT2NE20174800, NT2NE20174920, NT2NE20187390, NT2RI20022600, NT2RI20023160, NT2RI20023590, NT2RI20036670, NT2RI20055790, NT2RI20069730, NT2RI20198260, NT2RI20203900, NT2RI20207030, NT2RI20216250, NT2RI20244960, NT2RI20250750, NT2RI20252550, NT2RP70010740, NT2RP70056750, NT2RP70075240, NT2RP70077660, NT2RP70085440, NT2RP70110860, NT2RP70111320, NT2RP70130020, NT2RP70137640, NT2RP70143480, NT2RP70147210, NT2RP70150800, NT2RP70169110, NT2RP70175670, NT2RP70181970, NT2RP70190640, NT2RP70203790, NTONG20050620, NTONG20050860, NTONG20065010, NTONG20077560, NTONG20090680, OCBBF20005230, OCBBF20020150, OCBBF20029800, OCBBF20032460, OCBBF20041680, OCBBF20045330, OCBBF20047570, OCBBF20048660, OCBBF20051610, OCBBF20060300, OCBBF20061720, OCBBF20062140, OCBBF20062410, OCBBF20074140, OCBBF20076220, OCBBF20079460, OCBBF20081380, OCBBF20084660, OCBBF20085200, OCBBF20088220, OCBBF20094240, OCBBF20097720, OCBBF20100400, OCBBF20103130, OCBBF20104040, OCBBF20105570, OCBBF20107920, OCBBF20111770, OCBBF20118970, OCBBF20126780, OCBBF20130110, OCBBF20139260, OCBBF20151150, OCBBF20164050, OCBBF20164670, OCBBF20170690, OCBBF20173060, OCBBF20173250, OCBBF20178990, OCBBF20186870, OCBBF20189560, PEBLM20024550, PEBLM20071880, PEBLM20072960, PERIC20002140, PERIC20003860, PLACE60004630, PLACE60119750, PLACE60138830, PLACE60153220, PLACE60155130, PLACE60169420, PLACE60181070, PLACE60187690, PLACE60188340, PROST10004800, PROST20005670, PROST20021010, PROST20024890, PROST20029270, PROST20052280, PROST20057930, PROST20059040, PROST20087700, PROST20097950, PROST20111050, PROST20120050, PROST20121900, PROST20123530, PROST20127400, PROST20130530, PROST20132600, PROST20133270, PROST20144220, PROST20149160, PROST20149250, PROST20151240, PROST20152460, PROST20153320, PROST20166680, PROST20168290, PROST20178360, PUAEN20025680, PUAEN20027580, PUAEN20044000, PUAEN20045110, PUAEN20045250, PUAEN20052470, PUAEN20081230, PUAEN20085150, RECTM10001410, RECTM20003490, RECTM20005100, SKMUS20012010, SKMUS20031680, SKMUS20046670, SKNMC20006220, SKNSH20034660, SKNSH20062340, SKNSH20080430, SKNSH20087770, SKNSH20091970, SMINT20005410, SMINT20008240, SMINT20011140, SMINT20011580, SMINT20014580, SMINT20015590, SMINT20023280, SMINT20033170, SMINT20033400, SMINT20042990, SMINT20047810, SMINT20056210, SMINT20058000, SMINT20060780, SMINT20065960, SMINT20076470, SMINT20080540, SMINT20089170, SMINT20092330, SMINT20092720, SMINT20098320, SMINT20103690, SMINT20105000, SMINT20108530, SMINT20109970, SMINT20122850, SMINT20132280, SMINT20153530, SMINT20158100, SMINT20161220, SMINT20162860, SMINT20164400, SMINT20164770, SMINT20173190, SPLEN10000830, SPLEN20000640, SPLEN20002220, SPLEN20008820, SPLEN20013540, SPLEN20016260, SPLEN20019450, SPLEN20020070, SPLEN20022230, SPLEN20023140, SPLEN20031600, SPLEN20032040, SPLEN20032190, SPLEN20033960, SPLEN20040600, SPLEN20076530, SPLEN20101190, SPLEN20106250, SPLEN20129610, SPLEN20146690, SPLEN20149190, SPLEN20152610, SPLEN20157300, SPLEN20158900, SPLEN20158990, SPLEN20160690, SPLEN20160980, SPLEN20166270, SPLEN20171210, SPLEN20176200, SPLEN20193110, SPLEN20198110, SPLEN20204170, SPLEN20212950, SPLEN20214400, SPLEN20225220, SPLEN20242320, SPLEN20242730, SPLEN20249560, SPLEN20261440, SPLEN20264110, SPLEN20279950, SPLEN20280660, SPLEN20303970, STOMA20013890, STOMA20026880, STOMA20036460, STOMA20048520, STOMA20048840, STOMA20062290, STOMA20067800, STOMA20072690, STOMA20076800, STOMA20086140, STOMA20092560, SYNOV20003970, TCOLN20001390, TESOP20000900, TESOP20003120, TESTI10000940, TESTI20004890, TESTI20011200, TESTI20018230, TESTI20029930, TESTI20030310, TESTI20030890, TESTI20038270, TESTI20066770, TESTI20076850, TESTI20086210, TESTI20087620, TESTI20094020, TESTI20098530, TESTI20102800, TESTI20105720, TESTI20112940, TESTI20114070, TESTI20116650, TESTI20122310, TESTI20129150, TESTI20129220, TESTI20130120, TESTI20135660, TESTI20136990, TESTI20137370, TESTI20137670, TESTI20143240, TESTI20143620, TESTI20155900, TESTI20157100, TESTI20159140, TESTI2016-1970, TESTI20168630, TESTI20168960, TESTI20169960, TESTI20171020, TESTI20178160, TESTI20179320, TESTI20183370, TESTI20185810, TESTI20192280, TESTI20194300, TESTI20194810, TESTI20199170, TESTI20200260, TESTI20203440, TESTI20209460, TESTI20211240, TESTI20213150, TESTI20213580, TESTI20220100, TESTI20220650, TESTI20224620, TESTI20226490, TESTI20234270, TESTI20238000, TESTI20239470, TESTI20240090, TESTI20241530, TESTI20241920, TESTI20244760, TESTI20262330, TESTI20262910, TESTI20265250, TESTI20265370, TESTI20269570, TESTI20272060, TESTI20272390, TESTI20275620, TESTI20277360, TESTI20278200, TESTI20280980, TESTI20282540, TESTI20285830, TESTI20288110, TESTI20289850, TESTI20291620, TESTI20294700, TESTI20297850, TESTI20301360, TESTI20305560, TESTI20307540, TESTI20310070, TESTI20311290, TESTI20319190, TESTI20327740, TESTI20330310, TESTI20333950, TESTI20336410, TESTI20337100, TESTI20342430, TESTI20345060, TESTI20347740, TESTI20347770, TESTI20357750, TESTI20357930, TESTI20361140, TESTI20367360, TESTI20369130, TESTI20369220, TESTI20370550, TESTI20371060, TESTI20378450, TESTI20380650, TESTI20386230, TESTI20386440, TESTI20388580, TESTI20391130, TESTI20392090, TESTI20401430, TESTI20406420, TESTI20409440, TESTI20413300, TESTI20415640, TESTI20419560, TESTI20423020, TESTI20424000, TESTI20424730, TESTI20425070, TESTI20427830, TESTI20428060, TESTI20429280, TESTI20429580, TESTI20433130, TESTI20438660, TESTI20447540, TESTI20451710, TESTI20458190, TESTI20465520, TESTI20468630, TESTI20471470, TESTI20471530, TESTI20472120, TESTI20473420, TESTI20477920, TESTI20478010, TESTI20478180, TESTI20479300, THYMU20000570, THYMU20011950, THYMU20015210, THYMU20018190, THYMU20029100, THYMU20045120, THYMU20058070, THYMU20061700, THYMU20070360, THYMU20075320, THYMU20095960, THYMU20101610, THYMU20101920, THYMU20111420, THYMU20114470, THYMU20118060, THYMU20119390, THYMU20128070, THYMU20128260, THYMU20142970, THYMU20153160, THYMU20158250, THYMU20186390, THYMU20186730, THYMU20187720, THYMU20195990, THYMU20204160, THYMU20204990, THYMU20215090, THYMU20215970, THYMU20226600, THYMU20228540, THYMU20235760, THYMU20239430, THYMU20246840, THYMU20250420, THYMU20251890, THYMU20253250, THYMU20255570, THYMU20255720, THYMU20259090, THYMU20265300, THYMU20271250, THYMU20272490, THYMU20283790, THYMU20284120, THYMU20286290, THYMU20286320, TKIDN20030590, TKIDN20030620, TOVAR20005750, TRACH20027840, TRACH20032720, TRACH20037360, TRACH20056980, TRACH20060150, TRACH20082780, TRACH20091230, TRACH20092680, TRACH20099340, TRACH20107710, TRACH20115740, TRACH20118940, TRACH20147250, TRACH20153810, TRACH20169800, TRACH20187180, TSTOM10001860, TSTOM20001390, TSTOM20003150, UMVEN20003540, UTERU20006290, UTERU20020010, UTERU20054460, UTERU20056010, UTERU20059050, UTERU20061030, UTERU20067050, UTERU20068990, UTERU20070040, UTERU20070810, UTERU20081300, UTERU20084260, UTERU20095380, UTERU20095400, UTERU20101240, UTERU20114100, UTERU20118110, UTERU20118970, UTERU20119680, UTERU20124070, UTERU20126880, UTERU20134910, UTERU20143980, UTERU20146680, UTERU20150870, UTERU20164260, UTERU20188810

### EXAMPLE 7

### Expression Frequency Analysis in Silico

[0352] The cDNA libraries derived from various tissues and cells as indicated in Example 1 were prepared, and cDNA clones were selected from each library at random. The 5′-end sequences were determined and the database was constructed based on the data. The database was constructed based on the nucleotide sequences of 1,402,070 clones, and thus the population of the database is large enough for the analysis.

[0353] Then, clones having a homologous sequence are categorized into a single cluster (clustering) by searching the nucleotide sequences of respective clones in this database with the program of nucleotide sequence homology search; the number of clones belonging to each cluster was determined and normalized for every library; thus, the ratio of a certain gene in each cDNA library was determined. This analysis gave the information of the expression frequency of genes in tissues and cells which were sources of the cDNA libraries.

[0354] Then, in order to analyze the expression of a gene containing the nucleotide sequence of the cDNA of the present invention in tissues and cells, the library derived from a tissue or a cell used in the large-scale cDNA analysis was subjected to the comparison of the expression levels between tissues or cells. Namely, the expression frequency was analyzed by comparing the previously normalized values between tissues and/or cells for which the nucleotide sequences of 600 or more cDNA clones had been analyzed. By this analysis, some of the genes were revealed to be involved in the pathology and functions indicated below. Each value in Tables 3 to 51 shown below represents a relative expression frequency; the higher the value, the higher the expression level.

[0355] Osteoporosis-Related Genes

[0356] Osteoporosis is a pathology in which bones are easily broken owing to overall decrease in components of bone. The onset involves the balance between the functions of osteoblast producing bone and osteoclast absorbing bone, namely bone metabolism. Thus, the genes involved in the increase of osteoclasts differentiating from precursor cells of monocyte/macrophage line (Molecular Medicine 38. 642-648. (2001)) are genes involved in osteoporosis relevant to bone metabolism.

[0357] A nucleotide sequence information-based analysis was carried out to identify the genes whose expression frequencies are higher or lower in CD34+ cell (cell expressing a glycoprotein CD34) treated with the osteoclast differentiation factor (Molecular Medicine 38. 642-648. (2001)) than in the untreated CD34+ cell, which is the precursor cell of monocyte/macrophage line. The result of comparative analysis for the frequency between the two cDNA libraries prepared from the RNA of CD34+ cells (CD34C) and from the RNA of CD34+ cells treated with the osteoclast differentiation factor (D30ST, D60ST or D90ST) showed that the genes whose expression levels were different between the two were the following clones (Table 3). ASTRO20001410, D30ST10001090, D30ST20036070, THYMU20039810, KIDNE20028720, BRAWH10000930, BRHIP20005340, CTONG20141650, D90ST20000310, D90ST20002780, D90ST20023970, D90ST20026730, D90ST20031370, D90ST20033970, D90ST20035800, D90ST20035940, D90ST20040180, FCBBF30018550, FCBBF30233680, KIDNE20102650, NT2RI20023160, PROST20107820, SKNSH20089400, SMINT20033400, CTONG20108210, D60ST20003580, D60ST20005070, ASTRO20155290, D30ST10002670, D30ST10002700, D30ST20006180, D30ST20006540, D30ST20007340, D30ST20013280, D30ST20024170, D30ST20024360, D30ST20037970, D30ST30002580, D30ST30002910, FCBBF10004120, NT2RI20001330, NTONG20009770, SPLEN20084600, SPLEN20140800, THYMU20169680, TRACH20141240, CD34C30001250, CD34C30003140, CD34C30004240, CD34C30004940, DFNES10001850, HHDPC20034390, NT2RI20091730, SKMUS20003610, SPLEN20225220, BRCOC20101230

[0358] These genes are involved in osteoporosis.

[0359] Genes Involved in Neural Cell Differentiation

[0360] Genes involved in neural cell differentiation are useful for treating neurological diseases. Genes with varying expression levels in response to induction of cellular differentiation in neural cells are thought to be involved in neurological diseases.

[0361] A survey was performed for genes whose expression levels are varied in response to induction of differentiation (stimulation by retinoic acid (RA) or growth inhibitor treatment after RA stimulation) in cultured cells of a neural strain, NT2. The result of comparative analysis of cDNA libraries derived from undifferentiated NT2 cells (NT2RM) and the cells subjected to the differentiation treatment (NT2RP, NT2RI or NT2NE) showed that the genes whose expression levels were different between the two were the following clones (Table 4). CTONG20027090, CTONG20160560, NT2RP70032610, OCBBF20188730, SPLEN20162680, BRCOC20101230, BRHIP20005340, BRHIP20238880, FCBBF30016320, FEBRA20080810, FEBRA20225040, HCHON20008320, HHDPC20034390, HLUNG10000550, NT2RI20028470, NT2RI20054050, NT2RI20091730, NT2RP70078420, PUAEN20003740, THYMU20271250, BRACE20003070, BRACE20039040, BRAWH20004600, BRAWH20011710, BRCOC20121720, BRHIP20005530, D30ST10002700, HCHON20007380, HEART20072310, KIDNE20121880, MESAN20121130, NT2RI20022600, NT2RI20023160, NT2RI20086220, NT2RI20216250, NT2RP60000850, NT2RP70036880, NT2RP70043480, NT2RP70062230, NT2RP70081610, NT2RP70102350, NT2RP70130020, NT2RP70190640, OCBBF10001850, OCBBF20097720, OCBBF20173980, PEBLM20044520, SPLEN20173510, TRACH20007020, UTERU20065930, HCHON20022470, NT2NE20010490, NT2NE20174800, NT2NE20177520, PROST20087700, PROST20107820, SMINT20028820, TESTI20063830, ASTRO20125520, BRHIP30001110, HCHON20002260, HCHON20008150, KIDNE20002520, NT2NE20130190, NT2NE20158600, NT2RI20001330, NT2RI20025400, NT2RI20036670, NT2RI20048840, SKMUS20020840, BRACE20057190, BRACE20060550, BRACE20267250, BRAWH20107540, BRAWH20118230, CTONG20075860, CTONG20095290, FEBRA20086620, FEBRA20144170, FEBRA20196370, HLUNG20023340, NT2NE20003740, NT2NE20010050, NT2NE20010210, NT2NE20010400, NT2NE20015240, NT2NE20021620, NT2NE20043780, NT2NE20053580, NT2NE20068130, NT2NE20072200, NT2NE20074250, NT2NE20080170, NT2NE20089610, NT2NE20089970, NT2NE20108540, NT2NE20110360, NT2NE20118960, NT2NE20122430, NT2NE20124480, NT2NE20125050, NT2NE20131890, NT2NE20132170, NT2NE20142210, NT2NE20146810, NT2NE20152750, NT2NE20155110, NT2NE20156260, NT2NE20157470, NT2NE20159740, NT2NE20172590, NT2NE20174920, NT2NE20181650, NT2NE20183760, NT2NE20184900, NT2NE20187390, OCBBF20108430, RECTM20005100, SMINT20001760, SPLEN20169720, TESTI20265250, ASTRO10001650, ASTRO20033160, BRACE20011070, BRACE20039440, BRACE20151320, BRAMY20104640, BRAMY20137560, BRAMY20167060, BRAWH20028110, BRCAN20280360, BRCOC20004870, BRHIP20207990, BRHIP20217620, BRHIP20249110, BRSTN10000830, CTONG10000940, CTONG20004690, CTONG20050280, CTONG20105660, CTONG20125640, CTONG20133520, CTONG20186320, FCBBF10000770, FCBBF10002800, FCBBF10003770, FCBBF30018550, FCBBF30123470, FCBBF30246230, FEBRA20018280, FEBRA20095140, FEBRA20192420, HCHON20064590, HHDPC10000830, HLUNG20016770, HLUNG20033780, IMR3220002430, KIDNE20104300, MESAN20004570, MESAN20089360, NOVAR10000910, NT2RI20003480, NT2RI20005750, NT2RI20009870, NT2RI20023590, NT2RI20023910, NT2RI20025640, NT2RI20040930, NT2RI20041880, NT2RI20046080, NT2RI20050960, NT2RI20055790, NT2RI20056700, NT2RI20069730, NT2RI20076290, NT2RI20091940, NT2RI20198260, NT2RI20203900, NT2RI20207030, NT2RI20240080, NT2RI20244600, NT2RI20244960, NT2RI20250750, NT2RI20252550, NT2RI20273230, NTONG20067090, OCBBF10001750, OCBBF20047570, OCBBF20054760, OCBBF20059560, OCBBF20073540, OCBBF20125530, OCBBF20126780, OCBBF20127040, OCBBF20140890, SKMUS20003610, SKNSH20008190, SKNSH20080430, SMINT20144800, SPLEN20027440, SPLEN20095550, SPLEN20140800, TESTI20094020, TESTI20369690, TESTI20391770, TESTI20442760, TRACH20084720, TRACH20107710, TRACH20118940, UTERU20022940, ASTRO20108190, BGGI120006160, BRAMY20136210, BRAWH20016620, BRAWH20164460, BRCOC20144000, BRHIP20132860, BRSSN20146100, CTONG10000100, CTONG20103480, CTONG20108210, CTONG20139070, FCBBF10000240, FCBBF10000630, FCBBF20067810, FCBBF30010810, FCBBF30012810, FCBBF30013770, FCBBF30039020, FCBBF40001420, FEBRA10001880, FEBRA20082010, HHDPC20001040, KIDNE20021910, NT2RP60000770, NT2RP70010740, NT2RP70027380, NT2RP70037240, NT2RP70044280,-NT2RP70045590, NT2RP70056750, NT2RP70063950, NT2RP70072690, NT2RP70077660, NT2RP70085440, NT2RP70105210, NT2RP70110860, NT2RP70111320, NT2RP70122910, NT2RP70125160, NT2RP70133740, NT2RP70134990, NT2RP70137290, NT2RP70137640, NT2RP70143480, NT2RP70147210, NT2RP70150800, NT2RP70157890, NT2RP70159960, NT2RP70169110, NT2RP70175670, NT2RP70179710, NT2RP70181970, NT2RP70188020, NT2RP70188710, NT2RP70192730, NT2RP70194450, NT2RP70195430, NT2RP70198350, NT2RP70203790, OCBBF20039250, OCBBF20080410, OCBBF20108190, OCBBF20108580, OCBBF20122620, OCBBF20130110, OCBBF20151150, OCBBF20189560, PROST10003220, TESTI20001720, TESTI20121550, TESTI20152460, TESTI20211240, TESTI20234140, UMVEN20003540, UTERU20006960, UTERU20094350, UTERU20164260

[0362] These genes are neurological disease-related genes.

[0363] Cancer-Related Genes

[0364] It has been assumed that, distinct from normal tissues, cancer tissues express a distinct set of genes, and thus the expression can contribute to the carcinogenesis in tissues and cells. Thus, the genes whose expression patterns in cancer tissues are different from those in normal tissues are cancer-related genes. Search was carried out for the genes whose expression levels in cancer tissues were different from those in normal tissues.

[0365] The result of comparative analysis of cDNA libraries derived from breast tumor (TBAES) and normal breast (BEAST) showed that the genes whose expression levels were different between the two were the following clones (Table 5). BRACE20039040, BRAMY20163250, BRCOC20031250, BRHIP20005340, BRHIP20217620, BRHIP30001110, FCBBF10000770, FCBBF30010810, FEBRA20080810, FEBRA20144170, FEBRA20196630, FEBRA20197110, HCHON20002260, HCHON20040020, HHDPC20034390, HLUNG10000550, NOVAR10000910, NT2RI20023160, NT2RI20054050, NT2RI20091730, OCBBF20188730, SMINT20144800, SPLEN20128000, SPLEN20171210, SPLEN20264110, TBAES20000590, TBAES20002550, TBAES20003150, TESTI20334410, TESTI20432750, TRACH20003590, TRACH20084720, UTERU20046640, BEAST20004540, SPLEN20008740

[0366] The result of comparative analysis of cDNA libraries derived cervical tumor (TCERX) and normal cervical duct (CERVX) showed that the genes whose expression levels were different between the two were the following clones (Table 6). BGGI120006160, BRAMY20063970, BRHIP20218580, FEBRA20002100, SPLEN20162680, TESTI20214250, CTONG20105080, HCHON20015980, PROST20175290, TESTI20254220, THYMU20279750

[0367] The result of comparative analysis of cDNA libraries derived from colon tumor (TCOLN) and normal colon (COLON) showed that the genes whose expression levels were different between the two were the following clones (Table 7). ASTRO20001410, BRAWH20162690, CTONG20132220, HCHON20002260, NT2RI20001330, TCOLN20001390, 3NB6910001910, BRAMY20120910, BRAWH20004600, BRCOC20031250, BRCOC20031870, COLON10001350, COLON20043180, COLON20093370, FEBRA20002100, FEBRA20082010, FEBRA20197110, KIDNE20007770, KIDNE20013730, NT2RP70045590, OCBBF20078920, PROST20083600, SPLEN20011410, TRACH20084720, THYMU20271250

[0368] The result of comparative analysis of cDNA libraries derived from esophageal tumor (TESOP) and normal esophagus (NESOP) showed that the genes whose expression levels were different between the two were the following clones (Table 8). ASTRO20033160, ASTRO20125520, BRAMY20266850, BRAWH20164460, BRHIP20005340, BRHIP20191490, CTONG20095290, CTONG20143690, CTONG20161850, DFNES20001530, DFNES20071130, FCBBF30123470, FCBBF30175310, FEBRA20095140, HCHON20016650, MESAN20025190, NT2RI20028470, NT2RI20054050, NT2RP70036880, NTONG20009770, NTONG20064840, NTONG20076930, SMINT20042990, SPLEN20008820, SPLEN20128000, SPLEN20149110, STOMA20013890, TESOP20000900, TESOP20003120, TESOP20004000, TESOP20005270, TESOP20005690, TESTI20334410, THYMU20271250, TRACH20141240, UTERU20022940, NESOP10001080, NT2RI20023160, NTONG20013620, TRACH20077540, NTONG20015870

[0369] The result of comparative analysis of cDNA libraries derived from kidney tumor (TKIDN) and normal kidney (KIDNE) showed that the genes whose expression levels were different between the two were the following clones (Table 9). ASTRO20008010, ASTRO20181690, BRACE20111830, BRACE20152870, BRACE20237270, BRAMY20147540, BRAMY20286820, BRAWH20015350, BRAWH20096780, BRAWH20132190, BRAWH20182060, BRCAN20060190, BRCOC20004870, BRCOC20176520, BRHIP20000870, BRHIP20198190, BRHIP20233090, BRHIP30001110, BRSSN20015790, BRSTN20000580, CTONG10000940, CTONG20098440, CTONG20150910, CTONG20165050, DFNES20014040, DFNES20037420, FCBBF10000770, FCBBF30083820, FCBBF30247930, FEBRA20037500, FEBRA20072120, FEBRA20080810, FEBRA20086620, FEBRA20140100, FEBRA2O144170, FEBRA20176800, HCHON20008320, HCHON20059870, HLUNG10000550, MESAN20106640, NT2RI20025400, NT2RI20076290, NT2RI20091940, OCBBF20019830, OCBBF20022900, OCBBF20039250, OCBBF20080050, OCBBF20097720, OCBBF20125530, OCBBF20130110, OCBBF20140640, OCBBF20173980, PANCR10000910, PROST20087700, PUAEN20044000, SPLEN20144520, SPLEN20160980, TKIDN10000010, TKIDN20004640, TKIDN20005210, TKIDN20030590, TKIDN20030620, TKIDN20047480, TRACH20003590, TRACH20028030, TRACH20183170, TRACH20184490, UMVEN20003540, UTERU20004240, UTERU20055930, ASTRO10001650, ASTRO20108190, BGGI120006160, BRACE20039040, BRAMY20102080, BRAWH20004600, BRAWH20125380, BRAWH20162690, BRHIP20115760, BRHIP20205090, CTONG20052650, CTONG20108210, CTONG20128470, CTONG20133480, CTONG20139070, D90ST20000310, DFNES20001530, FCBBF10001820, FEBRA20002100, HCHON20008980, HCHON20016650, HLUNG20033780, KIDNE20002520, KIDNE20003940, KIDNE20006780, KIDNE20007210, KIDNE20007770, KIDNE20008010, KIDNE20009470, KIDNE20011170, KIDNE20011400, KIDNE20013730, KIDNE20017130, KIDNE20018730, KIDNE20018970, KIDNE20020150, KIDNE20021680, KIDNE20021910, KIDNE20021980, KIDNE20022620, KIDNE20024830, KIDNE20027250, KIDNE20027950, KIDNE20028390, KIDNE20028720, KIDNE20028830, KIDNE20029800, KIDNE20067330, KIDNE20079440, KIDNE20096280, KIDNE20096470, KIDNE20100070, KIDNE20100840, KIDNE20101370, KIDNE20101510, KIDNE20102650, KIDNE20102710, KIDNE20104300, KIDNE20106740, KIDNE20107390, KIDNE20107500, KIDNE20107620, KIDNE20109730, KIDNE20109890, KIDNE20112000, KIDNE20115080, KIDNE20118580, KIDNE20120090, KIDNE20121880, KIDNE20122910, KIDNE20124400, KIDNE20125630, KIDNE20126010, KIDNE20126130, KIDNE20127100, KIDNE20127450, KIDNE20127750, KIDNE20130450, KIDNE20131580, KIDNE20132180, KIDNE20137340, KIDNE20138010, KIDNE20141190, KIDNE20144890, KIDNE20148900, KIDNE20163880, KIDNE20180710, KIDNE20181660, KIDNE20182690, KIDNE20186780, KIDNE20190740, LIVER20035110, MESAN20025190, NT2RP70043480, PROST20107820, PROST20123530, PROST20161950, PUAEN20030180, SKMUS20003610, SMINT20033400, TBAES20000590, TESTI20044310, TESTI20082330, TRACH20032720, UTERU20099720

[0370] The result of comparative analysis of cDNA libraries derived from liver tumor (TLIVE) and normal liver (LIVER) showed that the genes whose expression levels were different between the two were the following clones (Table-10). BRAWH20166790, CTONG20103480, HEART20005410, LIVER10001260, LIVER10004790, LIVER20002160, LIVER20011130, LIVER20011910, LIVER20028420, LIVER20035110, LIVER20035680, LIVER20038540, LIVER20045650, LIVER20055200, LIVER20055440, LIVER20059810, LIVER20062510, LIVER20064100, LIVER20064690, LIVER20075680, LIVER20080530, LIVER20084730, LIVER20085800, LIVER20087510, LIVER20091180, NTONG20063010, PROST20087700, PROST20107820, TRACH20005400, ASTRO20001410, ASTRO20125520, BRACE20152870, BRAMY20167060, BRAMY20181220, BRAMY20285160, BRCOC20001860, FEBRA20144170, HLUNG10000550, OCBBF20073540, OCBBF20088220, PLACE60169420, SMINT20152940, SPLEN20242320, THYMU20000570, TRACH20077540, UTERU20055930, UTERU20065930

[0371] The result of comparative analysis of cDNA libraries derived from lung tumor (TLUNG) and normal lung (HLUNG) showed that the genes whose expression levels were different between the two were the following clones (Table 11). BRACE20096200, BRAWH20004600, BRAWH20030250, BRCAN20006390, BRCAN20280360, BRHIP20238880, CTONG10000940, CTONG20103480, CTONG20129960, CTONG20155180, FCBBF10001210, FEBRA20144170, FEBRA20197110, HCHON20002260, HHDPC2OO34390, HLUNG10000550, HLUNG20016330, HLUNG20016770, HLUNG20017120, HLUNG20023340, HLUNG20033780, HLUNG20084390, IMR3220002430, LIVER20028420, NOVAR20000380, NT2RI20023910, NT2RI20054050, NT2RI20091730, NT2RP70044280, OCBBF20020830, OCBBF20125530, PLACE60004630, PROST20057930, PROST20107820, PROST20185830, PUAEN20030180, SMINT20121220, SPLEN20002220, SPLEN20008740, SPLEN20054290, SPLEN20128000, SPLEN20157300, SPLEN20176200, SPLEN20179180, SPLEN20211940, STOMA20013890, TBAES20000590, TESTI20094230, TESTI20184620, TESTI20334410, THYMU20000570, THYMU20039810, TRACH20007020, TRACH20141240, TRACH20183170, ASTRO20108190, ASTRO20155290, BRHIP20096850, FEBRA20080810, MESAN20014500, SMINT20028820, SPLEN20162680

[0372] The result of comparative analysis of cDNA libraries derived from ovary tumor (TOVER) and normal ovary (NOVER) showed the genes whose expression levels were different between the two were the following clones (Table 12). BGGI120006160, BRHIP20005340, BRHIP20191860, HHDPC20001040, NOVAR10000150, NOVAR10000910, NOVAR10001020, NOVAR20000380, NOVAR20003520, THYMU20271250, ASTRO20141350, BRAMY20157820, BRCOC20001860, HLUNG20016770, NT2RI20054050, NTONG20090600, PROST20087700, PUAEN20015860, SPLEN20029310, TOVAR20004760, TOVAR20005750, TRACH20079690, UTERU20004240

[0373] The result of comparative analysis of cDNA libraries derived from stomach tumor (TSTOM) and normal stomach (STOMA) showed that the genes whose expression levels were different between the two were the following clones (Table 13). BRACE20060840, FEBRA20052910, HCHON20002260, HLUNG10000550, NTONG20009770, PROST20107820, THYMU20039810, TSTOM10001860, TSTOM20001390, TSTOM20003150, TSTOM20005690, ASTRO20125520, BRACE20039040, BRAMY20124260, BRCOC20031870, BRHIP20191860, CTONG20128470, FEBRA20037500, HCHON20040020, HHDPC10000830, IMR3220002430, KIDNE20007770, NOVAR20000380, NT2RI20054050, NT2RI20091730, PROST20130530, SPLEN20149110, SPLEN20157880, STOMA20001830, STOMA20005390, STOMA20005670, STOMA20006400, STOMA20006780, STOMA20006860, STOMA20008880, STOMA20010250, STOMA20013890, STOMA20026880, STOMA20032890, STOMA20034770, STOMA20036460, STOMA20046680, STOMA20048520, STOMA20048840, STOMA20051200, STOMA20056640, STOMA20056670, STOMA20057820, STOMA20062130, STOMA20062290, STOMA20063250, STOMA20063980, STOMA20064470, STOMA20067800, STOMA20069040, STOMA20072690, STOMA20076800, STOMA20077450, STOMA20080500, STOMA20083610, STOMA20086140, STOMA20088380, STOMA20092530, STOMA20092560, STOMA20092890, TESTI20184620, TRACH20003590, TRACH20183170, PROST20083600, TRACH20068660

[0374] The result of comparative analysis of cDNA libraries derived from uterine tumor (TUTER) and normal uterus (UTERU) showed that the genes whose expression levels were different between the two were the following clones (Table 14). DFNES10001850, NT2RI20023910, SMINT20144800, SPLEN20162680, TOVAR20004760, TUTER20002830, ASTRO20008010, ASTRO20033160, ASTRO20058630, ASTRO20105820, ASTRO20108190, BRACE20039040, BRACE20057190, BRACE20060840, BRACE20111830, BRACE20223330, BRAMY20266850, BRAWH20113430, BRAWH20126980, BRCOC20031870, BRCOC20107300, BRCOC20121720, BRCOC20155970, BRHIP20105710, BRHIP20191490, BRHIP20207990, BRHIP20217620, BRHIP20222280, BRHIP20238880, BRHIP20249110, BRSSN20018690, BRTHA20000570, CTONG10000940, CTONG10002770, CTONG20095290, CTONG20099380, CTONG20103480, CTONG20108210, CTONG20118250, CTONG20129960, .CTONG20131560, CTONG20139070, CTONG20139340, CTONG20143690, CTONG20160560, D30ST30002580, FCBBF10000240, FCBBF10001820, FCBBF10003670, FCBBF10004120, FCBBF10005740, FCBBF30175310, FCBBF30240020, FCBBF30246230, FCBBF40001420, FEBRA20002100, FEBRA20004620, FEBRA20018280, FEBRA20025270, FEBRA20034360, FEBRA20037500, FEBRA20080810, FEBRA20082100, FEBRA20144170, FEBRA20225040, HCHON20002260, HCHON20007380, HCHON20015980, HCHON20016650, HCHON20022470, HCHON20040020, HCHON20076500, HEART20072310, HHDPC20034390, HLUNG10000550, HLUNG20016770, KIDNE20131580, LIVER20028420, MAMGL10000830, MESAN20171520, NOVAR10000150, NOVAR10000910, NT2NE20053580, NT2NE20159740, NT2NE20174920, NT2RI20023160, NT2RI20041880, NT2RI20054050, NT2RI20076290, NT2RI20273230, NT2RP60000770, NT2RP60000850, NT2RP70036880, NT2RP70043480, NT2RP70045590, NT2RP70056750, NT2RP70062230, NT2RP70081610, OCBBF10001750, OCBBF20006770, OCBBF20032460, OCBBF20039250, OCBBF20047570, OCBBF20054760, OCBBF20059560, OCBBF20068490, OCBBF20080050, OCBBF20094240, OCBBF20097720, OCBBF20103130, OCBBF20105570, OCBBF20140640, OCBBF20173980, OCBBF20180120, OCBBF20188730, OCBBF20189560, PEBLM20044520, PLACE60060420, PROST20087700, PROST20107820, PROST20149160, PROST20159240, PROST20176170, PROST20189770, PUAEN20003740, PUAEN20015860, SKMUS20003610, SKNSH20008190, SKNSH20080430, SMINT20026890, SMINT20029760, SMINT20068010, -SMINT20110330, SMINT20121220, SPLEN20008390, SPLEN20011410, SPLEN20054290, SPLEN20128000, SPLEN20140800, SPLEN20145720, SPLEN20169720, SPLEN20179180, SPLEN20193110, SPLEN20194050, SPLEN20211940, SPLEN20212730, SPLEN20225220, TBAES20000590, TESTI20061110, TESTI20116830, TESTI20184620, TESTI20208710, TESTI20211240, TESTI20213580, TESTI20214250, TESTI20334410, TESTI20369130, TESTI20369690, TESTI20391770, THYMU20039810, THYMU20216840, THYMU20240710, TRACH20003590, TRACH20032720, TRACH20033230, TRACH20141240, TRACH20149970, UMVEN10001860, UTERU20000740, UTERU20004240, UTERU20006290, UTERU20020010, UTERU20022940, UTERU20030570, UTERU20040610, UTERU20046640, UTERU20046980, UTERU20050690, UTERU20054460, UTERU20055330, UTERU20055930, UTERU20056010, UTERU20059050, UTERU20061030, UTERU20064000, UTERU20064860, UTERU20065930, UTERU20067050, UTERU20068990, UTERU20070040, UTERU20070810, UTERU20076390, UTERU20081300, UTERU20084260, UTERU20094350, UTERU20095380, UTERU20095400, UTERU20097760, UTERU20099720, UTERU20101240, UTERU20114100, UTERU20115740, UTERU20116570, UTERU20118110, UTERU20118970, UTERU20119060, UTERU20119680, UTERU20120310, UTERU20124070, UTERU20126880, UTERU20134910, UTERU20135860, UTERU20143980, UTERU20144640, UTERU20145480, UTERU20146310, UTERU20146680, UTERU20150870, UTERU20151980, UTERU20158300, UTERU20158800, UTERU20161570, UTERU20164260, UTERU20168220, UTERU20176130, UTERU20176320, UTERU20178100, UTERU20179880, UTERU20183640, UTERU20185230, UTERU20186740, UTERU20188110, UTERU20188810, BRAWH10000930, CTONG20128470, UTERU20006960

[0375] The result of comparative analysis of CDNA libraries derived from tongue cancer (CTONG) and normal tongue (NTONG) showed that the genes whose expression levels were different between the two were the following clones (Table 15). ADRGL20018300, ASTRO20058630, ASTRO20072210, ASTRO20108190, BRACE20003070, BRACE20039040, BRACE20060720, BRACE20061050, BRACE20210140, BRACE20276430, BRAMY20152110, BRAMY20266850, BRAMY20271400, BRAWH10000930, BRAWH20004600, BRCAN20280360, BRCOC20004870, BRHIP20005340, -BRHIP20005530, BRHIP20238880, BRSSN20146100, CTONG10000100, CTONG10000220, CTONG10000620, CTONG10000930, CTONG10000940, CTONG10001650, CTONG10002770, CTONG20002180, CTONG20004690, CTONG20009770, CTONG20014280, CTONG20027090, CTONG20028410, CTONG20038890, CTONG20049410, CTONG20050280, CTONG20052650, CTONG20052900, CTONG20075860, CTONG20076130, CTONG20077790, CTONG20082690, CTONG20085950, CTONG20091080, CTONG20091320, CTONG20092570, CTONG20092580, CTONG20092680, CTONG20092700, CTONG20093950, CTONG20095270, CTONG20095290, CTONG20095340, CTONG20096430, CTONG20096750, CTONG20097660, CTONG20098440, CTONG20099380, CTONG20099550, CTONG20099630, CTONG20100240, CTONG20101480, CTONG20103480, CTONG20105080, CTONG20105660, CTONG20106230, CTONG20106520, CTONG20108210, CTONG20114290, CTONG20114740, CTONG20118150, CTONG20118250, CTONG20119200, CTONG20120770, CTONG20121010, CTONG20121580, CTONG20124010, CTONG20124220, CTONG20124470, CTONG20124730, CTONG20125540, CTONG20125640, CTONG20126070, CTONG20127450, CTONG20128470, CTONG20129960, CTONG20131490, CTONG20131560, CTONG20132220, CTONG20133390, CTONG20133480, CTONG20133520, CTONG20136300, CTONG20138030, CTONG20139070, CTONG20139340, CTONG20139860, CTONG20140320, CTONG20140580, CTONG20141650, CTONG20146300, CTONG20147050, CTONG20149460, CTONG20149950, CTONG20153300, CTONG20153580, CTONG20155180, CTONG20155400, CTONG20156780, CTONG20158040, CTONG20158150, CTONG20158660, CTONG20159530, CTONG20160560, CTONG20161850, CTONG20162170, CTONG20163550, CTONG20164990, CTONG20165050, CTONG20186320, CTONG20200310, CTONG20265130, CTONG20267700, CTONG20273610, FCBBF10000240, FCBBF10005740, FCBBF30123470, FCBBF30233680, FEBRA20025270, FEBRA20037500, HCHON20002260, HCHON20007380, HCHON20007510, HCHON20015350, HCHON20040020, HHDPC20034390, HLUNG10000550, KIDNE20002520, KIDNE20009470, KIDNE20115080, KIDNE20127100, LIVER20028420, MESAN20029400, NT2RI20023160, NT2RI20023910, NT2RI20091730, NT2RP70043480, NT2RP70078420, NT2RP70081610, OCBBF20006770, OCBBF20059560, OCBBF20073540, OCBBF20094240, OCBBF20108580, PEBLM20044520, PEBLM20071880, PROST20107820, PUAEN20030180, SKNSH20008190, SMINT20023280, SMINT20089170, SPLEN20179180, TESTI20094020, TESTI20094230, TESTI20152460, TESTI20184620, TESTI20211240, TESTI20442760, THYMU20039810, TRACH20028030, TRACH20141240, TSTOM20003150, UTERU20004240, UTERU20055930, UTERU20065930, UTERU20119060, UTERU20124070, BRACE20039440, BRACE20068590, FCBBF30018550, IMR3220002430, KIDNE20028830, NT2RI20028470, NT2RI20054050, NT2RI20086220, NTONG20009770, NTONG20013620, NTONG20028070, NTONG20029480, NTONG20029700, NTONG20046140, NTONG20048060, NTONG20049910, NTONG20050620, NTONG20050860, NTONG20051530, NTONG20052650, NTONG20056570, NTONG20061870, NTONG20063010, NTONG20064400, NTONG20064840, NTONG20065010, NTONG20066460, NTONG20067090, NTONG20067830, NTONG20070200, NTONG20070340, NTONG20075220, NTONG20076930, NTONG20077560, NTONG20083650, NTONG20088620, NTONG20090600, NTONG20090680, NTONG20092290, NTONG20092330, OCBBF20068490, SKMUS20001980, SMINT20138900, SPLEN20008390, SPLEN20162680, UTERU20134910, ASTRO20155290, FEBRA20080810, NT2RP70032610, NT2RP70036880, NTONG20015870, OCBBF20188730, SMINT20122910, SPLEN20099700

[0376] These genes are involved in cancers.

[0377] Further, there is a method to search for genes involved in development and differentiation: the expression frequency analysis in which the expression levels of genes are compared between developing or differentiating tissues and/or cells and adult tissues and/or cells. The genes involved in tissue development and/or differentiation are genes participating in tissue construction and expression of function, and thus are useful genes, which are available for regenerative medicine aiming at convenient regeneration of injured tissues.

[0378] Search was carried out for the genes whose expression frequencies were different between developing and/or differentiating tissues and/or cells, and adult tissues and/or cells, by using the information of gene expression frequency based on the database of the nucleotide sequences of 1,402,070 clones shown above.

[0379] The result of comparative analysis of cDNA libraries derived from fetal brain (FCBBF, FEBRA or OCBBF) and adult brain (BRACE, BRALZ, BRAMY, BRAWH, BRCAN, BRCOC, BRHIP, BRSSN, BRSTN or BRTHA) showed that the genes whose expression levels were different between the two were the following clones (Tables 16 to 48). 3NB6910001910, ADRGL20018300, ASTRO20001410, ASTRO20033160, ASTRO20058630, ASTRO20064750, ASTRO20100720, ASTRO20141350, ASTRO20145760, ASTRO20181690, BGGI120006160, BRACE20006400,, BRACE20011070, BRACE20019540, BRACE20027620, BRACE20037660, BRACE20038000, BRACE20038470, BRACE20038480, BRACE20038850, BRACE20039440, BRACE20039540, BRACE20050900, BRACE20051380, BRACE20051690, BRACE20052160, BRACE20053280, BRACE20053480, BRACE20053630, BRACE20054500, BRACE20055180, BRACE20057420, BRACE20057620, BRACE20057730, BRACE20058580, BRACE20058810, BRACE20060840, BRACE20060890, BRACE20061050, BRACE20061740, BRACE20062400, BRACE20062740, BRACE20063630, BRACE20063780, BRACE20063800, BRACE20063930, BRACE20064880, BRACE20068590, BRACE20069090, BRACE20081720, BRACE20082950, BRACE20096200, BRACE20096540, BRACE20097320, BRACE20101700, BRACE20101710, BRACE20106840, BRACE20107530, BRACE20108130, BRACE20108880, BRACE20109370, BRACE20109830, BRACE20114780, BRACE20115450, BRACE20115920, BRACE20116110, BRACE20116460, BRACE20118380, BRACE20121850, BRACE20141080, BRACE20142320, BRACE20147800, BRACE20148210, BRACE20148240, BRACE20150310, BRACE20151320, BRACE20152870, BRACE20153680, BRACE20154120, B,RACE20163150, BRACE20163350, BRACE20165830, BRACE20171240, BRACE20172980, BRACE20175870, BRACE20177200, BRACE20179340, BRACE20185680, BRACE20188470, BRACE20190040, BRACE20190440, BRACE20192440, BRACE20195100, BRACE20201570, BRACE20220300, BRACE20223280, BRACE20223330, BRACE20224480, BRACE20224500, BRACE20228480, BRACE20229280, BRACE20230700, BRACE20232840, BRACE20235400, BRACE20237270, BRACE20238000, BRACE20240740, BRACE20248260, BRACE20253160, BRACE20253330, BRACE20257100, BRACE20262930, BRACE20262940, BRACE20266750, BRACE20267250, BRACE20269200, BRACE20269710, BRACE20273890, BRACE20274080, BRACE20283920, BRACE20284100, BRACE20286360, BRACE20287410, BRALZ20013500, BRALZ20014450, BRALZ20017430, BRALZ20018340, BRALZ20054710, BRALZ20058880, BRALZ20059500, BRALZ20064740, BRALZ20065600, BRALZ20069760, BRALZ20073760, BRALZ20075450, BRALZ20075760, BRALZ20077900, BRALZ20077930, BRALZ20080310, BRALZ20088690, BRAMY10001300, BRAMY10001570, BRAMY20000520, BRAMY20000860, BRAMY20002770, BRAMY20004110, BRAMY20011140, BRAMY20025840, BRAMY20039260, BRAMY20045240, BRAMY20054880, BRAMY20060920, BRAMY20063970, BRAMY20071850, BRAMY20102080, BRAMY20104640, BRAMY20110640, BRAMY20111960, BRAMY20116790, BRAMY20121190, BRAMY20121620, BRAMY20124260, BRAMY20134140, BRAMY20135900, BRAMY20136210, BRAMY20137560, BRAMY20144620, BRAMY20147540, BRAMY20148130, BRAMY20152110, BRAMY20153110, BRAMY20157820, BRAMY20160700, BRAMY20163250, BRAMY20163270, BRAMY20167060, BRAMY20167710, BRAMY20168920, BRAMY20170140, BRAMY20174550, BRAMY20178640, BRAMY20181220, BRAMY20182730, BRAMY20183080, BRAMY20184670, BRAMY20195090, BRAMY20204450, BRAMY20205740, BRAMY20210400, BRAMY20211390, BRAMY20211420, BRAMY20213100, BRAMY20215230, BRAMY20217460, BRAMY20218250, BRAMY20218670, BRAMY20229800, BRAMY20229840, BRAMY20230600, BRAMY20231720, BRAMY20240040, BRAMY20245300, BRAMY20247110, BRAMY20247280, BRAMY20248490, BRAMY20250240, BRAMY20250320, BRAMY20252180, BRAMY20252720, BRAMY20260910, BRAMY20261680, BRAMY20266850, BRAMY20267130, BRAMY20268990, BRAMY20270730, BRAMY20271400, BRAMY20273960, BRAMY20277140, BRAMY20277170, BRAMY20280720, BRAMY20284910, BRAMY20285160, BRAMY20285930, BRAMY20286820, BRAWH20002320, BRAWH20012390, BRAWH20014920, BRAWH20015350, BRAWH20015890, BRAWH20016660, BRAWH20016860, BRAWH20017010, BRAWH20018730, BRAWH20028110, BRAWH20029630, BRAWH20064050, BRAWH20075700, BRAWH20096780, BRAWH20100690, BRAWH20101360, BRAWH20103180, BRAWH20105840, BRAWH20106180, BRAWH20107540, BRAWH20110660, BRAWH20110790, BRAWH20110960, BRAWH20111550, .BRAWH20112940, BRAWH20114000, BRAWH20117950, BRAWH20118230, BRAWH20122580, BRAWH20125380, BRAWH20126190, BRAWH20126980, BRAWH20132190, BRAWH20137480, BRAWH20138660, BRAWH20139410, BRAWH20142340, BRAWH20147290, BRAWH20149340, BRAWH20155950, BRAWH20158530, BRAWH20160280, BRAWH20162690, BRAWH20166790, BRAWH20171030, BRAWH20173050, BRAWH20182060, BRAWH20185060, BRCAN10001490, BRCAN20003460, BRCAN20006200, BRCAN20006390, BRCAN20054490, BRCAN20060190, BRCAN20064010, BRCAN20071190, BRCAN20091560, BRCAN20103740, BRCAN20124080, BRCAN20126130, BRCAN20143700, BRCAN20147880, BRCAN20216690, BRCAN20224720, BRCAN20237240, BRCAN20263400, BRCAN20273100, BRCAN20273340, BRCAN20273550, BRCAN20275130, BRCAN20279700, BRCAN20280210, BRCAN20280400, BRCAN20283190, BRCAN20283380, BRCAN20284600, BRCAN20285450, BRCOC10000870, BRCOC20001860, BRCOC20004040, BRCOC20004870, BRCOC20006370, BRCOC20008160, BRCOC20008500, BRCOC20020850, BRCOC20021550, BRCOC20023230, BRCOC20026640, BRCOC20027510, BRCOC20031000, BRCOC20031250, BRCOC20031870, BRCOC20035130, BRCOC20037320, BRCOC20037400, BRCOC20041750, BRCOC20055420, BRCOC20059510, BRCOC20077690, BRCOC20090520, BRCOC20091960, BRCOC20093800, BRCOC20099370, BRCOC20101230, BRCOC20107300, BRCOC20110100, BRCOC20114180, BRCOC20117690, BRCOC20119960, BRCOC20121720, BRCOC20122290, BRCOC20128130, BRCOC20134480, BRCOC20135730, BRCOC20136750, BRCOC20144000, BRCOC20147480, BRCOC20148330, BRCOC20155970, BRCOC20158240, BRCOC20176520, BRCOC20178560,, BRHIP10001290, BRHIP20000870, BRHIP20001630, BRHIP20096170, BRHIP20096850, BRHIP20103090, BRHIP20104440, BRHIP20105710, BRHIP20106100, BRHIP20107440, BRHIP20111200, BRHIP20115080, BRHIP20115760, BRHIP20118380, BRHIP20118910, BRHIP20119330, BRHIP20121410, BRHIP20123140, BRHIP20129720, BRHIP20132860, BRHIP20135100, BRHIP20137230, BRHIP20139720, BRHIP20140630, BRHIP20142850, BRHIP20143730, BRHIP20143860, BRHIP20149540, BRHIP20153560, BRHIP20153600, BRHIP20167880, BRHIP20169680, BRHIP20169900, BRHIP20170100, BRHIP20173150, BRHIP20174040, BRHIP20175420, BRHIP20180140, BRHIP20183690, BRHIP20186120, BRHIP20186500, BRHIP20189980, BRHIP20190070, BRHIP20191490, BRHIP20191770, BRHIP20194940, BRHIP20195890, BRHIP20196410, BRHIP20205090, BRHIP20207430, BRHIP20207990, BRHIP20208420, BRHIP20208590, BRHIP20227080, BRHIP20230710, BRHIP20232290, BRHIP20233090, BRHIP20234380, BRHIP20236950, BRHIP20238600, BRHIP20238690, BRHIP20240460, BRHIP20243470, BRHIP20249110, BRHIP20252450, BRHIP20253660, BRHIP20277620, BRHIP20283030, BRHIP20284800, BRHIP20285830, BRHIP20285930, BRHIP30004880, BRSSN10000920, BRSSN20013420, BRSSN20014260, BRSSN20015030, BRSSN20015790, BRSSN20018690, BRSSN20028570, BRSSN20038200, BRSSN20038410, BRSSN20039370, BRSSN20043040, BRSSN20046570, BRSSN20046790, BRSSN20046860, BRSSN20066110, BRSSN20097020, BRSSN20101100, BRSSN20105870, BRSSN20105960, BRSSN20108300, BRSSN20120810, BRSSN20121030, BRSSN20137020, BRSSN20142940, BRSSN20146100, BRSSN20151990, BRSSN20159070, BRSSN20159820, BRSSN20169050, BRSSN20176820, BRSSN20177570, BRSSN20187310, BRSTN20000580, BRSTN20005360, BRTHA20000570, BRTHA20004740, BRTHA20046290, BRTHA20046390, BRTHA20046420, CD34C30001250, CD34C30004240, CTONG10000100, CTONG20004690, CTONG20027090, CTONG20050280, CTONG20076130, CTONG20077790, CTONG20095290, CTONG20095340, CTONG20099380, -CTONG20106520, CTONG20118250, CTONG20121010, CTONG20127450, CTONG20128470, CTONG20141650, CTONG20143690, CTONG20153300, CTONG20155180, CTONG20158150, CTONG20161850, CTONG20164990, CTONG20186320, D30ST10002700, D60ST20003580, D90ST20000310, D90ST20035800, DFNES20010910, DFNES20071130, HCHON20002260, HCHON20003220, HCHON20010990, HCHON20015350, HCHON20022470, HCHON20067220, HCHON20067700, HEART20003060, HEART20005410, HEART20061950, HEART20090000, HHDPC10000650, HHDPC20057940, HLUNG20033780, KIDNE20011170, KIDNE20027250, KIDNE20104300, KIDNE20107500, KIDNE20122910, KIDNE20127100, KIDNE20180710, LIVER10001260, LIVER20064100, LIVER20087510, MAMGL10000830, MESAN20031900, MESAN20036460, MESAN20106640, MESAN20164090, NOVAR10000150, NOVAR20000380, NT2NE20010400, NT2NE20010490, NT2NE20021620, NT2NE20122430, NT2NE20125050, NT2NE20174920, NT2RI20001330, NT2RI20023590, NT2RI20041880, NT2RI20046080, NT2RI20216250, NT2RI20252550, NT2RP60000770, NT2RP70045590, NT2RP70063950, NT2RP70195430, NT2RP70198350, NTONG20028070, NTONG20046140, NTONG20064840, NTONG20067830, NTONG20077560, PANCR10000910, PEBLM20024550, PEBLM20052820, PEBLM20074370, PERIC20004780, PLACE50000660, PLACE60079250, PLACE60136720, PLACE60138830, PROST20005670, PROST20050670, PROST20107820, PROST20111050, PROST20116600, PROST20120160, PROST20123530, PROST20161950, PROST20171280, PROST20175290, PROST20185830, PROST20191640, PUAEN20015860, PUAEN20030180, PUAEN20044000, PUAEN20078980, PUAEN20085150, PUAEN20108240, SKMUS20012010, SKNSH20062340, SMINT20013480, SMINT20042990, SMINT20053300, SMINT20076470, SMINT20092330, SMINT20101440, SMINT20121220, SMINT20121950, SMINT20122910, SMINT20130320, SMINT20131810, SMINT20144800, SMINT20163960, SPLEN20002220, SPLEN20008740, SPLEN20011410, SPLEN20016260, SPLEN20027440, SPLEN20029310, SPLEN20033960, SPLEN20054290, SPLEN20126190, SPLEN20128000, SPLEN20145720, SPLEN20146450, SPLEN20147110, SPLEN20149110, SPLEN20157880, SPLEN20158900, SPLEN20171210, SPLEN20179180, SPLEN20186430, SPLEN20204170, SPLEN20212730, SPLEN20214580, SPLEN20250390, STOMA20051200, STOMA20062290, STOMA20092890, SYNOV20003970, TESOP20005270, TESTI10000940, TESTI20001720, TESTI20002720, TESTI20004890, TESTI20011200, TESTI20035960, TESTI20037560, TESTI20044310, TESTI20061110, TESTI20063830, TESTI20086210, TESTI20152460, TESTI20168960, TESTI20170350, TESTI20208400, TESTI20213580, TESTI20214250, TESTI20254220, TESTI20258460, TESTI20330310, TESTI20334410, TESTI20366910, TESTI20391770, TESTI20432750, TESTI20455620, THYMU20000570, THYMU20058070, THYMU20066100, THYMU20075320, THYMU20081490, THYMU20100410, THYMU20101920, THYMU20108310, THYMU20119390, THYMU20126900, THYMU20128260, THYMU20169680, THYMU20193640, THYMU20209590, THYMU20235760, THYMU20239430, THYMU20240710, THYMU20253250, THYMU20286290, TKIDN10000010, TKIDN20005210, TKIDN20030590, TRACH20005020, TRACH20005400, TRACH20007020, TRACH20019960, TRACH20034840, TRACH20079690, TRACH20128110, TRACH20149970, TRACH20183170, UMVEN10001860, UMVEN20003540, UTERU20000740, UTERU20030570, UTERU20054460, UTERU20055930, UTERU20056010, UTERU20064860, UTERU20065930, UTERU20070040, UTERU20081300, UTERU20084260, UTERU20094350, UTERU20120310,- UTERU20124070, UTERU20164260, UTERU20168220, UTERU20183640, ASTRO20032120, ASTRO20125520, BRACE20039040, BRACE20060720, BRACE20062640, BRACE20090440, BRACE20099570, BRACE20111830, BRACE20142570, BRAWH20128270, BRCAN20280360, BRHIP20110800, BRHIP20176420, BRSSN20003120, CTONG20105660, CTONG20124010, CTONG20133480, CTONG20139070, CTONG20160560, FCBBF10001210, .FCBBF10001550, FCBBF10001710, FCBBF10001820, FCBBF10002430, FCBBF10002700, FCBBF10002800, FCBBF10003220, FCBBF10003740, FCBBF10003760, FCBBF10005060, FCBBF10005460, FCBBF10005500, FCBBF20006780, FCBBF20014270, FCBBF20023700, FCBBF20032970, FCBBF20035280, FCBBF20042170, FCBBF20042560, FCBBF20051220, FCBBF20054280, FCBBF20056370, FCBBF20064520, FCBBF20067810, FCBBF20071860, FCBBF20072650, FCBBF20076330, FCBBF30008470, FCBBF30010810, FCBBF30012350, FCBBF30012810, FCBBF30015940, FCBBF30019120, FCBBF30024750, FCBBF30028180, FCBBF30033050, FCBBF30039020, FCBBF30052180, FCBBF30054440, FCBBF30057290, FCBBF30062880, FCBBF30070770, FCBBF30071520, FCBBF30078290, FCBBF30083620, FCBBF30123470, FCBBF30170590, FCBBF30172550, FCBBF30175310, FCBBF30178730, FCBBF30190850, FCBBF30195640, FCBBF30199610, FCBBF30215060, FCBBF30225660, FCBBF30240960, FCBBF30242250, FCBBF30243640, FCBBF30247930, FCBBF30252520, FCBBF30252800, FCBBF30252850, FCBBF30262510, FCBBF30266780, FCBBF30266920, FCBBF30278630, FCBBF30279030, FCBBF30281880, FCBBF30284720, FCBBF30285280, FCBBF40001730, FCBBF40005480, HCHON20007380, HEART20072310, HHDPC20068620, HLUNG20023340, KIDNE20017130, KIDNE20028830, MESAN20014500, NT2RP70072690, NT2RP70137640, NTONG20067090, PLACE60004630, PROST20083600, PROST20189770, RECTM20003490, SKNSH20008190, SMINT20115880, SPLEN20169720, SPLEN20194050, SPLEN20284240, TESTI20083940, TESTI20213150, TESTI20254540, TESTI20265250, TRACH20118940, UTERU20145480, UTERU20146680, ASTRO20155290, BRAWH20030250, BRAWH20113430, BRAWH20122770, BRHIP20005340, BRHIP30001110, BRSTN20002200, CTONG20052900, CTONG20108210, DFNES20031920, FEBRA10001900, FEBRA20003210, FEBRA20007620, FEBRA20009090, FEBRA20010120, FEBRA20017050, FEBRA20018280, FEBRA20025270, FEBRA20025520, FEBRA20026110, FEBRA20026280, FEBRA20029860, FEBRA20034680, FEBRA20037260, FEBRA20040530, FEBRA20042190, FEBRA20052910, FEBRA20060610, FEBRA20072120, FEBRA20079310, FEBRA20082010, FEBRA20088360, FEBRA20090290, FEBRA20092890, FEBRA20093520, FEBRA20097310, FEBRA20113560, FEBRA20125070, FEBRA20132740, FEBRA20140100, FEBRA20161120, FEBRA20166540, FEBRA20167390, FEBRA20171380, FEBRA20176800, FEBRA20184330, FEBRA20192420, FEBRA20195820, FEBRA20196370, FEBRA20196630, FEBRA20197110, FEBRA20211710, FEBRA20214970, FEBRA20215500, FEBRA20216360, FEBRA20222040, FEBRA20223220, FEBRA20225040, FEBRA20226010, FEBRA20229560, FEBRA20229630, FEBRA20232850, FEBRA20235500, HCHON20040020, KIDNE20102650, NT2RP70037240, PEBLM20072960, PLACE60169420, SKMUS20003610, SMINT20026890, SMINT20033400, SPLEN20020070, SPLEN20079510, TESTI20001000, TESTI20094020, THYMU20027560, THYMU20180280, THYMU20271250, TRACH20003590, UMVEN10001560, UTERU20022940, UTERU20046640, UTERU20119060, UTERU20144640, UTERU20176130, ASTRO20008010, BRACE20276430, BRAMY20103570, BRAMY20120910, BRAMY20162510, BRAMY20196000, BRAWH20164460, BRCAN20273640, BRCOC20105100, BRHIP20198190, BRHIP20222280, BRHIP20254480, BRHIP30004570, CTONG20028410, CTONG20091080, CTONG20103480, CTONG20126070, CTONG20139340, DFNES20001530, HCHON20008150, HHDPC20001040, HLUNG20016330, HLUNG20017120, IMR3220002430, KIDNE20007210, KIDNE20021910, KIDNE20124400, MESAN10001260, MESAN20029400, MESAN20121130, MESAN20153910, NT2NE20159740, NT2NE20177520, NT2RI20086220, NT2RI20250750, NT2RP60000850, NT2RP70044280, NT2RP70056750, NT2RP70081610, NTONG20009770, OCBBF10000540, OCBBF10001750, OCBBF20006770, OCBBF20013890, OCBBF20019830, OCBBF20020150, OCBBF20020830, OCBBF20023570, OCBBF20028050, OCBBF20028650, OCBBF20029800, OCBBF20030280, OCBBF20030910, OCBBF20035930, OCBBF20037440, OCBBF20041680, OCBBF20045330, OCBBF20046120, OCBBF20046470, OCBBF20046690, OCBBF20048660, OCBBF20050770, OCBBF20051610, OCBBF20053430, OCBBF20053490, OCBBF20053730, OCBBF20054200, OCBBF20054760, OCBBF20060300, OCBBF20062140, OCBBF20062410, OCBBF20066390, OCBBF20071210, OCBBF20071840, OCBBF20072240, OCBBF20073540, OCBBF20074140, OCBBF20076220, OCBBF20079310, OCBBF20079460, OCBBF20081380, OCBBF20082830, OCBBF20085200, OCBBF20086400, OCBBF20086910, OCBBF20088140, OCBBF20088220, OCBBF20091150, OCBBF20100400, OCBBF20103130, OCBBF20104040, OCBBF20105570, OCBBF20107090, OCBBF20107920, OCBBF20108580, OCBBF20108630, OCBBF20109310, OCBBF20111770, OCBBF20116850, OCBBF20118970, OCBBF20120390, OCBBF20121390, OCBBF20122620, OCBBF20124360, OCBBF20127040, OCBBF20127140, OCBBF20127550, OCBBF20128120, OCBBF20129360, OCBBF20130910, OCBBF20132850, OCBBF20140890, OCBBF20145760, OCBBF20148280, OCBBF20151150, OCBBF20153340, OCBBF20153350, OCBBF20155060, OCBBF20164670, OCBBF20170690, OCBBF20173060, OCBBF20173250, OCBBF20178150, OCBBF20180840, OCBBF20186870, OCBBF20189560, PEBLM20044520, PEBLM20071880, PLACE60060420, PROST20047390, PUAEN20003740, SMINT20029760, SPLEN20008820, SPLEN20084600, SPLEN20095550, SPLEN20099700, SPLEN20140800, SPLEN20173510, SPLEN20211220, SPLEN20250170, STOMA20067800, TESTI20031270, TESTI20116830, TESTI20121550, TESTI20234140, TESTI20442760, THYMU20039810, THYMU20070360, TRACH20033230, TRACH20084720, BRACE20067430, BRAWH10000930, BRHIP20003120, BRSSN20152380, FEBRA20024100, FEBRA20027810, FEBRA20037500, FEBRA20082100, FEBRA20098460, FEBRA20144170, FEBRA20145780, FEBRA20233770, HHDPC10000830, MESAN20025190, MESAN20089360, NT2RI20048840, NT2RP70043480, OCBBF20032460, OCBBF20039250, OCBBF20049300, OCBBF20061720, OCBBF20078920, OCBBF20084660, OCBBF20087010, PROST20087700, PROST20153320, TRACH20135520, ADIPS20004250, ASTRO10001650, BRACE20056810, BRACE20059370, BRACE20106690, BRACE20210140, BRAWH20103290, BRAWH20121640, BRHIP20005530, BRHIP20217620, BRHIP20218580, BRHIP20238880, CTONG20075860, CTONG20129960, FCBBF10000240, FCBBF10000630, FCBBF10001150, FCBBF10004120, FCBBF10005740, FCBBF20075560, FCBBF30018550, FCBBF30025560, FCBBF30086440, FCBBF30090690, FCBBF30189490, FCBBF30233680, FCBBF30240020, HCHON20007510, HCHON20016650, HHDPC20095280, KIDNE20002520, KIDNE20009470, NT2RI20003480, NT2RI20055790, NT2RP70027380, NT2RP70032610, NT2RP70062230, OCBBF10001850, OCBBF20022900, OCBBF20026630, OCBBF20049840, OCBBF20059560, OCBBF20068490, OCBBF20071960, OCBBF20080410, OCBBF20094240, OCBBF20097720, OCBBF20108190, OCBBF20108430, OCBBF20126780, OCBBF20130110, OCBBF20139260, OCBBF20148730, OCBBF20149280, OCBBF20164050, OCBBF20173980, OCBBF20178880, OCBBF20180120, OCBBF20188730, PROST20057930, SPLEN20162680, SPLEN20211940, TESTI20184620, TESTI20211240, TESTI20369690, THYMU20141670, TRACH20028030, UTERU20099720, UTERU20135860, BRACE20057190, BRHIP20191860, BRHIP20214950, FCBBF10003670, FCBBF10004370, FCBBF30013770, FCBBF30095260, FCBBF30246230, FEBRA20002100, FEBRA20034360, FEBRA20095140, FEBRA20130190, FEBRA20204060, HCHON20008320, LIVER20028420, TRACH20111130, ASTRO20108190, BRACE20003070, BRACE20060550, BRAWH20004600, BRAWH20011710, BRAWH20016620, BRHIP10001740, BRSTN10000830, CTONG10000940, CTONG20150910, D30ST10002670, FCBBF10000380, FCBBF10000770, FCBBF10003770, FCBBF20059090, FCBBF30016320, FCBBF30016570, FCBBF30049550, FCBBF30083820, FCBBF30238870, FCBBF40001420, FEBRA10001880, FEBRA20004620, FEBRA20080810, FEBRA20086620, FEBRA20095880, HHDPC20034390, HLUNG10000550, NT2RI20023160, NT2RI20023910, NT2RI20025400, NT2RI20028470, NT2RI20054050, NT2RI20076290, NT2RI20091730, NT2RI20091940, NT2RP70036880, NT2RP70078420, OCBBF20047570, OCBBF20080050, OCBBF20125530, OCBBF20140640, TRACH20032720, TRACH20141240, UTERU20004240

[0380] The result of comparative analysis of cDNA libraries derived from fetal heart (FEHRT) and adult heart (HEART) showed that the genes whose expression levels were different between the two were the following clones (Table 49). FEHRT20003250, OCBBF20189560, BRAWH20029630, CTONG20150910, HCHON20007510, HEART20003060, HEART20005410, HEART20021840, HEART20025980, HEART20034320, HEART20037810, HEART20049400, HEART20049410, HEART20049800, HEART20061950, HEART20063340, HEART20067870, HEART20067890, HEART20072310, HEART20074430, HEART20077670, HEART20089940, HEART20090000, HEART20095990, HLUNG10000550, HLUNG20017120, KIDNE20028390, KIDNE20028830, NTONG20029480, OCBBF10001750, PROST20127800, SKMUS20001980, SKMUS20003610, SMINT20026890, SMINT20121220, SMINT20122910, .SMINT20183530, SPLEN20008740, SPLEN20027440, SPLEN20162680, STOMA20062290, TESTI20254220, THYMU20271250, TRACH20141240, UTERU20004240

[0381] The result of comparative analysis of cDNA libraries derived from fetal kidney (FEKID) and adult kidney (KIDNE) showed that the genes whose expression levels were different between the two were the following clones (Table 50). ASTRO10001650, ASTRO20108190, BGGI120006160, BRACE20039040, BRACE20060550, BRAMY20102080, BRAWH20004600, BRAWH20125380, BRAWH20162690, BRHIP20115760, BRHIP20205090, BRHIP20238880, CTONG20052650, CTONG20108210, CTONG20128470, CTONG20133480, CTONG20139070, D90ST20000310, DFNES20001530, FCBBF10001820, FEBRA20002100, HCHON20008980, HCHON20016650, HLUNG20033780, KIDNE20002520, KIDNE20003940, KIDNE20006780, KIDNE20007210, KIDNE20007770, KIDNE20008010, KIDNE20009470, KIDNE20011170, KIDNE20011400, KIDNE20013730, KIDNE20017130, KIDNE20018730, KIDNE20018970, KIDNE20020150, KIDNE20021680, KIDNE20021910, KIDNE20021980, KIDNE20022620, KIDNE20024830, KIDNE20027250, KIDNE20027950, KIDNE20028390, KIDNE20028830, KIDNE20029800, KIDNE20067330, KIDNE20079440, KIDNE20096280, KIDNE20096470, KIDNE20100070, KIDNE20100840, KIDNE20101370, KIDNE20101510, KIDNE20102650, KIDNE20102710, KIDNE20104300, KIDNE20106740, KIDNE20107390, KIDNE20107500, KIDNE20107620, KIDNE20109730, KIDNE20109890, KIDNE20112000, KIDNE20115080, KIDNE20118580, KIDNE20120090, KIDNE20121880, KIDNE20122910, KIDNE20124400, KIDNE20125630, KIDNE20126010, KIDNE20126130, KIDNE20127100, KIDNE20127450, KIDNE20127750, KIDNE20130450, KIDNE20131580, KIDNE20132180, KIDNE20137340, KIDNE20138010, KIDNE20141190, KIDNE20144890, KIDNE20148900, KIDNE20163880, KIDNE20180710, KIDNE20181660, KIDNE20182690, KIDNE20186780, KIDNE20190740, LIVER20035110, MESAN20025190, NOVAR20000380, NT2RI20054050, NT2RP70043480, PROST20107820, PROST20123530, PROST20161950, PUAEN20030180, SKMUS20003610, SMINT20033400, TBAES20000590, TESTI20044310, TESTI20082330, TRACH20032720, UTERU20099720, BRACE20003070, BRCOC20031870, CTONG20125640, FCBBF30016320, HCHON20002260, HLUNG10000550, PROST20130530, SPLEN20169720, SPLEN20194050, KIDNE20028720

[0382] The result of comparative analysis of cDNA libraries derived from fetal lung (FELNG) and adult lung (HLUNG) showed that the genes whose expression levels were different between the two were the following clones (Table 51). BRACE20096200, BRAWH20004600, BRAWH20030250, BRCAN20006390, BRCAN20280360, BRHIP20238880, CTONG10000940, CTONG20103480, CTONG20129960, CTONG20155180, FCBBF10001210, FEBRA20144170, FEBRA20197110, HHDPC20034390, HLUNG20016330, HLUNG20016770, HLUNG20017120, HLUNG20023340, HLUNG20033780, HLUNG20084390, IMR3220002430, LIVER20028420, NOVAR20000380, NT2RI20054050, NT2RI20091730, NT2RP70044280, OCBBF20020830, OCBBF20125530, PLACE60004630, PROST20057930, PROST20107820, PROST20185830, PUAEN20030180, SMINT20121220, SPLEN20002220, SPLEN20054290, SPLEN20128000, SPLEN20157300, SPLEN20176200, SPLEN20179180, SPLEN20211940, STOMA20013890, TBAES20000590, TESTI20094230, TESTI20184620, TESTI20334410, THYMU20000570, THYMU20039810, TRACH20007020, TRACH20141240, TRACH20183170, D90ST20033970, FELNG20002410, HCHON20016650, KIDNE20029800, OCBBF20145760, SPLEN20162680, TESTI20214250, TRACH20005400, HCHON20002260, HLUNG10000550, NT2RI20023910, SPLEN20008740

[0383] These genes are involved in regeneration of tissues and/or cells.

### EXAMPLE 8

### Expression Frequency Analysis by PCR

[0384] Specific PCR primers were prepared based on the full-length nucleotide sequences, and the expression frequency was analyzed by the ATAC-PCR method (Adaptor-tagged competitive PCR method: Nucleic Acids Research 1997, 25(22): 4694-4696; “DNA Micro-array and Advanced PCR Techniques”, Cell Technology, supplement, Eds., Muramatsu and Nawa (Shujunsha, 2000): 104-112). Inflammation-related genes can be identified by revealing the genes whose expression levels are altered depending on the presence of an inflammation-inducing factor. Then, by using THP-1 cell line, which is a cell line of monocyte line, and TNF-α, which is inflammation-inducing factor, suitable for this system, the genes whose expression levels are altered depending on the presence of the factors were searched for by the system.

[0385] THP-1 cell line (purchased from DAINIPPON PHARMACEUTICAL) -was cultured to be confluent in RPMI1640 medium (sigma) containing 5% fetal calf serum (GIBCO BRL). Then, the medium was changed with the medium containing 10 ng/ml TNF-α (human recombinant TNF-α; Pharmacia Biotech), and the culture was continued at 37° C. under 5% CO₂. After three hours, the cells were harvested, and total RNA was extracted from them by using ISOGEN reagent (Nippon Gene). The extraction was carried out according to the method in the document attached to ISOGEN reagent. In addition, total RNA was also extracted from the cells cultured without stimulation of TNF-α.

[0386] The genes involved in the onset of gastritis and gastroduodenal ulcer induced by the infection of Helicobacter pylori to the epithelia of stomach can be identified by revealing the genes whose expression levels are altered depending on co-culturing the cells with Helicobacter pylori. A recent study has suggested that various substances derived from Helicobacter pylori trigger the inflammation reaction. In particular, the members belonging to the family of genes called “cag pathogenicity island (cag PAI)” contribute to the activation of the NF-εB pathway (Gastroenterology 2000, 119: 97-108). Further, it has been found that cag PAI is involved in the onset of gastritis and the like by the study using an animal model (Journal of Experimental Medicine 2000, 192:1601-1610). Then, by using co-culture of a gastric cancer cell line with cag PAI-positive Helicobacter pylori (TN2), suitable for this system, the genes whose expression levels are altered depending on the presence of Helicobacter pylori were searched for by the system. Further, in order to study the involvement of cag PAI in the alterations of gene expression levels depending on the co-culture with Helicobacter pylori, the altered expression levels were compared between the cells co-cultured with a strain of Helicobacter pylori (TN2AcagE strain) having a mutation in cagE, which is one of the cag PAI genes, and the cag PAI-positive strain (TN2).

[0387] A gastric cancer cell line MKN45 (provided by the Cell Bank, RIKEN GENE BANK, The Institute of Physical and Chemical Research) was cultured to be confluent in RPMI1640 medium (sigma) containing 10% fetal calf serum (GIBCO BRL). Then, the medium was changed with the medium containing 100-fold excess (in terms of the number of cells or the number of colonies) of Helicobacter pylori (cag PAI positive strain (TN2) and cagE mutant (TN2ΔcagE): both were provided by Prof. Omata, Faculty of Medicine, The University of Tokyo), as compared with the number of the cancer cells. The culture was continued at 37° C. under 5% CO₂. After three hours, the cells were harvested, and total RNA was extracted from them by using ISOGEN reagent (Nippon Gene). The extraction was carried out according to the method in the document attached to ISOGEN reagent. In addition, total RNA was also extracted from the cells cultured without Helicobacter pylori.

[0388] The analysis by the ATAC-PCR method was carried out basically according to “DNA Micro-array and Advanced PCR Techniques”, Cell Technology, supplement (Genome Science Series 1, Eds., Muramatsu and Nawa (Shujunsha, 2000): 104-112). Adapter ligation to the internal standard sample (sample to make the calibration curve for the clone of interest) and test sample was carried out in the two separate reaction systems indicated below. The combination of 6 types of adapters (AD-1, AD-2, AD-3, AD-4, AD-5 and AD-6: see the sequences indicated below) and the samples are as follows.

[0389] Reaction system A

[0390] ADl; internal standard, 10-fold

[0391] AD2; THP-1 cells, unstimulated

[0392] AD3; internal standard, 3-fold

[0393] AD4; THP-1 cells, TNF-α stimulation for one hour

[0394] AD5; THP-1 cells, TNF-α stimulation for three hours

[0395] AD6; internal standard, 1-fold

[0396] Reaction system B

[0397] AD1; internal standard, 1-fold

[0398] AD2; MKN45 cells, unstimulated

[0399] AD3; internal standard, 3-fold

[0400] AD4; MKN45 cells, co-cultured with TN2(Helicobacter pylori)

[0401] AD5; internal standard, 10-fold

[0402] AD6; MKN45 cells, co-cultured with TN2ΔcagE(cagE gene mutant)

[0403] Adapter sequences:

| | |
|---|---|
| //5′-GTACATATTGTCGTTAGAACGCG-3′ | SEQ ID NO: 4887 |
| //3′-CATGTATAACAGCAATCTTGCGCCTAG-5′ | SEQ ID NO: 4888 |
| AD2; | |
| //5′-GTACATATTGTCGTTAGAACGCG-3′ | SEQ ID NO: 4889 |
| //3′-CATGTATAACAGCAATCTTGCGCTGACTAG-5′ | SEQ ID NO: 4890 |
| AD3; | |
| //5′-GTACATATTGTCGTTAGAACGCGCATACT-3′ | SEQ ID NO: 4891 |
| //3′-CATGTATAACAGCAATCTTGCGCGTATGACTAG-5′ | SEQ ID NO: 4892 |
| AD4; | |
| //5′-GTACATATTGTCGTTAGAACGCGATCCATACT-3′ | SEQ ID NO: 4893 |
| //3′-CATGTATAACAGCAATCTTGCGCTAGGTATGACTAG-5′ | SEQ ID NO: 4894 |
| AD5; | |
| //5′-GTACATATTGTCGTTAGAACGCGTCAATCCATACT-3′ | SEQ ID NO: 4895 |
| //3′-CATGTATAACAGCAATCTTGCGCAGTTAGGTATGACTAG-5′ | SEQ ID NO: 4896 |
| AD6; | |
| //5′-GTACATATTGTCGTTAGAACGCGTACTCAATCCATACT-3′ | SEQ ID NO: 4897 |
| //3′-CATGTATAACAGCAATCTTGCGCATGAGTTAGGTATGACTAG-5′ | SEQ ID NO: 4898 |

[0404] The internal standard sample used for this assay was a mixture of total RNAs from tissues (or culture cells; all from UNITECH) of Fetal Brain, Testis, Trachea, and Spleen. RNA was prepared according to the standard method.

[0405] The sequences of primers specific to the genes and the names of clones of interest in the analysis are as follows. The gene specific primers were-designed to produce the PCR products of 70 to 200 bp, which are derived from the adapter-containing cDNA. The sequence of adapter-specific primer (labeled with fluorescence (FAM)) used in the competitive PCR was GTACATATTGTCGTTAGAACGC (22 nucleotides; SEQ ID NO: 4899). PCR was basically carried out with a cycling profile of preheating at 94° C. for 3 minutes, and 35 or 40 cycles of denaturation at 94° C. for 30 seconds/annealing at 50° C. for 60 seconds/extension at 72° C. for 90 seconds.

[0406] The nucleotide sequences of clone specific primers used in the experiments

[0407] Clone name, primer sequence and SEQ ID NO are indicated below in this order. Each is demarcated by a double slash mark (//). For a clone for which a primer used in Reaction system A (THP-1 cells) was different from a primer used in Reaction system B (MKN45 cells), the sequence of each of the primers was shown.

| | | |
|---|---|---|
| 3NB6920014080 | //GTCCTGAAGGTAGATGCT// | SEQ ID NO: 4900 |
| ADRGL20013010 | //GGAGGATAGAGCTTGGAG// | SEQ ID NO: 4901 |
| ADRGL20067670 | //ATAAAACAGGACCAAGGA// | SEQ ID NO: 4902 |
| ADRGL20083310 | //AAATAAGGCTAAAATGGAACT// | SEQ ID NO: 4903 |
| ASTRO20032120 | //AGTGCTCCCAATTATCCG// | SEQ ID NO: 4904 |
| ASTRO20084250 | //TAGAAAATATGCTGGGTG// | SEQ ID NO: 4905 |
| ASTRO20152140 | //TCATTCTTCTCCCACAGC// | SEQ ID NO: 4906 |
| ASTRO20166810 | //AGTTTTATTTCCAGGCTATC// | SEQ ID NO: 4907 |
| ASTRO20181690 | //ATGGAGAACAGGACAGCT// | SEQ ID NO: 4908 |
| BLADE20004630 | //CAAACATCAACCAGAGAA// | SEQ ID NO: 4909 |
| BRACE20006400 | //TCCCAATCAGCTAAGGTC// | SEQ ID NO: 4910 |
| BRACE20019540 | //CAGGTTATCGAGAGTTACAT// | SEQ ID NO: 4912 |
| BRACE20038480 | //TCTGGTTGGATTTTGTGC// | SEQ ID NO: 4912 |
| BRACE20039040 | //TGAACTTTGTGGTCTGGT// | SEQ ID NO: 4913 |
| BRACE20039440 | //TGAACAGTGACATTTTAGG// | SEQ ID NO: 4914 |
| BRACE20052160 | //AAGAATAAAAGGGACGAG// | SEQ ID NO: 4915 |
| BRACE20053630 | //GTTTGATACAGATGATTAGGTTA// | SEQ ID NO: 4916 |
| BRACE20057620 | //GGACAGGTAAGAACTAGGC// | SEQ ID NO: 4917 |
| BRACE20058810 | //ATCATCTTTCCAATCCAG// | SEQ ID NO: 4918 |
| BRACE20060720 | //GTACCACCTGACCTTCTG// | SEQ ID NO: 4919 |
| BRACE2006O840 | //AGAAGTTTTATCCCACATTT// | SEQ ID NO: 4920 |
| BRACE20061740 //(Reaction system A) | //TAACATAACCCTCCCGTC// | SEQ ID NO: 4921 |
| //(Reaction system B) | //ATAGTGGTGACGTTCCCC// | SEQ ID NO: 4922 |
| BRACE20062640 | //TCTGTTGCTGAAGGAAAA// | SEQ ID NO: 4923 |
| BRACE20063780 | //TCCTGTGTGCTATTTGAA// | SEQ ID NO: 4924 |
| BRACE20067430 | //AATAACAGCAACTCCAGA// | SEQ ID NO: 4925 |
| BRACE20090440 | //CCCAACATTACCAAAAGT// | SEQ ID NO: 4926 |
| BRACE20101700 | //CAACATTTTCAAGCACTG// | SEQ ID NO: 4927 |
| BRACE20114780 | //GATGTTGGGGTTTGGAAG// | SEQ ID NO: 4928 |
| BRACE20151320 | //ACCAGCTGCCCATAGAAG// | SEQ ID NO: 4929 |
| BRACE20152870 | //GAAGGCAAGATGGTAAGT// | SEQ ID NO: 4930 |
| BRACE20163150 | //CATAGAGAAAGCGGGGAA// | SEQ ID NO: 4931 |
| BRACE20165830//(Reaction system A) | //TCTCCCTGTTCTCTCTTT// | SEQ ID NO: 4932 |
| //(Reaction system B) | //TATGACCCAAACGCCTAG// | SEQ ID NO: 4933 |
| BRACE20201570 | //CCTTCTCATCTAGCTTGC// | SEQ ID NO: 4934 |
| BRACE20210140 | //TACTGATTGGGAAGCACT// | SEQ ID NO: 4935 |
| BRACE20223330 | //GTTGAAATGCTTGAGCAC// | SEQ ID NO: 4936 |
| BRACE20224500 | //ATTTAGAGCGCCATCCTT// | SEQ ID NO: 4937 |
| BRACE20229280 | //CTGAGGGTAAAGGAAGGG// | SEQ ID NO: 4938 |
| BRACE20235400 | //TTTTACGATTGCCTTTGC// | SEQ ID NO: 4939 |
| BPACE20266750 | //TTAGGAGTGAAGACAGGA// | SEQ ID NO: 4940 |
| BRACE20267250 | //GTGCAGTGATAAGTGGCT// | SEQ ID NO: 4941 |
| BRACE20269710 | //AGGCAGGGAAAGTAGGGT// | SEQ ID NO: 4942 |
| BRALZ2001B340 | //AGGAGAGGCTTGAGGACT// | SEQ ID NO: 4943 |
| BRALZ20058880 | //AAGGGACCAAAATGAGAG// | SEQ ID NO: 4944 |
| BRALZ20059500 | //AACAGCCCTCTAATGAAA// | SEQ ID NO: 4945 |
| BRALZ20064740 | //ACTCATGTTGCTCCACCT// | SEQ ID NO: 4946 |
| BRALZ20069760 | //TATGTATGGCTTTGAGCA// | SEQ ID NO: 4947 |
| BPALZ20075450 | //GCTGAAGAAATGTGCTGC// | SEQ ID NO: 4948 |
| BRALZ20088690 | //ATCATAGTTGTACATACTTTGGG// | SEQ ID NO: 4949 |
| BRAMY20002770 | //TTCTTTCCTGTAATAGTTGG// | SEQ ID NO: 4950 |
| BRAMY20004110 | //AGCTATCTGTGAAAGTCCT// | SEQ ID NO: 4951 |
| BRAMY20060920//(Reaction system A) | //TGCTGTCTCGTGATAAAG// | SEQ ID NO: 4952 |
| //(Reaction system B) | //TTTCTAATGGTTTGGCAC// | SEQ ID NO: 4953 |
| BRAMY20103570//(Reaction system A) | //TCAACAGTGCTTTTCCTT// | SEQ ID NO: 4954 |
| //(Reaction system B) | //GACTCTTCTCCAGGGTGC// | SEQ ID NO: 4955 |
| BRAMY20144620 | //CACGCCATTCTGTTAAAA// | SEQ ID NO: 4956 |
| BRAMY20152110 | //AATGGGCTAAATATTGCT// | SEQ ID NO: 4957 |
| BRAMY20162510 | //GCAAATACAGGTAAATGACAG// | SEQ ID NO: 4958 |
| BRAMY20163250 | //CAAGAGAAATTAAAGAAGACC// | SEQ ID NO: 4959 |
| BRAMY20163270//(Reaction system A) | //TGCTTTCAACTGTCATTT// | SEQ ID NO: 4960 |
| //(Reaction system B) | //GAATGATGCCCGATGTAG// | SEQ ID NO: 4961 |
| BRAMY20168920 | //GAATATCCCTGTGGAGTC// | SEQ ID NO: 4962 |
| BRAMY20178640 | //AGTCTCACTCTATTGCCA// | SEQ ID NO: 4963 |
| BRAMY20184670 | //AACGAATAGCAGGGTAGC// | SEQ ID NO: 4964 |
| BRAMY20204450 | //GGTGAGTTACTGGCTGCA// | SEQ ID NO: 4965 |
| BRAMY20210400 | //AAGATTAACCATACAACAGAAA// | SEQ ID NO: 4966 |
| BRAMY20215230 | //TGAACAAGAAACACCAGT// | SEQ ID NO: 4967 |
| BRAMY20218670 | //AGGAGGCACGGTAACAAT// | SEQ ID NO: 4968 |
| BRAMY20229800 | //GTCTTCTGTCTCATGGGG// | SEQ ID NO: 4969 |
| BRAMY20229840 | //AAAGTTCATGAGGGGCTG// | SEQ ID NO: 4970 |
| BRAMY20231720 | //CAGCACAAAATCAGTTAAA// | SEQ ID NO: 4971 |
| BRAMY20247280 | //GGTTTAGATTTATGAGACAAGA// | SEQ ID NO: 4972 |
| BRAMY20261680 | //GTTACTGCAGGGCTTCAG// | SEQ ID NO: 4973 |
| BRAMY20266850 | //TGCATGGAATTAAGGAGT// | SEQ ID NO: 4974 |
| BRAMY20267130 | //AATCTGTAAAATGGGAATAAG// | SEQ ID NO: 4975 |
| BRAMY20277140//(Reaction system A) | //ATGAGATTGTGTTGTCCA// | SEQ ID NO: 4976 |
| //(Reaction system B) | //TTCCAGCATTTTCGTTTT// | SEQ ID NO: 4977 |
| BRAMY20280720//(Reaction system A) | //TTCCCAAGTCCAGATTTT// | SEQ ID NO: 4978 |
| //(Reaction system B) | //CTGAGGAGCAGTGACAAG// | SEQ ID NO: 4979 |
| BRAWH10000930 | //GGGAGAGAAGAGTCCTGC// | SEQ ID NO: 4980 |
| BRAWH20015350 | //GCTATGAAGACAACCAAACT// | SEQ ID NO: 4981 |
| BRAWH20017010 | //AGGAAGAGATGGGTCAGC// | SEQ ID NO: 4982 |
| BRAWH20029630 | //GGAGTATCACCATGTAAAGA// | SEQ ID NO: 4983 |
| BRAWH20100690//(Reaction system A) | //AAATGAGCACTCCATTCC// | SEQ ID NO: 4984 |
| //(Reaction system B) | //AATGAGCACTCCATTCCC// | SEQ ID NO: 4985 |
| BRAWH2010G180//(Reaction system A) | //CATTTTATTGTCACCCAC// | SEQ ID NO: 4986 |
| //(Reaction system B) | //CCTTTAACAGCATCTCTAGTG// | SEQ ID NO: 4987 |
| BRAWH20107540 | //GTTGAGCTATTTGCAGAG// | SEQ ID NO: 4988 |
| BRAWH20110660 | //CTTAGCAACTTTCCACAC// | SEQ ID NO: 4989 |
| BRAWH20118230 | //GTCAGAAAACTCACACCA// | SEQ ID NO: 4990 |
| BRAWH20122770 | //AAGTTGATAGGGAAGGTTT// | SEQ ID NO: 4991 |
| BRAWH20126190 | //ACCATGTGCTCAGAATCA// | SEQ ID NO: 4992 |
| BRAWH20132190 | //TAAGATTCACAGGGTGGA// | SEQ ID NO: 4993 |
| BRAWH20138660 | //GATGGAAAATGTAAGGCT// | SEQ ID NO: 4994 |
| BRAWH20139410 | //CCATCCTCTACACAGCAG// | SEQ ID NO: 4995 |
| BRAWH20155950//(Reaction system A) | //CTCTCATTTTGGCTCTGC// | SEQ ID NO: 4996 |
| //(Reaction system B) | //CTACTCCACCTCTGCTGC// | SEQ ID NO: 4997 |
| BRAWH20158530 | //AGTTTTCTGATGGCCTTG// | SEQ ID NO: 4998 |
| BRCAN20060190 | //AGGTAGCCCCAGAGTCAC// | SEQ ID NO: 4999 |
| BRCAN20147880 | //ACTCAGCAATCAGGTCCA// | SEQ ID NO: 5000 |
| BRCAN20273340 | //AATTATGAGATAGGATGTTAGCT// | SEQ ID NO: 5001 |
| BRCAN20273640 | //CTGCACCGATTTTATAGC// | SEQ ID NO: 5002 |
| BRCAN20275130 | //CACTATCCAGACACACCT// | SEQ ID NO: 5003 |
| BRCAN20280210 | //CACTGGATTTTCTTCACTT// | SEQ ID NO: 5004 |
| BRCAN20280400 | //GGAAGGATAGCAGTTGAT// | SEQ ID NO: 5005 |
| BRCOC20021550 | //TCCAAGCAGAGTTTTCAC// | SEQ ID NO: 5006 |
| BRCOC20037400 | //CAAGTCTGTTCATCTGGT// | SEQ ID NO: 5007 |
| BRCOC20105100//(Reaction system A) | //ACTTGAGGTTTCTTGGCA// | SEQ ID NO: 5008 |
| //(Reaction system B) | //GATTCTTCCCCGACTCAG// | SEQ ID NO: 5009 |
| BRHIP10001740 | //GTACACACCTGCTCCCAC// | SEQ ID NO: 5010 |
| BRHIP20001G30 | //GGTCAGTAAGTGGTTGTG// | SEQ ID NO: 5011 |
| BRHIP20096170 | //TTATTTTGGATGCCCCTG// | SEQ ID NO: 5012 |
| BRH1P20103090 | //ACTCCAACAACCTTCATT// | SEQ ID NO: 5013 |
| BRH1P20105710 | //TTTCAAGTATCCTCCCCA// | SEQ ID NO: 5014 |
| BRHIP20110800 | //TAGAACTGCCTCCAACCC// | SEQ ID NO: 5015 |
| BRHIP20111200 | //TACTGAACGGTGACTGGC// | SEQ ID NO: 5016 |
| BRHIP20118910 | //ACAGGAAGGGGAAAGAGT// | SEQ ID NO: 5017 |
| BRHIP20129720 | //GAGGAGAGTGAGAAGGGG// | SEQ ID NO: 5018 |
| BRHIP20143860 | //AGGTCAGGAGAACAAGCC// | SEQ ID NO: 5019 |
| BRHIP20173150 | //CTTTTGCAGAGTTTTCCT// | SEQ ID NO: 5020 |
| BRHIP20175420 | //TCTCTAGGGCAAAACATT// | SEQ ID NO: 5021 |
| BRH1P20186120//(Reaction system A) | //AATTGATACGCAGGGGAG// | SEQ ID NO : 5022 |
| //(Reaction system B) | //AAGGTCAGTTGAAGTGCT// | SEQ ID NO: 5023 |
| BRH1P20194940 | //TAGAGAAGGTGAGGCCAG// | SEQ ID NO: 5024 |
| BRH1P20196410 | //GGCATAGAAGTAATCAGAGA// | SEQ ID NO: 5025 |
| BRHIP20207430 | //AAGCTGAACCCCAATAAA// | SEQ ID NO: 5026 |
| BRHIP20218580 | //GATTACCAGAACACAGCC// | SEQ ID NO: 5027 |
| BRHIP20233090 | //GTCCATTTACCAACGGCT// | SEQ ID NO: 5028 |
| BRHIP20284800 | //CACATCTTTACATTTATTGCTATT// | SEQ ID NO: 5029 |
| BRHIP30004880 | //TCTTCTCGTAGGGCTTGA// | SEQ ID NO: 5030 |
| BRSSN20046570 | //AAACACGAAATGGATGAA// | SEQ ID NO: 5031 |
| BRSSN20142940 | //AGAATCAGAGAAGCCGGT// | SEQ ID NO: 5032 |
| BRSSN20152380 | //ATACCCATTTCAGTTCCT// | SEQ ID NO: 5033 |
| BRSSN20176820 | //CAGTCCCAATACAGCTCA// | SEQ ID NO: 5034 |
| BRSSN20187310//(Reaction system A) | //CAATGACTAGTTTGTGCA// | SEQ ID NO: 5035 |
| //(Reaction system B) | //AAAGAAGCCAGGAAGATT// | SEQ ID NO: 5036 |
| BRTHA20046390 | //ACATGGAGCCTGGTTTAG// | SEQ ID NO: 5037 |
| CD34C30004240 | //TGGAAGATACGGATAACTC// | SEQ ID NO: 5038 |
| CD34C30004940//(Reaction system A) | //ACCACTGTTCTCTGGTGC// | SEQ ID NO: 5039 |
| //(Reaction system B) | //CCACCACTGTTCTCTGGT// | SEQ ID NO: 5040 |
| COLON20043180 | //TCGGATTGGGTTAAGGTC// | SEQ ID NO: 5041 |
| CTONG10000620 | //CTCCATTCATCAGACCAC// | SEQ ID NO: 5042 |
| CTONG20014280 | //TCCAAAAGACAGAACAGC// | SEQ ID NO: 5043 |
| CTONG20095270 | //GTTTTGTTCCCTGCTCAC// | SEQ ID NO: 5044 |
| CTONG20095290 | //AACACAGCTCAACAACTC// | SEQ ID NO: 5045 |
| CTONG20096750 | //TGACTAAGCATGGAGACT// | SEQ ID NO: 5046 |
| CTONG20100240 | //AGTCATAATCATCTTCCTCA// | SEQ ID NO: 5047 |
| CTONG20103480 | //GGTGGAGTAATGTATATAACGTAA// | SEQ ID NO: 5048 |
| CTONG20105660 | //CCATTAACACAAACCAAA// | SEQ ID NO: 5049 |
| CTONG20121010 | //GGAAGATGGGACCTCAGT// | SEQ ID NO: 5050 |
| CTONG20128470 | //TTGGGGTATCTTGGAGCT// | SEQ ID NO: 5051 |
| CTONG20138030 | //GGCATAGAAGTAATCAGAGA// | SEQ ID NO: 5052 |
| CTONG20139070 | //TCAAACCTCCTATCTTCTG// | SEQ ID NO: 5053 |
| CTONG20146970 | //TTTTAATCCTCAGTACATTTTC// | SEQ ID NO: 5054 |
| CTONG20158150 | //AAATAGGTTGATGTTGGC// | SEQ ID NO: 5055 |
| CTONG20186320 | //TGACTTTGGCCCTTTACC// | SEQ ID NO: 5056 |
| CTONG20265130 | //GGGTAGGTGCTAGAAATC// | SEQ ID NO: 5057 |
| D3OST20006540 | //GGAGACCACACATAACAT// | SEQ ID NO: 5058 |
| D3OST20037970 | //CACTGACGAAAGGGAAGA// | SEQ ID NO: 5059 |
| D9OST20031370 | //CGACTTGCCAGACTCACT// | SEQ ID NO: 5060 |
| DFNES10001850 | //GTGGCTCAAAGTAGGATT// | SEQ ID NO: 5061 |
| DFNES20031920 | //CTTACTCCAACCCAGGCT// | SEQ ID NO: 5062 |
| FCBBF10005060 | //TGCATGTTTTCTTCCTCA// | SEQ ID NO: 5063 |
| FCBBF20032970 | //CCAGACACAACAATACCA// | SEQ ID NO: 5064 |
| FCBBF20035280//(Reaction system A) | //ATACAATTTGTGCCTGTTA// | SEQ ID NO: 5065 |
| //(Reaction system B) | //CGGTAAGTAGTCTTCATGTG// | SEQ ID NO: 5066 |
| FCBBF20054280 | //GGTGCATCTGTACTTGAA// | SEQ ID NO: 5067 |
| FCBBF20071860 | //TGGAGGAGTAGTTATCAGTTG// | SEQ ID NO: 5068 |
| FCBBF30001840 | //AGTGCTCCCAATTATCCG// | SEQ ID NO: 5069 |
| FCBBF30016320 | //GGCTACTCAAGGACACAG// | SEQ ID NO: 5070 |
| FCBBF30016570 | //AGGGATAAGATGGCAGGT// | SEQ ID NO: 5071 |
| FCBBF30033050 | //TCCTGTACTCCTTTCCAT// | SEQ ID NO: 5072 |
| FCBBF30071520 | //CAGGCATAAGAGGTGGCT// | SEQ ID NO: 5073 |
| FCBBF30083820 | //CCTGTGTGATACCAAATACT// | SEQ ID NO: 5074 |
| FCBBF30215060 | //CAGCCCCAATTACTAGAA// | SEQ ID NO: 5075 |
| FCBBF30251420 | //AGCATGTACTGGGAAAGC// | SEQ ID NO: 5076 |
| FCBBF30252520 | //AGGGATAAAGAATGCAAA// | SEQ ID NO: 5077 |
| FCBBF30262360 | //GAGCTTCAGGGGCATTTA// | SEQ ID NO: 5078 |
| FCBBF30266920 | //ATACGCAATTTTCAGACC// | SEQ ID NO: 5079 |
| FCBBF30278630 | //AAAAGACAACGATGCCTG// | SEQ ID NO: 5080 |
| FCBBF30285280 | //AAAGCAAAGTGATATAGGAGT// | SEQ ID NO: 5081 |
| FCBBF40001420 | //ACATTTCAGTCCATTCAC// | SEQ ID NO: 5082 |
| FEBRA10001880 | //TTGTCATGGTGGTAATCC// | SEQ ID NO: 5083 |
| FEBRA20010120 | //GGACCAGACTCACAAATT// | SEQ ID NO: 5084 |
| FEBRA20017050 | //TATACTAAAACCCAGCCA// | SEQ ID NO: 5085 |
| FEBRA20034360 | //CGGCAGCTAGAAAACCTC// | SEQ ID NO: 5086 |
| FEBRA20037260 | //CGTTGGTTTTCTGGACAC// | SEQ ID NO: 5087 |
| FEBRA20037500 | //CTCGGGCAGGATTAACTC// | SEQ ID NO: 5088 |
| FEBRA20082100 | //AGAAGATGCTAGGTTTGC// | SEQ ID NO: 5089 |
| FEBRA20095880 | //AGCATGTACTGGGAAAGC// | SEQ ID NO: 5090 |
| FEBRA20167390 | //GCTTATGTTGCAGTTTCA// | SEQ ID NO: 5091 |
| FEBRA20176800 | //TCAGTTTCAGGGGTCAAG// | SEQ ID NO: 5092 |
| FEBRA20226010 | //TCAGGGTATCAGCTTTCC// | SEQ ID NO: 5093 |
| HCASM10000500 | //TGTGGTGACTTACTGCCT// | SEQ ID NO: 5094 |
| HCHON20002260 | //CTCTCCAACAAACTGCAC// | SEQ ID NO: 5095 |
| HCHON20008980 | //CTGCTGCCTTACACAACC// | SEQ ID NO: 5096 |
| HCHON20009350 | //AGGTAATGAGGAATGCAC// | SEQ ID NO: 5097 |
| HCHON20010990 | //GATTCCACCCTCAAGATT// | SEQ ID NO: 5098 |
| HCHON20011160 | //CTCCTCCACGCTTGTTTT// | SEQ ID NO: 5099 |
| HCHON20015230 | //CTTGGTCACAGTTTTCAT// | SEQ ID NO: 5100 |
| HCHON20022470 | //CACACTTTCAATCCGAGG// | SEQ ID NO: 5101 |
| HCHON20035130 | //GTGGAAGATGCTCGACTG// | SEQ ID NO: 5102 |
| HCHON20043590 | //AGGATTAGGTATTGCTTCTC// | SEQ ID NO: 5103 |
| HCHON20067220 | //TAAGGAAAACCCAACCAC// | SEQ ID NO: 5104 |
| HCHON20076500 | //GAAAGACACCTGGCACAC// | SEQ ID NO: 5105 |
| HEART20021840 | //GTACCCCAAAAGAAACAT// | SEQ ID NO: 5106 |
| HEART20067870 | //GAACTATCTAATCACATGGG// | SEQ ID NO: 5107 |
| HEART20083640//(Reaction system A) | //TCTTGATGTCTCCTGCCT// | SEQ ID NO: 5108 |
| //(Reaction system B) | //CTCGGCTGGAAGGTAAAA// | SEQ ID NO: 5109 |
| HHDPC10000650 | //ACTGGTAAGATATGGGCA// | SEQ ID NO: 5110 |
| HHDPC20034390 | //CTCTCCCAAACTCAGGTC// | SEQ ID NO: 5111 |
| HHDPC20095280 | //TGACCCAAAGACATACTG// | SEQ ID NO: 5112 |
| HLUNG10000550 | //GATTTACTTCCGGTTTCG// | SEQ ID NO: 5113 |
| KIDNE20018970 | //AAGAGAATAAGGCTGGGC// | SEQ ID NO: 5114 |
| KIDNE20028720 | //AACAAAATAAGGGGCCAG// | SEQ ID NO: 5115 |
| KIDNE20079440 | //AAGTTCATCTGGGTGTGG// | SEQ ID NO: 5116 |
| KIDNE20096470 | //ATCACCTGGAGAGCTTTG// | SEQ ID NO: 5117 |
| KIDNE20106740 | //AGGGACACTGAGAACTGG// | SEQ ID NO: 5118 |
| KIDNE20120090 | //GAAGCAGGGAAGTGTGAG// | SEQ ID NO: 5119 |
| KIDNE20127750 | //GCTATTACACATTCTGCATT// | SEQ ID NO: 5120 |
| KIDNE20130450 | //CAGCTACTTGGGACAGGA// | SEQ ID NO: 5121 |
| KIDNE20132180//(Reaction system A) | //ACCAGCTCAGCAAGAACT// | SEQ ID NO: 5122 |
| //(Reaction system B) | //CTCTGACATGAACTGGTG// | SEQ ID NO: 5123 |
| KIDNE20141190 | //CACATTGCCTAGAGAAAG// | SEQ ID NO: 5124 |
| KIDNE20148900 | //ACAACAGCAGATGACTCG// | SEQ ID NO: 5125 |
| KIDNE20163880 | //CAGTCACATCTCCCTTTA// | SEQ ID NO: 5126 |
| K1DNE20182690 | //TCACTGTATCACCATCTG// | SEQ ID NO: 5127 |
| L1VER10004790 | //TCCCTGCTAAGATGTTGA// | SEQ ID NO: 5128 |
| LIVER20011130 | //GAGGTCAAGGACACACAG// | SEQ ID NO: 5129 |
| L1VER20038540//(Reaction system A) | //AAGCAATGTGGCAGACTC// | SEQ ID NO: 5130 |
| //(Reaction system B) | //AGTGGGTTCTTTATCATTTT// | SEQ ID NO: 5131 |
| LIVER20055440 | //GTTTGCCAGGGAATGTTT// | SEQ ID NO: 5132 |
| LIVER20062510 | //GTAACGTGCTCTGAATGA// | SEQ ID NO: 5133 |
| L1VER20085800 | //GCTCTGCTGTTTCTAATTT// | SEQ ID NO: 5134 |
| MAMGL10000830 | //TCGATACGTGGAAGAATT// | SEQ ID NO: 5135 |
| MESAN20031900 | //TCCCAAGGCTGTAGTTCA// | SEQ ID NO: 5136 |
| MESAN20121130 | //AGCTTGTATCTAAATTCGTG// | SEQ ID NO: 5137 |
| MESAN20127350 | //CAGAAGACAGGTTGCCAG// | SEQ ID NO: 5138 |
| MESAN20130220 | //CCTAAGATTGGTCGTCCT// | SEQ ID NO: 5139 |
| MESAN20154010 | //ATCCTGTCATCTTTTCGC// | SEQ ID NO: 5140 |
| MESAN20174170 | //TGGCTAAGGTTCTCAGGA// | SEQ ID NO: 5141 |
| NOVAR10001020 | //GGGTCAGTAAATCTAATGC// | SEQ ID NO: 5142 |
| NT2NE20053580 | //CAAAACACAGAGTTATCAGAA// | SEQ ID NO: 5143 |
| NT2NE20089610 | //TGCTGTCCTAGAAGAATAAA// | SEQ ID NO: 5144 |
| NT2NE20089970 | //ACAATTATACTGGAAAAGCA// | SEQ ID NO: 5145 |
| NT2NE20146810 | //GCTGAGACCTTTTGCTAG// | SEQ ID NO: 5146 |
| NT2NE20155110 | //AGCCGAGGTTTTGAGTTA// | SEQ ID NO: 5147 |
| NT2NE20156260 | //ACATTTGCACTGGAACTG// | SEQ ID NO: 5148 |
| NT2NE20158600 | //CTCAGAAGCCCAGCAATT// | SEQ ID NO: 5149 |
| NT2NE20172590 | //ACATCATAATCAAGCAGTAAA// | SEQ ID NO: 5150 |
| NT2NE20174920 | //AGGACAGCAACAAGAGAG// | SEQ ID NO: 5151 |
| NT2NE20181650 | //AGAGCTGATTTATACGCA// | SEQ ID NO: 5152 |
| NT2RI20005750 | //AAGGAGTCTACGAAGCAC// | SEQ ID NO: 5153 |
| NT2RI20009870 | //AAGATGACCCCGAGTTTG// | SEQ ID NO: 5154 |
| NT2RI20023160 | //CATGCAAATAGAGGACTG// | SEQ ID NO: 5155 |
| NT2RI20040930 | //CCATACTGTTCTCTGCTG// | SEQ ID NO: 5156 |
| NT2RI20046080 | //CCGTAACTTTTATATGCCTG// | SEQ ID NO: 5157 |
| NT2RI20055790 | //GCAAGAGCTACAGACAAA// | SEQ ID NO: 5158 |
| NT2RI20069730 | //AGTGTGCAGAAATCCGTG// | SEQ ID NO: 5159 |
| NT2RI20203900 | //AGCAGTAGCACAGCCTTA// | SEQ ID NO: 5160 |
| NT2RP70062230//(Reaction system A) | //ACTCTAACACATTTGGCA// | SEQ ID NO: 5161 |
| //(Reaction system B) | //TATTAGTGTGAGCTGGCA// | SEQ ID NO: 5162 |
| NT2RP70102350//(Reaction system A) | //ATAGGAGGTGTCATGCCC// | SEQ ID NO: 5163 |
| //(Reaction system B) | //TCTTTTGACCTACACTGC// | SEQ ID NO: 5164 |
| NT2RP70110860 | //GGGGAAGGGAGTAAGGTC// | SEQ ID NO: 5165 |
| NT2RP70111320 | //ACTTAGCATCCAGACCTC// | SEQ ID NO: 5166 |
| NT2RP70130020 | //ATACTCTCTGCTCATGGA// | SEQ ID NO: 5167 |
| NT2RP70143480 | //TTCTTGGCATCCTTCATT// | SEQ ID NO: 5168 |
| NT2RP70150800//(Reaction system A) | //GAGGCTTGTCTAGGGGAA// | SEQ ID NO: 5169 |
| //(Reaction system B) | //GAACAAGGGATGCAGGAT// | SEQ ID NO: 5170 |
| NT2RP70157890//(Reaction system A) | //TATGTGATGTTTTCCCCA// | SEQ ID NO: 5171 |
| //(Reaction system B) | //CTGCCTAAATAACACTGAAG// | SEQ ID NO: 5172 |
| NT2RP70169110 | //CTGTCCTCATCTGTGCAT// | SEQ ID NO: 5173 |
| NT2RP70175670 | //GGTAGAACGGGAAATCAT// | SEQ ID NO: 5174 |
| NT2RP70188020 | //AGGTTTGAGTAGAGGGAA// | SEQ ID NO: 5175 |
| NT2RP70188710 | //ATACAGCAGGGAAGAGGC// | SEQ ID NO: 5176 |
| NT2RP70190640 | //CAATGTGTCTTCAGTTTCC// | SEQ ID NO: 5177 |
| NTONG20029480 | //TCTTGATGTCTCCTGCCT// | SEQ ID NO: 5178 |
| NTONG20064840 | //AAAGCCATCGTACACCAT// | SEQ ID NO: 5179 |
| NTONG20067090 | //AATTCTTTAGCTCTGTTGC// | SEQ ID NO: 5180 |
| NTONG20070340 | //ATCCACTGCCCCTTATCA// | SEQ ID NO: 5181 |
| NTONG20077560 | //CTGCTAGAATACGCCTTA// | SEQ ID NO: 5182 |
| NTONG20083650 | //CTCATAGTTCAAGGCAGC// | SEQ ID NO: 5183 |
| NTONG20090680 | //GAGTAAGGTCGTAGTCAGTG// | SEQ ID NO: 5184 |
| OCBBF20005230 | //GCAAGAGCTACAGACAAA// | SEQ ID NO: 5185 |
| OCBBF20019380 | //GTGGTCAGTGGAAAATGG// | SEQ ID NO: 5186 |
| OCBBF20020150 | //GGGACAGTATGGCAGAGA// | SEQ ID NO: 5187 |
| OCBBF20020830 | //GCTTGCCATAGGTGTACT// | SEQ ID NO: 5188 |
| OCBBF20039250 | //TTTCAGCAGTTAAGTGTTTT// | SEQ ID NO: 5189 |
| OCBBF20041680 | //TCAGAAGGTATGCCCACT// | SEQ ID NO: 5190 |
| OCBBF20047570 | //ACCCTTATGTCAAACTGC// | SEQ ID NO: 5191 |
| OCBBF20051610 | //TTTTCCTACCTGCAATGG// | SEQ ID NO: 5192 |
| OCBBF20054200 | //GTCAGAAGCCATACGTGC// | SEQ ID NO: 5193 |
| OCBBF20061720 | //CAAAGTGGCCTAAACCCT// | SEQ ID NO: 5194 |
| OCBBF20062140 | //CTGGGGAGATAAGAGCCT// | SEQ ID NO: 5195 |
| OCBBF20071960//(Reaction system A) | //CTCAGTCACGCAATAGAT// | SEQ ID NO: 5196 |
| //(Reaction system B) | //TCTCTGGAAGGGAAAATT// | SEQ ID NO: 5197 |
| OCBBF20072320 | //AAGAAGGAATGGGCACAC// | SEQ ID NO: 5198 |
| OCBBF20079310 | //CAGTAGCAAAACCAGAGC// | SEQ ID NO: 5199 |
| OCBBF20081380 | //GTGGAAGTGCCTGATGAG// | SEQ ID NO: 5200 |
| OCBBF20085200 | //TACAGGGTCAGTTGGCAG// | SEQ ID NO: 5201 |
| OCBBF20094240 | //ACACAATTCATCACTGCT// | SEQ ID NO: 5202 |
| OCBBF20107920 | //GGTTGCTGTGAGTGCATT// | SEQ ID NO: 5203 |
| OCBBF20127040 | //TAGAGGAGGCAGTAAGGG// | SEQ ID NO: 5204 |
| OCBBF20130110 | //AGTGTCTATGGCTCTTCC// | SEQ ID NO: 5205 |
| OCBBF20139260 | //GGGTGGTTCTGTTAGGAG// | SEQ ID NO: 5206 |
| OCBBF20164050 | //TGCTGGAAATAATCGCTT// | SEQ ID NO: 5207 |
| OCBBF20178990 | //TGAGTGTGGTGAAGATAGT// | SEQ ID NO: 5208 |
| OCBBF20180840 | //AGAAACCTGAACGATGTC// | SEQ ID NO: 5209 |
| PEBLM10000240 | //ATTACGATGCTTTGTTCA// | SEQ ID NO: 5210 |
| PEBLM20013120 | //TAAAATTCTTGTGGTTGG// | SEQ ID NO: 5211 |
| PEBLM20024550 | //TTGTGCCCTTAGAAAATC// | SEQ ID NO: 5212 |
| PEBLM20052820 | //CCTGATAACCATGAATTG// | SEQ ID NO: 5213 |
| PEBLM20074370 | //AGCATTTGGTTTTATACTGTTA// | SEQ ID NO: 5214 |
| PERIC20002140 | //CGTTACCATCACAATTTCA// | SEQ ID NO: 5215 |
| PERIC20004780 | //ACTTGAGCAGAGGAGAGC// | SEQ ID NO: 5216 |
| PLACE60003480 | //ACTGGTATTTGCTGTGAA// | SEQ ID NO: 5217 |
| PLACE60136720 | //AGGAACAGAGGCTACATC// | SEQ ID NO: 5218 |
| PLACE60155130 | //GTCTAGCTGGGATGATGG// | SEQ ID NO: 5219 |
| PLACE60169420 | //AAGACCCCGATAGAGAGC// | SEQ ID NO: 5220 |
| PLACE60181070 | //CCTTCTTCAGTCTTGCAC// | SEQ ID NO: 5221 |
| PROST10004800 | //AGTTTTGTTCACCCCTCC// | SEQ ID NO: 5222 |
| PROST20120160 | //TAGAATGGTGGGAAGTGG// | SEQ ID NO: 5223 |
| PROST20144220 | //TTAGTGGTCTGTTGATAGTTTT// | SEQ ID NO: 5224 |
| PROST20149160 | //TTGGGCTTAGGTGAGTCC// | SEQ ID NO: 5225 |
| PROST20149250 | //GGTACATAAGGAATCGCT// | SEQ ID NO: 5226 |
| PROST20151240//(Reaction system A) | //ACTCTCGCTTCCTGTCAC// | SEQ ID NO: 5227 |
| //(Reaction system B) | //GACGGACCCTTGACATTA// | SEQ ID NO: 5228 |
| PROST20153320 | //ACTGTGGAGAAGGAGGGA// | SEQ ID NO: 5229 |
| PROST20161950 | //ATTTGACGTATCCATGCC// | SEQ ID NO: 5230 |
| PROST20189770 | //TGGTAAGTGGTGGAAGCT// | SEQ ID NO: 5231 |
| PUAEN20003740 | //CCAAAACAATAATCCAACAT// | SEQ ID NO: 5232 |
| PUAEN20011880 | //AGCCGTTGTCATCATAGA// | SEQ ID NO: 5233 |
| PUAEN20015260 | //ATTGGAAGTCCCTATGAT// | SEQ ID NO: 5234 |
| PUAEN20025680 | //CTCCTCTGAAGTAGCTGC// | SEQ ID NO: 5235 |
| PUAEN20040670 | //AATGGTTCTCTGGCTTGG// | SEQ ID NO: 5236 |
| PUAEN20045250 | //CAAAATGGTTAAACACAAA// | SEQ ID NO: 5237 |
| PUAEN20078980 | //AGAAAGGCACACAATAAA// | SEQ ID NO: 5238 |
| PUAEN20085150 | //AATTTAGGGGAACTGAGTAC// | SEQ ID NO: 5239 |
| SKMUS20018230 | //TTCGCTCTTATCACCCAG// | SEQ ID NO: 5240 |
| SKMUS20028210 | //ACTTGCCTTGGAATTGCT// | SEQ ID NO: 5241 |
| SKMUS20031680 | //CAGAAGAACAGGAGGCAC// | SEQ ID NO: 5242 |
| SKMUS20046670 | //GCAACGTCTTACTGTGAA// | SEQ ID NO: 5243 |
| SKNSH20062340 | //GACATTGACGTATTCTAACTG// | SEQ ID NO: 5244 |
| SKNSH20080430 | //TACCCTCCGCTGTGTTAG// | SEQ ID NO: 5245 |
| SMINT20001760 | //CTCCTCCAGCTCTTGTCC// | SEQ ID NO: 5246 |
| SMINT20013480 | //GGCACGTTTTAATATACCAC// | SEQ ID NO: 5247 |
| SMINT20014580 | //CCCTCCAGACAGTTCAAA// | SEQ ID NO: 5248 |
| SMINT20033400 | //CGATGGGTAGGACTTAAA// | SEQ ID NO: 5249 |
| SMINT20047810//(Reaction system A) | //CTCCTGACATTTCCTTTT// | SEQ ID NO: 5250 |
| //(Reaction system B) | //TAGGAAAAGAAGCAGGGC// | SEQ ID NO: 5251 |
| SMINT20051610 | //AGTGAGGTTAGGGAAATATC// | SEQ ID NO: 5252 |
| SMINT20056210 | //TATTCCTGTTTGATGGGG// | SEQ ID NO: 5253 |
| SMINT20060780 | //TCTGTAATAGGGAGGTGTC// | SEQ ID NO: 5254 |
| SMINT20080540 | //GAGGTACTTTTCAGACAGG// | SEQ ID NO: 5255 |
| SMINT20105000//(Reaction system A) | //AAAATGAGGTTCAGTCCC// | SEQ ID NO: 5256 |
| //(Reaction system B) | //TCACCTCCCCATTAACTG// | SEQ ID NO: 5257 |
| SMINT20108530 | //CACCCTCGTTTTCTTTAG// | SEQ ID NO: 5258 |
| SMINT20122850 | //AGCTAAATCCACTGAGGT// | SEQ ID NO: 5259 |
| SMINT20122910 | //GGACAGACTTGCAGAGAA// | SEQ ID NO: 5260 |
| SMINT20153530 | //GGGCCTAGAGTGGAAGTG// | SEQ ID NO: 5261 |
| SMINT20161220 | //AGAACCAGTCCAAGCCAT// | SEQ ID NO: 5262 |
| SMINT20163960 | //TTGATAAAATAGAGCCCA// | SEQ ID NO: 5263 |
| SMINT20164770 | //AGTGTGCAGAAATCCGTG// | SEQ ID NO: 5264 |
| SMINT20168570//(Reaction system A) | //TGGTCCTCATGGTACAGC// | SEQ ID NO: 5265 |
| //(Reaction system B) | //ATGGCTGCTAGCTTGTCA// | SEQ ID NO: 5266 |
| SPLEN20008820 | //CTGTCTGCCCTGAATCTT// | SEQ ID NO: 5267 |
| SPLEN20011410 | //TTTTGGGACTGGAAGGAG// | SEQ ID NO: 5268 |
| SPLEN20013540 | //TCACTCACACCAATCCTG// | SEQ ID NO: 5269 |
| SPLEN20019450 | //TTCGTAAACATCTGGGCA// | SEQ ID NO: 5270 |
| SPLEN20022230 | //AAGTTGCACCCAGACATC// | SEQ ID NO: 5271 |
| SPLEN20040600 | //TCTTATTTCACAGTTTCCA// | SEQ ID NO: 5272 |
| SPLEN20076530 | //CCCCACAGAACACTTACT// | SEQ ID NO: 5273 |
| SPLEN20101190 | //AGACGTAGCAGCAACTCC// | SEQ ID NO: 5274 |
| SPLEN20126190 | //TAGACCCAACCCTCACAC// | SEQ ID NO: 5275 |
| SPLEN20152760 | //TGAGACGAATTGGTAAAA// | SEQ ID NO: 5276 |
| SPLEN20157300 | //CTTGACATTTGCTCTCCA// | SEQ ID NO: 5277 |
| SPLEN20158990 | //AAAACTGGGTCAAATAAAA// | SEQ ID NO: 5278 |
| SPLEN20163560 | //TGCCCAGATAGAAAAGTG// | SEQ ID NO: 5279 |
| SPLEN20174260 | //GGCCTTGTTGAATCTGAA// | SEQ ID NO: 5280 |
| SPLEN20211570 | //CTCAACACAACTCCAAGC// | SEQ ID NO: 5281 |
| SPLEN20214580 | //CCAAACGAATGTCAAGCT// | SEQ ID NO: 5282 |
| SPLEN20245300 | //ATCTGCTCTTCATCCCTT// | SEQ ID NO: 5283 |
| SPLEN20279950 | //CCTGTTCCTAGACCGCAT// | SEQ ID NO: 5284 |
| SPLEN20280660 | //GGCCAGACAGGAAGAGTT// | SEQ ID NO: 5285 |
| SPLEN20283650 | //AAGTTGATGCTCCTGTTG// | SEQ ID NO: 5286 |
| SPLEN20329240//(Reaction system A) | //TAACACATGGACTGCTGG// | SEQ ID NO: 5287 |
| //(Reaction system B) | //AAGGTAGGAAATGCCAGC// | SEQ ID NO: 5288 |
| STOMA20010250 | //TTTTGACCATAAGCTCCT// | SEQ ID NO: 5289 |
| STOMA20032890 | //CGAGAAATAACTAATACACCTG// | SEQ ID NO: 5290 |
| STOMA20048520 | //GAGGGTGAAGCAGGTAGG// | SEQ ID NO: 5291 |
| STOMA20057820 | //GGCATTTCCCTTGTATATT// | SEQ ID NO: 5292 |
| STOMA20062290 | //CCGTGTATTCAGCTCCCT// | SEQ ID NO: 5293 |
| STOMA20076800 | //TAAACGGGAATCAGGAAG// | SEQ ID NO: 5294 |
| TESTI20001170 | //TTTCAGACATATCAAGTTCA// | SEQ ID NO: 5295 |
| TESTI20002780 | //ATTCCAGCCATACGGTTA// | SEQ ID NO: 5296 |
| TESTI20004890 | //AAAACCACAGGAAGAAAG// | SEQ ID NO: 5297 |
| TESTI20011200 | //TACAAGTTCACCTGCATT// | SEQ ID NO: 5298 |
| TESTI20018230 | //AACCACTCAGCAGAAAGA// | SEQ ID NO: 5299 |
| TESTI20035960 | //TGTCCATAGAGCCAGTTA// | SEQ ID NO: 5300 |
| TESTI20038270 | //GTTCTGTTGGAGGTGCTG// | SEQ ID NO: 5301 |
| TESTI20044230 | //AGGTCTTTTGTGTGCTGA// | SEQ ID NO: 5302 |
| TESTI20046750 | //GTAGTTGTCCTGCATGGC// | SEQ ID NO: 5303 |
| TESTI20060400 | //GGCCAGGATACTACACTT// | SEQ ID NO: 5304 |
| TESTI20066770 | //AACTGGCATTGGAGACCT// | SEQ ID NO: 5305 |
| TESTI20076850 | //TTGGTTTGTGATGTTAAGT// | SEQ ID NO: 5306 |
| TESTI20083940 | //TTTGTCTTCCGGTAGTTA// | SEQ ID NO: 5307 |
| TESTI20087620 | //TGCCACTCTTGAAAACTC// | SEQ ID NO: 5308 |
| TESTI20098530 | //TCCATTACACAACAGCCT// | SEQ ID NO: 5309 |
| TESTI20105720 | //GGCAGACTTGTTTGAGCT// | SEQ ID NO: 5310 |
| TESTI20108720 | //TAGTTCTGTTGAGGCCCC// | SEQ ID NO: 5311 |
| TESTI20123080//(Reaction system A) | //CCTGTTTCTCTTCCTGAA// | SEQ ID NO: 5312 |
| //(Reaction system B) | //CTAAGTCCAGAAGCCTCG// | SEQ ID NO: 5313 |
| TESTI20128350 | //ATACCATGCTCCAACACC// | SEQ ID NO: 5314 |
| TESTI20136100 | //TTCACTTTTGTTCTCCAG// | SEQ ID NO: 5315 |
| TESTI20137670 | //CCTCCACTCTTCCTGTTG// | SEQ ID NO: 5316 |
| TESTI20143240 | //CTAAGAAGTCCTGGTTGG// | SEQ ID NO: 5317 |
| TESTI20143620//(Reaction system A) | //TTTTGTCTGAATTTGGAA// | SEQ ID NO: 5318 |
| //(Reaction system B) | //TGTAGAAAGCCTAACCCC// | SEQ ID NO: 5319 |
| TESTI20156100 | //ACTGGGCACATTCATAAA// | SEQ ID NO: 5320 |
| TESTI20161970 | //GTTCTATGCCTTGAGCCT// | SEQ ID NO: 5321 |
| TESTI20168480 | //AACTCTGGGTACCAACTT// | SEQ ID NO: 5322 |
| TESTI20168960 | //CTCCCTCTCCTTTCCTCA// | SEQ ID NO: 5323 |
| TESTI20178160 | //CGTTTTCTCGATGTCCAG// | SEQ ID NO: 5324 |
| TESTI20185810 | //AACATTCCTTGCAGCTCA// | SEQ ID NO: 5325 |
| TESTI20199170 | //AGAGTGAGCTGTGCCTTG// | SEQ ID NO: 5326 |
| TESTI20200260 | //CCAAGACATACCCAGGCT// | SEQ ID NO: 5327 |
| TESTI20200710 | //AATTGTGACAAGCAGCAG// | SEQ ID NO: 5328 |
| TESTI20202650 | //TGTTCATGTCACTGGCTG// | SEQ ID NO: 5329 |
| TESTI20220100//(Reaction system A) | //CTTCATAGGGCAGACTCC// | SEQ ID NO: 5330 |
| //(Reaction system B) | //GCTGTGAACTAGAGGGGC// | SEQ ID NO: 5331 |
| TESTI20224620 | //GGAGAAACCGATGAAGAA// | SEQ ID NO: 5332 |
| TESTI20229600//(Reaction system A) | //TTTAATAGTGCCCTGTGG// | SEQ ID NO: 5333 |
| //(Reaction system B) | //CTCTGGAATTTGCATTGA// | SEQ ID NO: 5334 |
| TESTI20230850 | //CAAGACTATGGAGGGGAG// | SEQ ID NO: 5335 |
| TESTI20231920 | //CTCCTCTTGCATTCTCCC// | SEQ ID NO: 5336 |
| TESTI20234140 | //CCAGTTATATCCCCAAAA// | SEQ ID NO: 5337 |
| TESTI20234270 | //CATAAAACCGAATAACTGAG// | SEQ ID NO: 5338 |
| TESTI20238000 | //AGTGTTTGTGGGCATAGA// | SEQ ID NO: 5339 |
| TESTI20238610 | //ACTTCAGACCTCCCTAGA// | SEQ ID NO: 5340 |
| TESTI20239510 | //TTATTGAAGGAAAGCCGC// | SEQ ID NO: 5341 |
| TESTI20242990 | //CCCTGCCTTCCCTATAGA// | SEQ ID NO: 5342 |
| TESTI20265250 | //GGGAAATAGAGGAGTGAT// | SEQ ID NO: 5343 |
| TESTI20265370 | //TGGTTTCAGATGTGCCTT// | SEQ ID NO: 5344 |
| TESTI20266740 | //TGGAAGAACGAAAGAGCC// | SEQ ID NO: 5345 |
| TESTI20272390 | //TCCAGGGTGTCGTAGAAG// | SEQ ID NO: 5346 |
| TESTI20275030 | //GCACGTTAAGGACTGTTT// | SEQ ID NO: 5347 |
| TESTI20275620//(Reaction system A) | //TGTGCCTGACTAGGTGAG// | SEQ ID NO: 5348 |
| //(Reaction system B) | //AAGGACAGGTGAGTGTGG// | SEQ ID NO: 5349 |
| TESTI20277360 | //TGGAGTACAACCTGCATC// | SEQ ID NO: 5350 |
| TESTI20282540 | //TGTCTGGTAGAGTTGCGG// | SEQ ID NO: 5351 |
| TESTI20284880 | //TGATTTAATGAGTGGAACC// | SEQ ID NO: 5352 |
| TESTI20285830//(Reaction system A) | //CATGTGACCTTCTCTGGC// | SEQ ID NO: 5353 |
| //(Reaction system B) | //CAGTTCTTTAGCCAGGGA// | SEQ ID NO: 5354 |
| TESTI20288110 | //CCTTTTGTCTGATTCGTC// | SEQ ID NO: 5355 |
| TESTI20289850 | //CCTTACCAAACTCATCCA// | SEQ ID NO: 5356 |
| TESTI20307540 | //CGTGCATGAAAGTGAGTC// | SEQ ID NO: 5357 |
| TESTI20308600 | //CTTCTCAATCATCAGGGA// | SEQ ID NO: 5358 |
| TESTI20311290 | //TTCTCTGCACTCCTTGAT// | SEQ ID NO: 5359 |
| TESTI20317600 | //GAGTGTCTGGCATGGTTA// | SEQ ID NO: 5360 |
| TESTI20319190 | //AAGCTGGGATGATAAGGG// | SEQ ID NO: 5361 |
| TESTI20332420//(Reaction system A) | //CTTCTTGGTGCTGCTTTT// | SEQ ID NO: 5362 |
| //(Reaction system B) | //GCAGATATGTTTGTGAGAG// | SEQ ID NO: 5363 |
| TESTI20335200 | //AATAAACTACACCAGGGC// | SEQ ID NO: 5364 |
| TESTI20342430 | //TCCTACGTTGAGTTGCCT// | SEQ ID NO: 5365 |
| TESTI20345060 | //GTCCACTAGAAGAGGGTC// | SEQ ID NO: 5366 |
| TESTI20347300 | //GAAAGCTGTCGTTAAGGT// | SEQ ID NO: 5367 |
| TESTI20357960 | //AATGACAGGTGAGTGGGT// | SEQ ID NO: 5368 |
| TESTI20361140 | //AATTCACCAGGCTGTGTG// | SEQ ID NO: 5369 |
| TESTI20369220//(Reaction system A) | //TGGATTTGGAAGAGACCT// | SEQ ID NO. 5370 |
| //(Reaction system B) | //TTTGGGTGGAAGTAGAGA// | SEQ ID NO: 5371 |
| TESTI20369690 | //GCTGGTTATTCACGTGGT// | SEQ ID NO: 5372 |
| TEST120370020//(Reaction system A) | //TGGTCATACTCACTGCCC// | SEQ ID NO: 5373 |
| //(Reaction system B) | //GACCTGGTCATACTCACTG// | SEQ ID NO: 5374 |
| TESTI20371030 | //CTAAAGTCCAAAATGTGTAAGT// | SEQ ID NO: 5375 |
| TESTI20386230//(Reaction system A) | //GCTAAGGTGCTATGAAGG// | SEQ ID NO: 5376 |
| //(Reaction system B) | //ACAGTAAAAGGGCAAGTG// | SEQ ID NO: 5377 |
| TESTI20391210 | //AATACTCACATGCCAAGC// | SEQ ID NO: 5378 |
| TESTI20392090 | //CTTGGTTACAGAGGACAG// | SEQ ID NO: 5379 |
| TESTI20392250 | //ATTCCACTCTGCTCAAAG// | SEQ ID NO: 5380 |
| TESTI20392270 | //CCTTGTTGTCCATGAGTC// | SEQ ID NO: 5381 |
| TESTI20401020 | //CGTACACCACATAGCTGA// | SEQ ID NO: 5382 |
| TESTI20401430 | //TGGTAGAAAGAGAGTCACAT// | SEQ ID NO: 5383 |
| TESTI20409440 | //TAGAGCACGTTTCCCTGA// | SEQ ID NO: 5384 |
| TESTI20415640 | //TCTGGAAAATGAGGGTTA// | SEQ ID NO: 5385 |
| TESTI20424000 | //CCAGCTTTCTTCATCATC// | SEQ ID NO: 5386 |
| TESTI20424730 | //AGGAGTGTGGCATAGTCA// | SEQ ID NO: 5387 |
| TESTI20425070 | //AAAGCCATCAGACCTCAT// | SEQ ID NO: 5388 |
| TESTI20433130 | //GTCCCATGATTTAGAACTC// | SEQ ID NO: 5389 |
| TESTI20438570 | //CTGCACTAGCCTTTTCCA// | SEQ ID NO: 5390 |
| TESTI20443090 | //GGAAGACAGGACCCAAGT// | SEQ ID NO: 5391 |
| TESTI20463520 | //TGTTGGACTAGAGGGGAA// | SEQ ID NO: 5392 |
| TESTI20465520 | //TCCAGGTCTCATTCTCTC// | SEQ ID NO: 5393 |
| TESTI20478010 | //TCCCTATCAGACGACCAG// | SEQ ID NO: 5394 |
| TESTI20478180 | //AAATCACCCTGCTTGTCA// | SEQ ID NO: 5395 |
| THYMU20029100 | //AGAAGCCAGGGAAGAGGT// | SEQ ID NO: 5396 |
| THYMU20061700 | //CTAGCTCTGAAGTGGCAT// | SEQ ID NO: 5397 |
| THYMU20095960//(Reaction system A) | //TGAAGAGATTACCCAGGT// | SEQ ID NO: 5398 |
| //(Reaction system B) | //GGACTCTGTAGATGTAACTGA// | SEQ ID NO: 5399 |
| THYMU20111180//(Reaction system A) | //TTCTGGGTAAGCCTGATT// | SEQ ID NO: 5400 |
| //(Reaction system B) | //CAAAGAATACCACAAATAGC// | SEQ ID NO: 5401 |
| THYMU20118060 | //CCAAGGCTAAAGAGAGAG// | SEQ ID NO: 5402 |
| THYMU20130890//(Reaction system A) | //AATCTCAAGGACCAGTTT// | SEQ ID NO: 5403 |
| //(Reaction system B) | //GACACAATGGACTCAAAA// | SEQ ID NO: 5404 |
| THYMU20142040 | //ACAGAAGGCCACAGTCAG// | SEQ ID NO: 5405 |
| THYMU20142970 | //CAAGGATACTGTGATGAAA// | SEQ ID NO: 5406 |
| THYMU20153160 | //GGTGGTTAGGACATTTCTC// | SEQ ID NO: 5407 |
| THYMU20158250 | //AAGGAGTGGATAGATGAATAG// | SEQ ID NO: 5408 |
| THYMU20187720 | //TGGTTACAAAGTCACAGG// | SEQ ID NO: 5409 |
| THYMU20194360 | //TTCACTTTTGTTTCCCAG// | SEQ ID NO: 5410 |
| THYMU20208300 | //ATACCACTAAGGCCCAGG// | SEQ ID NO: 5411 |
| THYMU20226600 | //GACTCTTTCAGCTGCTGC// | SEQ ID NO: 5412 |
| THYMU20239000 | //CAAATGGACAGGAACTTA// | SEQ ID NO: 5413 |
| THYMU20253250//(Reaction system A) | //AGAAAACCAGATAGGGCC// | SEQ ID NO: 5414 |
| //(Reaction system B) | //TAATGCAGGGAATGGAGT// | SEQ ID NO: 5415 |
| THYMU20272490 | //CATTATACACACGACGAA// | SEQ ID NO: 5416 |
| THYMU20284120 | //AAACCCACAGTGCTTCAT// | SEQ ID NO: 5417 |
| THYMU20286290 | //AGTCCCTCTCATTTCCAG// | SEQ ID NO: 5418 |
| TKIDN10000010 | //TGCCATAATTCTCCTTTT// | SEQ ID NO: 5419 |
| TRACH20005020 | //GCTTTTCTCCTTCCATGA// | SEQ ID NO: 5420 |
| TRACH20032720 | //CTACGCCCACTATATTCA// | SEQ ID NO: 5421 |
| TRACH20041830//(Reaction system A) | //AGATACTGAGAATGAGCCT// | SEQ ID NO: 5422 |
| //(Reaction system B) | //TTTCCATGCCTACCCTTT// | SEQ ID NO: 5423 |
| TRACH200G0150//(Reaction system A) | //AGTCTCCTGCTGGCTAAG// | SEQ ID NO: 5424 |
| //(Reaction system B) | //GTCCCTTCTGTCTCCTGA// | SEQ ID NO: 5425 |
| TRACH20076760 | //GTGGAAGTGCCTGATGAG// | SEQ ID NO: 5426 |
| TRACH20082780 | //CTTTCACCTGGGATGGAT// | SEQ ID NO: 5427 |
| TRACH20091230 | //AACATAGTCATTTCGTTCA// | SEQ ID NO: 5428 |
| TRACH20099340 | //GAGCACTGTAAGAGCCAT// | SEQ ID NO: 5429 |
| TRACH20109650 | //AAACATACCACGGAGAGA// | SEQ ID NO: 5430 |
| TRACH20115740 | //TATGAGCACACGAGGTCC// | SEQ ID NO: 5431 |
| TRACH20134950 | //AAGAGGGAACATCAGGCT// | SEQ ID NO: 5432 |
| TRACH20135520 | //TTCTTGGGCTTTATGTGG// | SEQ ID NO: 5433 |
| TRACH20153810//(Reaction system A) | //GCAGTGAGTCGTAGATGA// | SEQ ID NO: 5434 |
| //(Reaction system B) | //CTGCCTAGCCCTCTCACT// | SEQ ID NO: 5435 |
| TRACH20184490 | //ACTGTGAAGAGCCTGTTG// | SEQ ID NO: 5436 |
| TSTOM20001390 | //GGAATAGTAAGGACATAATGACA// | SEQ ID NO: 5437 |
| TSTOM20005690 | //GGAACCTTTTGTAACCCT// | SEQ ID NO: 5438 |
| UMVEN10001560 | //GCCACAACATCATTTTACTT// | SEQ ID NO: 5439 |
| UMVEN20003540 | //AAGTAAAAGACATCGGCA// | SEQ ID NO: 5440 |
| UTERU20004240 | //TACCTCCAGACTTTTGTG// | SEQ ID NO: 5441 |
| UTERU20046980 | //AGGATGGGAAGAAGGTTT// | SEQ ID NO: 5442 |
| UTERU20055930 | //GGATGAGTTGTGTGAAAA// | SEQ ID NO: 5443 |
| UTERU20068990 | //CCAAGGCTAAAGAGAGAG// | SEQ ID NO: 5444 |
| UTERU20070810 | //AAGTAGAGAATCCCAGCT// | SEQ ID NO: 5445 |
| UTERU20115740 | //TTTATGATTGAGGGGACC// | SEQ ID NO: 5446 |
| UTERU20119060 | //ACAGCATCCAATCAAAGA// | SEQ ID NO: 5447 |
| UTERU20124070 | //ACATCTGGTGGAAGCATC// | SEQ ID NO: 5448 |
| UTERU20126880 | //ACCTTAACCCCTCTTCCC// | SEQ ID NO: 5449 |
| UTERU20134910 | //AAGGAAGCCAACTCATGC// | SEQ ID NO: 5450 |
| UTERU20146680 | //ACCTTAACCCCTCTTCCC// | SEQ ID NO: 5451 |
| UTERU20176130 | //TAGAAAGGGGTGGTGAGA// | SEQ ID NO: 5452 |
| UTERU20185230 | //CGTTGAGAGCTTTTACAG// | SEQ ID NO: 5453 |
| UTERU20186740 | //CCACTTTGAGAGAACCCT// | SEQ ID NO: 5454 |

[0408] The result of expression frequency analysis is shown in Table 52. The clones not shown in the table contain clones whose expression levels could not be measured because the levels were too low or the sizes of the PCR products were different from the expected. It was confirmed that the expression levels of IL-8 genes used as positive control genes were elevated.

[0409] The result obtained by the search for the genes whose expression levels were altered depending on the presence of TNF-α in culturing THP-1 cell, which is a human monocyte cell line, showed that the clones whose expression levels were elevated by twofold or more one or three hours after the stimulation (the clones whose expression levels were 0.1 or lower both before and after the stimulation were excluded), were: ASTRO20152140, BRACE20057620, BRACE20060720, BRACE20090440, BRACE20152870, BRACE20229280, BRAMY20002770, BRAMY20266850, BRAMY20280720, BRAWH20106180, BRAWH20122770, BRHIP20096170, BRHIP20111200, BRHIP20186120, BRHIP20194940, BRHIP20207430, BRSSN20152380, CTONG20095270, CTONG20100240, CTONG20158150, CTONG20265130, D30ST20006540, D90ST20031370, FCBBF20071860, FCBBF30251420, FCBBF30252520, FCBBF40001420, FEBRA20017050, FEBRA20082100, HCHON20011160, KIDNE20141190, KIDNE20163880, KIDNE20182690, LIVER10004790, LIVER20038540, LIVER20085800, MESAN20130220, MESAN20174170, NT2NE20158600, NT2RI20005750, NT2RP70110860, NT2RP70169110, NT2RP70175670, NT2RP70188710, PERIC20002140, PLACE60155130, PROST20120160, PROST20149250, PROST20161950, PUAEN20015260, SKNSH20080430, SMINT20051610, SMINT20060780, SMINT20161220, SMINT20163960, SPLEN20101190, SPLEN20157300, SPLEN20163560, SPLEN20214580, SPLEN20279950, STOMA20048520, TESTI20076850, TESTI20087620, TESTI20108720, TESTI20220100, TESTI20239510, TESTI20266740, TESTI20342430, TESTI20370020, TESTI20391210, TESTI20401020, TESTI20415640, THYMU20130890, THYMU20286290, TRACH20060150, TRACH20099340, UTERU20004240, UTERU20068990, UTERU20119060.

[0410] On the other hand, in particular cases where the expression levels were relatively high in the unstimulated cells (the relative value was 1 or higher), the clones whose expression levels were decreased by twofold or more by the TNF-α (X stimulation (the clones whose expression levels were increased 1 or 3 hours after the stimulation were excluded) were ASTRO20032120, ASTRO20084250, ASTRO20181690, BRACE20062640, BRACE20067430, BRACE20235400, BRALZ20018340, BRALZ20069760, BRALZ20075450, BRAMY20163270, BRAMY20204450, BRAMY20218670, BRAMY20229800, BRAWH10000930, BRAWH20107540, BRAWH20132190, BRAWH20158530, BRCAN20273340, BRHIP20105710, BRHIP20186120, BRSSN20176820, CTONG20095290, DFNES20031920, FCBBF30033050, FCBBF30071520, FCBBF30083820, HCHON20008980, HCHON20022470, HHDPC20034390, KIDNE20028720, KIDNE20079440, KIDNE20127750, KIDNE20148900, LIVER20011130, MAMGL10000830, MESAN20127350, NT2NE20181650, NT2RI20023160, NT2RP70102350, NT2RP70157890, NTONG20029480, OCBBF20020830, OCBBF20041680, OCBBF20061720, OCBBF20127040, OCBBF20139260, OCBBF20178990, PEBLM20013120, PLACE60003480, PLACE60181070, PROST20151240, PUAEN20003740, PUAEN20011880, PUAEN20078980, PUAEN20085150, SKNSH20080430, SMINT20001760, SMINT20047810, SMINT20108530, SPLEN20158990, SPLEN20283650, STOMA20010250, STOMA20057820, TESTI20060400, TESTI20161970, TESTI20275620, TESTI20369690, TESTI20386230, TESTI20392250, TESTI20409440, TESTI20424730, THYMU20095960, THYMU20111180, THYMU20226600, THYMU20253250, THYMU20272490, TRACH20153810, UTERU20176130, UTERU20186740.

[0411] These clones were thus revealed to be involved in the inflammation reaction induced by TNF-α

[0412] The result obtained by the search for the genes whose expression levels were altered depending on co-culturing gastric cancer cell line MKN45 with cag PAI positive Helicobacter pylori (TN2), showed that the clones whose expression levels were elevated by twofold or more (the clones whose expression levels were 0.1 or lower both before and after the stimulation were excluded), were: ADRGL20067670, BLADE20004630, BRACE20039040, BRACE20151320, BRACE20229280, BRACE20235400, BRALZ20058880, BRAMY20060920, BRAMY20184670, BRAMY20218670, BRAMY20229800, BRCAN20147880, BRHIP20196410, BRHIP30004880, BRSSN20187310, CD34C30004940, CTONG20265130, DFNES20031920, FCBBF30278630, FCBBF40001420, HHDPC20095280, KIDNE20130450, LIVER20011130, LIVER20038540, NT2NE20172590, NT2RP70169110, OCBBF20085200, OCBBF20180840, PEBLM10000240, PLACE60003480, PROST20120160, PROST20151240, PUAEN20011880, SKMUS20031680, SKNSH20080430, SMINT20056210, SMINT20105000, SPLEN20019450, SPLEN20211570, STOMA20048520, TESTI20004890, TESTI20083940, TESTI20168480, TESTI20239510, TESTI20308600, TESTI20478010, UTERU20126880.

[0413] Of these clones, the expression levels of: ADRGL20067670, BLADE20004630, BRACE20151320, BRACE20229280, BRACE20235400, BRALZ20058880, BRAMY20218670, BRAMY20229800, BRHIP20196410, BRHIP30004880, CD34C30004940, DFNES20031920, FCBBF30278630, FCBBF40001420, HHDPC20095280, KIDNE20130450, LIVER20011130, LIVER20038540, NT2NE20172590, NT2RP70169110, PEBLM10000240, PROST20151240, PUAEN20011880, SKMUS20031680, SKNSH20080430, SMINT20056210, SMINT20105000, SPLEN20019450, SPLEN20211570, STOMA20048520, TESTI20168480, TESTI20308600, TESTI20478010, UTERU20126880

[0414] were not increased by the co-culture with the cage mutant (TN2ΔcagE). There may be the possibility that the expression levels of the 34 clones are altered via the NF-κB pathway. Among them, the expression levels of BRACE20229280, FCBBF40001420, LIVER20038540, NT2RP70169110, SKNSH20080430, STOMA20048520 were also increased when human monocyte cell line THP-1 was stimulated with TNF-α.

[0415] On the other hand, in particular cases where the expression levels were relatively high in the unstimulated cells (the relative value was 1 or higher), the clones whose expression levels were decreased by twofold or more in the presence of Helicobacter pylori were: ASTRO20032120, BRACE20090440, BRACE20114780, BRALZ20064740, BRAMY20002770, BRAMY20210400, BRAMY20215230, BRAMY20247280, BRAMY20267130, BRAWH20029630, BRAWH20100690, BRAWH20118230, BRCOC20105100, BRHIP20218580, BRSSN20046570, CTONG20138030, CTONG20146970, CTONG2-0158150, D30ST20037970, FCBBF30001840, FCBBF30033050, FEBRA20082100, HCHON20035130, HCHON20043590, HCHON20067220, NT2NE20174920, NT2RI20009870, NT2RI20023160, NT2RP70062230, NT2RP70130020, NTONG20070340, OCBBF20020150, OCBBF20094240, OCBBF20107920, PROST20144220, PROST20149160, PROST20153320, PUAEN20003740, PUAEN20025680, PUAEN20040670, SMINT20014580, SPLEN20101190, STOMA20076800, TESTI20087620, TESTI20098530, TESTI20123080, TESTI20161970, TESTI20234140, TESTI20288110, TESTI20357960, TESTI20391210, TESTI20424730, THYMU20158250, THYMU20226600, TRACH20005020, TRACH20134950, TRACH20184490, TSTOM20001390, UTERU20119060, UTERU20134910, UTERU20176130.

[0416] These clones are involved in gastritis or gastroduodenal ulcer.

TABLE 3

| CloneID | CD34C | D3OST | D6OST | D9OST |
|---|---|---|---|---|
| ASTRO20001410 | 0 | 17.731 | 0 | 20.479 |
| D3OST10001090 | 0 | 62.515 | 0 | 24.068 |
| D3OST20036070 | 0 | 46.404 | 0 | 53.596 |
| THYMU20039810 | 0 | 18.291 | 0 | 21.126 |
| KIDNE20028720 | 0 | 0 | 38.385 | 46.259 |
| BRAWH10000930 | 0 | 0 | 0 | 6.219 |
| BRHIP20005340 | 0 | 0 | 0 | 4.615 |
| CTONG20141650 | 0 | 0 | 0 | 64.925 |
| D9OST20000310 | 0 | 0 | 0 | 63.705 |
| D9OST20002780 | 0 | 0 | 0 | 100 |
| D9OST20023970 | 0 | 0 | 0 | 37.837 |
| D9OST20026730 | 0 | 0 | 0 | 19.695 |
| D9OST20031370 | 0 | 0 | 0 | 100 |
| D9OST20033970 | 0 | 0 | 0 | 38.536 |
| D9OST20035800 | 0 | 0 | 0 | 93.047 |
| D9OST20035940 | 0 | 0 | 0 | 100 |
| D9OST20040180 | 0 | 0 | 0 | 100 |
| FCBBF30018550 | 0 | 0 | 0 | 37.763 |
| FCBBF30233680 | 0 | 0 | 0 | 33.084 |
| KIDNE20102650 | 0 | 0 | 0 | 63.715 |
| NT2RI20023160 | 0 | 0 | 0 | 10.811 |
| PROST20107820 | 0 | 0 | 0 | 3.279 |
| SKNSH20089400 | 0 | 0 | 0 | 25.857 |
| SMINT20033400 | 0 | 0 | 0 | 39.619 |
| CTONG20108210 | 0 | 0 | 47.973 | 0 |
| D6OST20003580 | 0 | 0 | 95.4 | 0 |
| D6OST20005070 | 0 | 0 | 100 | 0 |
| ASTRO20155290 | 0 | 21.631 | 0 | 0 |
| D3OST10002670 | 0 | 50.415 | 0 | 0 |
| D3OST10002700 | 0 | 30.165 | 0 | 0 |
| D3OST20006180 | 0 | 100 | 0 | 0 |
| D3OST20006540 | 0 | 100 | 0 | 0 |
| D3OST20007340 | 0 | 93.334 | 0 | 0 |
| D3OST20013280 | 0 | 100 | 0 | 0 |
| D3OST20024170 | 0 | 100 | 0 | 0 |
| D3OST20024360 | 0 | 100 | 0 | 0 |
| D3OST20037970 | 0 | 100 | 0 | 0 |
| D3OST30002580 | 0 | 72.574 | 0 | 0 |
| D3OST30002910 | 0 | 93.334 | 0 | 0 |
| FCBBF10004120 | 0 | 22.594 | 0 | 0 |
| NT2RI20001330 | 0 | 29.915 | 0 | 0 |
| NTONG20009770 | 0 | 11.477 | 0 | 0 |
| SPLEN20084600 | 0 | 30.589 | 0 | 0 |
| SPLEN20140800 | 0 | 55.315 | 0 | 0 |
| THYMU20169680 | 0 | 86.295 | 0 | 0 |
| TRACH20141240 | 0 | 12.051 | 0 | 0 |
| CD34C30001250 | 97.628 | 0 | 0 | 0 |
| CD34C30003140 | 100 | 0 | 0 | 0 |
| CD34C30004240 | 96.167 | 0 | 0 | 0 |
| CD34C30004940 | 100 | 0 | 0 | 0 |
| DFNES10001850 | 55.393 | 0 | 0 | 0 |
| HHDPC20034390 | 21.364 | 0 | 0 | 0 |
| NT2RI20091730 | 46.845 | 0 | 0 | 0 |
| SKMUS20003610 | 44.913 | 0 | 0 | 0 |
| SPLEN20225220 | 59.537 | 0 | 0 | 0 |
| BRCOC20101230 | 46.01 | 0 | 0 | 14.772 |

[0417] TABLE 4

| CloneID | NT2RM | NT2RP | NT2RI | NT2NE |
|---|---|---|---|---|
| CTONG20027090 | 62.349 | 0 | 0 | 0 |
| CTONG20160560 | 57.22 | 0 | 0 | 0 |
| NT2RP70032610 | 39.095 | 3.274 | 0 | 0 |
| OCBBF20188730 | 39.876 | 0 | 0 | 0 |
| SPLEN20162680 | 12.432 | 0 | 2.355 | 6.263 |
| BRCOC20101230 | 0 | 2.64 | 3.981 | 3.97 |
| BRHIP20005340 | 0 | 0.825 | 1.244 | 1.24 |
| BRHIP20238880 | 0 | 2.66 | 7.355 | 2.667 |
| FCBBF30016320 | 0 | 7.441 | 2.805 | 5.595 |
| FEBRA20080810 | 0 | 6.827 | 5.147 | 2.566 |
| FEBRA20225040 | 0 | 3.958 | 2.985 | 5.952 |
| HCHON20008320 | 0 | 17.053 | 19.287 | 12.822 |
| HHDPC20034390 | 0 | 0.613 | 1.387 | 0.922 |
| HLUNG10000550 | 0 | 2.609 | 0.984 | 1.962 |
| NT2RI20028470 | 0 | 9.076 | 6.843 | 4.549 |
| NT2RI20054050 | 0 | 2.03 | 1.02 | 4.069 |
| NT2RI20091730 | 0 | 2.688 | 2.027 | 4.042 |
| NT2RP70078420 | 0 | 4.623 | 3.485 | 13.902 |
| PUAEN20003740 | 0 | 2.314 | 0.582 | 1.16 |
| THYMU20271250 | 0 | 0.431 | 0.651 | 1.297 |
| BRACE20003070 | 0 | 8.516 | 4.281 | 0 |
| BRACE20039040 | 0 | 6.248 | 4.711 | 0 |
| BRAWH20004600 | 0 | 1.471 | 5.545 | 0 |
| BRAWH20011710 | 0 | 8.931 | 2.245 | 0 |
| BRCOC20121720 | 0 | 13.559 | 5.112 | 0 |
| BRHIP20005530 | 0 | 12.387 | 9.34 | 0 |
| D3OST10002700 | 0 | 6.227 | 4.695 | 0 |
| HCHON20007380 | 0 | 7.176 | 5.411 | 0 |
| HEART20072310 | 0 | 11.675 | 17.605 | 0 |
| KIDNE20121880 | 0 | 21.519 | 16.225 | 0 |
| MESAN20121130 | 0 | 14.219 | 10.721 | 0 |
| NT2RI20022600 | 0 | 57.012 | 42.988 | 0 |
| NT2RI20023160 | 0 | 1.932 | 1.457 | 0 |
| NT2RI20086220 | 0 | 7.606 | 5.735 | 0 |
| NT2RI20216250 | 0 | 45.928 | 34.63 | 0 |
| NT2RP60000850 | 0 | 11.147 | 16.809 | 0 |
| NT2RP70036880 | 0 | 1.78 | 5.367 | 0 |
| NT2RP70043480 | 0 | 10.893 | 4.107 | 0 |
| NT2RP70062230 | 0 | 10.183 | 7.678 | 0 |
| NT2RP70081610 | 0 | 15.131 | 22.818 | 0 |
| NT2RP70102350 | 0 | 84.14 | 15.86 | 0 |
| NT2RP70130020 | 0 | 57.012 | 42.988 | 0 |
| NT2RP70190640 | 0 | 30.952 | 23.338 | 0 |
| OCBBF10001850 | 0 | 20.293 | 7.65 | 0 |
| OCBBF20097720 | 0 | 5.676 | 4.28 | 0 |
| OCBBF20173980 | 0 | 3.1 | 2.338 | 0 |
| PEBLM20044520 | 0 | 3.253 | 2.453 | 0 |
| SPLEN20173510 | 0 | 7.249 | 10.932 | 0 |
| TRACH20007020 | 0 | 9.462 | 7.134 | 0 |
| UTERU20065930 | 0 | 10.676 | 8.05 | 0 |
| HCHON20022470 | 0 | 6.766 | 0 | 10.174 |
| NT2NE20010490 | 0 | 21.179 | 0 | 31.847 |
| NT2NE20174800 | 0 | 39.941 | 0 | 60.059 |
| NT2NE20177520 | 0 | 28.292 | 0 | 42.542 |
| PROST20087700 | 0 | 1.88 | 0 | 14.135 |
| PROST20107820 | 0 | 0.586 | 0 | 2.644 |
| SMINT20028820 | 0 | 6.998 | 0 | 10.523 |
| TESTI20063830 | 0 | 9.768 | 0 | 14.689 |
| ASTRO20125520 | 0 | 0 | 2.686 | 5.357 |
| BRHIP30001110 | 0 | 0 | 1.86 | 3.71 |
| HCHON20002260 | 0 | 0 | 0.733 | 1.461 |
| HCHON20008150 | 0 | 0 | 5.075 | 20.242 |
| KIDNE20002520 | 0 | 0 | 1.553 | 6.195 |
| NT2NE20130190 | 0 | 0 | 33.397 | 66.603 |
| NT2NE20158600 | 0 | 0 | 33.397 | 66.603 |
| NT2RI20001330 | 0 | 0 | 4.656 | 9.286 |
| NT2RI20025400 | 0 | 0 | 3.141 | 6.265 |
| NT2RI20036670 | 0 | 0 | 33.397 | 66.603 |
| NT2RI20048840 | 0 | 0 | 1.404 | 5.6 |
| SKMUS20020840 | 0 | 0 | 11.346 | 22.628 |
| BRACE20057190 | 0 | 0 | 0 | 10.763 |
| BRACE20060550 | 0 | 0 | 0 | 14.499 |
| BRACE20267250 | 0 | 0 | 0 | 66.449 |
| BRAWH20107540 | 0 | 0 | 0 | 40.54 |
| BRAWH20118230 | 0 | 0 | 0 | 78.374 |
| CTONG20075860 | 0 | 0 | 0 | 21.782 |
| CTONG20095290 | 0 | 0 | 0 | 22.915 |
| FEBRA20086620 | 0 | 0 | 0 | 11.505 |
| FEBRA20144170 | 0 | 0 | 0 | 1.957 |
| FEBRA20196370 | 0 | 0 | 0 | 59.247 |
| HLUNG20023340 | 0 | 0 | 0 | 33.313 |
| NT2NE20003740 | 0 | 0 | 0 | 100 |
| NT2NE20010050 | 0 | 0 | 0 | 84.719 |
| NT2NE20010210 | 0 | 0 | 0 | 100 |
| NT2NE20010400 | 0 | 0 | 0 | 56.184 |
| NT2NE20015240 | 0 | 0 | 0 | 100 |
| NT2NE20021620 | 0 | 0 | 0 | 44.305 |
| NT2NE20043780 | 0 | 0 | 0 | 100 |
| NT2NE20053580 | 0 | 0 | 0 | 75.239 |
| NT2NE20068130 | 0 | 0 | 0 | 100 |
| NT2NE20072200 | 0 | 0 | 0 | 100 |
| NT2NE20074250 | 0 | 0 | 0 | 100 |
| NT2NE20080170 | 0 | 0 | 0 | 100 |
| NT2NE20089610 | 0 | 0 | 0 | 100 |
| NT2NE20089970 | 0 | 0 | 0 | 100 |
| NT2NE20108540 | 0 | 0 | 0 | 84.719 |
| NT2NE20110360 | 0 | 0 | 0 | 100 |
| NT2NE20118960 | 0 | 0 | 0 | 100 |
| NT2NE20122430 | 0 | 0 | 0 | 76.57 |
| NT2NE20124480 | 0 | 0 | 0 | 100 |
| NT2NE20125050 | 0 | 0 | 0 | 66.449 |
| NT2NE20131890 | 0 | 0 | 0 | 100 |
| NT2NE20132170 | 0 | 0 | 0 | 100 |
| NT2NE20142210 | 0 | 0 | 0 | 100 |
| NT2NE20146810 | 0 | 0 | 0 | 100 |
| NT2NE20152750 | 0 | 0 | 0 | 100 |
| NT2NE20155110 | 0 | 0 | 0 | 100 |
| NT2NE20156260 | 0 | 0 | 0 | 100 |
| NT2NE20157470 | 0 | 0 | 0 | 100 |
| NT2NE20159740 | 0 | 0 | 0 | 27.684 |
| NT2NE20172590 | 0 | 0 | 0 | 100 |
| NT2NE20174920 | 0 | 0 | 0 | 61.159 |
| NT2NE20181650 | 0 | 0 | 0 | 100 |
| NT2NE20183760 | 0 | 0 | 0 | 100 |
| NT2NE20184900 | 0 | 0 | 0 | 84.719 |
| NT2NE20187390 | 0 | 0 | 0 | 100 |
| OCBBF20108430 | 0 | 0 | 0 | 53.98 |
| RECTM20005100 | 0 | 0 | 0 | 10.923 |
| SMINT20001760 | 0 | 0 | 0 | 50.667 |
| SPLEN20169720 | 0 | 0 | 0 | 7.349 |
| TESTI20265250 | 0 | 0 | 0 | 15.768 |
| ASTRO10001650 | 0 | 0 | 8.055 | 0 |
| ASTRO20033160 | 0 | 0 | 10.721 | 0 |
| BRACE20011070 | 0 | 0 | 26.748 | 0 |
| BRACE20039440 | 0 | 0 | 0.941 | 0 |
| BRACE20151320 | 0 | 0 | 29.94 | 0 |
| BRAMY20104640 | 0 | 0 | 40.041 | 0 |
| BRAMY20137560 | 0 | 0 | 68.63 | 0 |
| BRAMY20167060 | 0 | 0 | 9.007 | 0 |
| BRAWH20028110 | 0 | 0 | 15.672 | 0 |
| BRCAN20280360 | 0 | 0 | 4.387 | 0 |
| BRCOC20004870 | 0 | 0 | 0.526 | 0 |
| BRHIP20207990 | 0 | 0 | 9.197 | 0 |
| BRHIP20217620 | 0 | 0 | 5.063 | 0 |
| BRHIP20249110 | 0 | 0 | 67.372 | 0 |
| BRSTN10000830 | 0 | 0 | 3.481 | 0 |
| CTONG10000940 | 0 | 0 | 1.415 | 0 |
| CTONG20004690 | 0 | 0 | 5.307 | 0 |
| CTONG20050280 | 0 | 0 | 12.439 | 0 |
| CTONG20105660 | 0 | 0 | 24.642 | 0 |
| CTONG20125640 | 0 | 0 | 7.18 | 0 |
| CTONG20133520 | 0 | 0 | 49.384 | 0 |
| CTONG20186320 | 0 | 0 | 29.069 | 0 |
| FCBBF10000770 | 0 | 0 | 1.472 | 0 |
| FCBBF10002800 | 0 | 0 | 10.265 | 0 |
| FCBBF10003770 | 0 | 0 | 19.652 | 0 |
| FCBBF30018550 | 0 | 0 | 5.089 | 0 |
| FCBBF30123470 | 0 | 0 | 3.989 | 0 |
| FCBBF30246230 | 0 | 0 | 5.091 | 0 |
| FEBRA20018280 | 0 | 0 | 9.887 | 0 |
| FEBRA20095140 | 0 | 0 | 6.019 | 0 |
| FEBRA20192420 | 0 | 0 | 58.974 | 0 |
| HCHON20064590 | 0 | 0 | 19.614 | 0 |
| HHDPC10000830 | 0 | 0 | 1.779 | 0 |
| HLUNG20016770 | 0 | 0 | 6.385 | 0 |
| HLUNG20033780 | 0 | 0 | 16.824 | 0 |
| IMR3220002430 | 0 | 0 | 3.118 | 0 |
| KIDNE20104300 | 0 | 0 | 17.33 | 0 |
| MESAN20004570 | 0 | 0 | 7.197 | 0 |
| MESAN20089360 | 0 | 0 | 14.459 | 0 |
| NOVAR10000910 | 0 | 0 | 3.519 | 0 |
| NT2RI20003480 | 0 | 0 | 32.207 | 0 |
| NT2RI20005750 | 0 | 0 | 100 | 0 |
| NT2RI20009870 | 0 | 0 | 100 | 0 |
| NT2RI20023590 | 0 | 0 | 29.911 | 0 |
| NT2RI20023910 | 0 | 0 | 11.79 | 0 |
| NT2RI20025640 | 0 | 0 | 100 | 0 |
| NT2RI20040930 | 0 | 0 | 100 | 0 |
| NT2RI20041880 | 0 | 0 | 10.436 | 0 |
| NT2RI20046080 | 0 | 0 | 6.723 | 0 |
| NT2RI20050960 | 0 | 0 | 73.545 | 0 |
| NT2RI20055790 | 0 | 0 | 17.054 | 0 |
| NT2RI20056700 | 0 | 0 | 100 | 0 |
| NT2RI20069730 | 0 | 0 | 100 | 0 |
| NT2RI20076290 | 0 | 0 | 14.653 | 0 |
| NT2RI20091940 | 0 | 0 | 5.358 | 0 |
| NT2RI20198260 | 0 | 0 | 100 | 0 |
| NT2RI20203900 | 0 | 0 | 100 | 0 |
| NT2RI20207030 | 0 | 0 | 100 | 0 |
| NT2RI20240080 | 0 | 0 | 61.866 | 0 |
| NT2RI20244600 | 0 | 0 | 100 | 0 |
| NT2RI20244960 | 0 | 0 | 100 | 0 |
| NT2RI20250750 | 0 | 0 | 30.809 | 0 |
| NT2RI20252550 | 0 | 0 | 62.102 | 0 |
| NT2RI20273230 | 0 | 0 | 60.375 | 0 |
| NTONG20067090 | 0 | 0 | 16.469 | 0 |
| OCBBF10001750 | 0 | 0 | 13.09 | 0 |
| OCBBF20047570 | 0 | 0 | 4.504 | 0 |
| OCBBF20054760 | 0 | 0 | 8.495 | 0 |
| OCBBF20059560 | 0 | 0 | 10.318 | 0 |
| OCBBF20073540 | 0 | 0 | 3.651 | 0 |
| OCBBF20125530 | 0 | 0 | 2.131 | 0 |
| OCBBF20126780 | 0 | 0 | 12.535 | 0 |
| OCBBF20127040 | 0 | 0 | 37.942 | 0 |
| OCBBF20140890 | 0 | 0 | 35.863 | 0 |
| SKMUS20003610 | 0 | 0 | 1.943 | 0 |
| SKNSH20008190 | 0 | 0 | 4.523 | 0 |
| SKNSH20080430 | 0 | 0 | 18.4 | 0 |
| SMINT20144800 | 0 | 0 | 2.887 | 0 |
| SPLEN20027440 | 0 | 0 | 4.053 | 0 |
| SPLEN20095550 | 0 | 0 | 15.436 | 0 |
| SPLEN20140800 | 0 | 0 | 8.61 | 0 |
| TESTI20094020 | 0 | 0 | 16.66 | 0 |
| TESTI20369690 | 0 | 0 | 6.529 | 0 |
| TESTI20391770 | 0 | 0 | 7.531 | 0 |
| TESTI20442760 | 0 | 0 | 17.235 | 0 |
| TRACH20084720 | 0 | 0 | 5.703 | 0 |
| TRACH20107710 | 0 | 0 | 61.866 | 0 |
| TRACH20118940 | 0 | 0 | 16.16 | 0 |
| UTERU20022940 | 0 | 0 | 9.896 | 0 |
| ASTRO20108190 | 0 | 1.622 | 0 | 0 |
| BGGI120006160 | 0 | 2.155 | 0 | 0 |
| BRAMY20136210 | 0 | 70.518 | 0 | 0 |
| BRAWH20016620 | 0 | 22.162 | 0 | 0 |
| BRAWH20164460 | 0 | 20.968 | 0 | 0 |
| BRCOC20144000 | 0 | 40.488 | 0 | 0 |
| BRHIP20132860 | 0 | 82.532 | 0 | 0 |
| BRSSN20146100 | 0 | 17.209 | 0 | 0 |
| CTONG10000100 | 0 | 15.625 | 0 | 0 |
| CTONG20103480 | 0 | 4.268 | 0 | 0 |
| CTONG20108210 | 0 | 1.722 | 0 | 0 |
| CTONG20139070 | 0 | 10.392 | 0 | 0 |
| FCBBF10000240 | 0 | 10.583 | 0 | 0 |
| FCBBF10000630 | 0 | 14.415 | 0 | 0 |
| FCBBF20067810 | 0 | 30.502 | 0 | 0 |
| FCBBF30010810 | 0 | 6.328 | 0 | 0 |
| FCBBF30012810 | 0 | 49.073 | 0 | 0 |
| FCBBF30013770 | 0 | 24.817 | 0 | 0 |
| FCBBF30039020 | 0 | 56.608 | 0 | 0 |
| FCBBF40001420 | 0 | 8.811 | 0 | 0 |
| FEBRA10001880 | 0 | 5.044 | 0 | 0 |
| FEBRA20082010 | 0 | 17.339 | 0 | 0 |
| HHDPC20001040 | 0 | 4.459 | 0 | 0 |
| KIDNE20021910 | 0 | 34.358 | 0 | 0 |
| NT2RP60000770 | 0 | 15.492 | 0 | 0 |
| NT2RP70010740 | 0 | 100 | 0 | 0 |
| NT2RP70027380 | 0 | 27.748 | 0 | 0 |
| NT2RP70037240 | 0 | 22.256 | 0 | 0 |
| NT2RP70044280 | 0 | 16.256 | 0 | 0 |
| NT2RP70045590 | 0 | 20.543 | 0 | 0 |
| NT2RP70056750 | 0 | 7.009 | 0 | 0 |
| NT2RP70063950 | 0 | 82.532 | 0 | 0 |
| NT2RP70072690 | 0 | 56.608 | 0 | 0 |
| NT2RP70077660 | 0 | 74.295 | 0 | 0 |
| NT2RP70085440 | 0 | 100 | 0 | 0 |
| NT2RP70105210 | 0 | 100 | 0 | 0 |
| NT2RP70110860 | 0 | 100 | 0 | 0 |
| NT2RP70111320 | 0 | 100 | 0 | 0 |
| NT2RP70122910 | 0 | 100 | 0 | 0 |
| NT2RP70125160 | 0 | 100 | 0 | 0 |
| NT2RP70133740 | 0 | 100 | 0 | 0 |
| NT2RP70134990 | 0 | 100 | 0 | 0 |
| NT2RP70137290 | 0 | 100 | 0 | 0 |
| NT2RP70137640 | 0 | 54.725 | 0 | 0 |
| NT2RP70143480 | 0 | 100 | 0 | 0 |
| NT2RP70147210 | 0 | 100 | 0 | 0 |
| NT2RP70150800 | 0 | 100 | 0 | 0 |
| NT2RP70157890 | 0 | 100 | 0 | 0 |
| NT2RP70159960 | 0 | 100 | 0 | 0 |
| NT2RP70169110 | 0 | 100 | 0 | 0 |
| NT2RP70175670 | 0 | 100 | 0 | 0 |
| NT2RP70179710 | 0 | 100 | 0 | 0 |
| NT2RP70181970 | 0 | 100 | 0 | 0 |
| NT2RP70188020 | 0 | 100 | 0 | 0 |
| NT2RP70188710 | 0 | 100 | 0 | 0 |
| NT2RP70192730 | 0 | 100 | 0 | 0 |
| NT2RP70194450 | 0 | 100 | 0 | 0 |
| NT2RP70195430 | 0 | 50.987 | 0 | 0 |
| NT2RP70198350 | 0 | 2.512 | 0 | 0 |
| NT2RP70203790 | 0 | 100 | 0 | 0 |
| OCBBF20039250 | 0 | 4.016 | 0 | 0 |
| OCBBF20080410 | 0 | 5.038 | 0 | 0 |
| OCBBF20108190 | 0 | 30.231 | 0 | 0 |
| OCBBF20108580 | 0 | 16.054 | 0 | 0 |
| OCBBF20122620 | 0 | 34.956 | 0 | 0 |
| OCBBF20130110 | 0 | 18.197 | 0 | 0 |
| OCBBF20151150 | 0 | 43.004 | 0 | 0 |
| OCBBF20189560 | 0 | 4.079 | 0 | 0 |
| PROST10003220 | 0 | 57.613 | 0 | 0 |
| TESTI20001720 | 0 | 20.618 | 0 | 0 |
| TESTI20121550 | 0 | 15.444 | 0 | 0 |
| TESTI20152460 | 0 | 28.533 | 0 | 0 |
| TESTI20211240 | 0 | 13.774 | 0 | 0 |
| TESTI20234140 | 0 | 39.241 | 0 | 0 |
| UMVEN20003540 | 0 | 1.985 | 0 | 0 |
| UTERU20006960 | 0 | 6.858 | 0 | 0 |
| UTERU20094350 | 0 | 12.888 | 0 | 0 |
| UTERU20164260 | 0 | 30.63 | 0 | 0 |

[0418] TABLE 5

| CloneID | BEAST | TBAES |
|---|---|---|
| BRACE20039040 | 0 | 18.237 |
| BRAMY20163250 | 0 | 26.506 |
| BRCOC20031250 | 0 | 39.975 |
| BRHIP20005340 | 0 | 2.408 |
| BRHIP20217620 | 0 | 19.598 |
| BRHIP30001110 | 0 | 7.202 |
| FCBBF10000770 | 0 | 5.697 |
| FCBBF30010810 | 0 | 18.471 |
| FEBRA20080810 | 0 | 9.963 |
| FEBRA20144170 | 0 | 3.798 |
| FEBRA20196630 | 0 | 61.269 |
| FEBRA20197110 | 0 | 14.875 |
| HCHON20002260 | 0 | 11.347 |
| HCHON20040020 | 0 | 5.523 |
| HHDPC20034390 | 0 | 1.789 |
| HLUNG10000550 | 0 | 3.808 |
| NOVAR10000910 | 0 | 27.245 |
| NT2RI20023160 | 0 | 11.28 |
| NT2RI20054050 | 0 | 1.975 |
| NT2RI20091730 | 0 | 7.846 |
| OCBBF20188730 | 0 | 9.748 |
| SMINT20144800 | 0 | 22.352 |
| SPLEN20128000 | 0 | 2.403 |
| SPLEN20171210 | 0 | 54.539 |
| SPLEN20264110 | 0 | 80.173 |
| TBAES20000590 | 0 | 84.801 |
| TBAES20002550 | 0 | 100 |
| TBAES20003150 | 0 | 100 |
| TESTI20334410 | 0 | 15.439 |
| TESTI20432750 | 0 | 62.244 |
| TRACH20003590 | 0 | 20.978 |
| TRACH20084720 | 0 | 11.037 |
| UTERU20046640 | 0 | 11.937 |
| BEAST20004540 | 100 | 0 |
| SPLEN20008740 | 10.632 | 0 |

[0419] TABLE 6

| CloneID | CERVX | TCERX |
|---|---|---|
| BGGI120006160 | 0 | 18.869 |
| BRAMY20063970 | 0 | 59.264 |
| BRHIP20218580 | 0 | 70.621 |
| FEBRA20002100 | 0 | 14.918 |
| SPLEN20162680 | 0 | 9.118 |
| TESTI20214250 | 0 | 36.333 |
| CTONG20105080 | 84.727 | 0 |
| HCHON20015980 | 50.212 | 0 |
| PROST20175290 | 52.453 | 0 |
| TESTI20254220 | 51.293 | 0 |
| THYMU20279750 | 82.6 | 0 |

[0420] TABLE 7

| CloneID | COLON | TCOLN |
|---|---|---|
| ASTRO20001410 | 0 | 32.199 |
| BRAWH20162690 | 0 | 27.951 |
| CTONG20132220 | 0 | 79.674 |
| HCHON20002260 | 0 | 17.098 |
| NT2RI20001330 | 0 | 54.324 |
| TCOLN20001390 | 0 | 100 |
| 3NB6910001910 | 42.978 | 0 |
| BRAMY20120910 | 41.689 | 0 |
| BRAWH20004600 | 4.285 | 0 |
| BRCOC20031250 | 39.895 | 0 |
| BRCOC20031870 | 11.042 | 0 |
| COLON10001350 | 100 | 0 |
| COLON20043180 | 100 | 0 |
| COLON20093370 | 100 | 0 |
| FEBRA20002100 | 4.963 | 0 |
| FEBRA20082010 | 16.836 | 0 |
| FEBRA20197110 | 29.691 | 0 |
| KIDNE20007770 | 53.588 | 0 |
| KIDNE20013730 | 50.02 | 0 |
| NT2RP70045590 | 59.84 | 0 |
| OCBBF20078920 | 29.908 | 0 |
| PROST20083600 | 12.636 | 0 |
| SPLEN20011410 | 6.63 | 0 |
| TRACH20084720 | 11.015 | 0 |
| THYMU20271250 | 1.257 | 15.18 |

[0421] TABLE 8

| CloneID | NESOP | TESOP |
|---|---|---|
| ASTRO20033160 | 0 | 20.183 |
| ASTRO20125520 | 0 | 10.113 |
| BRAMY20266850 | 0 | 16.957 |
| BRAWH20164460 | 0 | 59.524 |
| BRHIP20005340 | 0 | 9.367 |
| BRHIP20191490 | 0 | 75.561 |
| CTONG20095290 | 0 | 43.261 |
| CTONG20143690 | 0 | 28.473 |
| CTONG20161850 | 0 | 17.787 |
| DFNES20001530 | 0 | 21.906 |
| DFNES20071130 | 0 | 45.721 |
| FCBBF30123470 | 0 | 15.017 |
| FCBBF30175310 | 0 | 10.97 |
| FEBRA20095140 | 0 | 45.326 |
| HCHON20016650 | 0 | 10.558 |
| MESAN20025190 | 0 | 31.731 |
| NT2RI20028470 | 0 | 8.588 |
| NT2RI20054050 | 0 | 1.921 |
| NT2RP70036880 | 0 | 5.052 |
| NTONG20009770 | 0 | 6.726 |
| NTONG20064840 | 0 | 29.574 |
| NTONG20076930 | 0 | 48.142 |
| SMINT20042990 | 0 | 61.748 |
| SPLEN20008820 | 0 | 12.019 |
| SPLEN20128000 | 0 | 2.337 |
| SPLEN20149110 | 0 | 7.218 |
| STOMA20013890 | 0 | 39.515 |
| TESOP20000900 | 0 | 100 |
| TESOP20003120 | 0 | 66.097 |
| TESOP20004000 | 0 | 100 |
| TESOP20005270 | 0 | 70.604 |
| TESOP20005690 | 0 | 100 |
| TESTI20334410 | 0 | 7.508 |
| THYMU20271250 | 0 | 2.449 |
| TRACH20141240 | 0 | 7.062 |
| UTERU20022940 | 0 | 12.42 |
| NESOP10001080 | 100 | 0 |
| NT2RI20023160 | 17.058 | 0 |
| NTONG20013620 | 74.273 | 0 |
| TRACH20077540 | 31.967 | 0 |
| NTONG20015870 | 69.673 | 12.221 |

[0422] TABLE 9

| CloneID | KIDNE | TKIDN |
|---|---|---|
| ASTRO20008010 | 0 | 3.776 |
| ASTRO20181690 | 0 | 3.496 |
| BRACE20111830 | 0 | 23.795 |
| BRACE20152870 | 0 | 8.501 |
| BRACE20237270 | 0 | 73.082 |
| BRAMY20147540 | 0 | 5.185 |
| BRAMY20286820 | 0 | 78.604 |
| BRAWH20015350 | 0 | 12.794 |
| BRAWH20096780 | 0 | 78.731 |
| BRAWH20132190 | 0 | 35.86 |
| BRAWH20182060 | 0 | 40.908 |
| BRCAN20060190 | 0 | 13.906 |
| BRCOC20004870 | 0 | 1.072 |
| BRCOC20176520 | 0 | 51.098 |
| BRHIP20000870 | 0 | 24.363 |
| BRHIP20198190 | 0 | 32.096 |
| BRHIP20233090 | 0 | 43.183 |
| BRHIP30001110 | 0 | 3.79 |
| BRSSN20015790 | 0 | 49.863 |
| BRSTN20000580 | 0 | 8.929 |
| CTONG10000940 | 0 | 1.442 |
| CTONG20098440 | 0 | 66.526 |
| CTONG20150910 | 0 | 6.012 |
| CTONG20165050 | 0 | 66.526 |
| DFNES20014040 | 0 | 38.579 |
| DFNES20037420 | 0 | 38.579 |
| FCBBF10000770 | 0 | 2.998 |
| FCBBF30083820 | 0 | 39.87 |
| FCBBF30247930 | 0 | 59.143 |
| FEBRA20037500 | 0 | 6.758 |
| FEBRA20072120 | 0 | 14.531 |
| FEBRA20080810 | 0 | 2.621 |
| FEBRA20086620 | 0 | 17.626 |
| FEBRA20140100 | 0 | 59.757 |
| FEBRA20144170 | 0 | 1.999 |
| FEBRA20176800 | 0 | 35.198 |
| HCHON20008320 | 0 | 13.096 |
| HCHON20059870 | 0 | 36.909 |
| HLUNG10000550 | 0 | 2.004 |
| MESAN20106640 | 0 | 32.125 |
| NT2RI20025400 | 0 | 6.399 |
| NT2RI20076290 | 0 | 7.462 |
| NT2RI20091940 | 0 | 3.638 |
| OCBBF20019830 | 0 | 26.741 |
| OCBBF20022900 | 0 | 37.332 |
| OCBBF20039250 | 0 | 3.084 |
| OCBBF20080050 | 0 | 11.755 |
| OCBBF20097720 | 0 | 8.718 |
| OCBBF20125530 | 0 | 4.341 |
| OCBBF20130110 | 0 | 27.949 |
| OCBBF20140640 | 0 | 5.056 |
| OCBBF20173980 | 0 | 9.523 |
| PANCR10000910 | 0 | 1.114 |
| PROST20087700 | 0 | 2.887 |
| PUAEN20044000 | 0 | 26.668 |
| SPLEN20144520 | 0 | 68.029 |
| SPLEN20160980 | 0 | 68.029 |
| TKIDN10000010 | 0 | 41.198 |
| TKIDN20004640 | 0 | 68.029 |
| TKIDN20005210 | 0 | 55.069 |
| TKIDN20030590 | 0 | 78.393 |
| TKIDN20030620 | 0 | 100 |
| TKIDN20047480 | 0 | 35.796 |
| TRACH20003590 | 0 | 11.039 |
| TRACH20028030 | 0 | 7.714 |
| TRACH20183170 | 0 | 10.844 |
| TRACH20184490 | 0 | 56.123 |
| UMVEN20003540 | 0 | 3.049 |
| UTERU20004240 | 0 | 3.144 |
| UTERU20055930 | 0 | 12.464 |
| ASTRO10001650 | 7.727 | 0 |
| ASTRO20108190 | 2.346 | 0 |
| BGGI120006160 | 3.117 | 0 |
| BRACE20039040 | 9.038 | 0 |
| BRAMY20102080 | 63.37 | 0 |
| BRAWH20004600 | 2.128 | 0 |
| BRAWH20125380 | 35.37 | 0 |
| BRAWH20162690 | 4.596 | 0 |
| BRHIP20115760 | 66.835 | 0 |
| BRHIP20205090 | 65.282 | 0 |
| CTONG20052650 | 65.178 | 0 |
| CTONG20108210 | 2.491 | 0 |
| CTONG20128470 | 6.004 | 0 |
| CTONG20133480 | 19.179 | 0 |
| CTONG20139070 | 7.516 | 0 |
| D9OST20000310 | 16.47 | 0 |
| DFNES20001530 | 11.162 | 0 |
| FCBBF10001820 | 59.128 | 0 |
| FEBRA20002100 | 4.929 | 0 |
| HCHON20008980 | 35.524 | 0 |
| HCHON20016650 | 5.38 | 0 |
| HLUNG20033780 | 32.277 | 0 |
| KIDNE20002520 | 2.979 | 0 |
| KIDNE20003940 | 100 | 0 |
| KIDNE20006780 | 100 | 0 |
| KIDNE20007210 | 73.728 | 0 |
| KIDNE20007770 | 19.958 | 0 |
| KIDNE20008010 | 100 | 0 |
| KIDNE20009470 | 8.811 | 0 |
| KIDNE20011170 | 77.71 | 0 |
| KIDNE20011400 | 100 | 0 |
| KIDNE20013730 | 24.839 | 0 |
| KIDNE20017130 | 54.019 | 0 |
| KIDNE20018730 | 100 | 0 |
| KIDNE20018970 | 100 | 0 |
| KIDNE20020150 | 100 | 0 |
| KIDNE20021680 | 100 | 0 |
| KIDNE20021910 | 24.85 | 0 |
| KIDNE20021980 | 100 | 0 |
| KIDNE20022620 | 100 | 0 |
| KIDNE20024830 | 100 | 0 |
| KIDNE20027250 | 35.87 | 0 |
| KIDNE20027950 | 100 | 0 |
| KIDNE20028390 | 25.593 | 0 |
| KIDNE20028720 | 1.993 | 0 |
| KIDNE20028830 | 7.907 | 0 |
| KIDNE20029800 | 10.988 | 0 |
| KIDNE20067330 | 100 | 0 |
| KIDNE20079440 | 35.045 | 0 |
| KIDNE20096280 | 100 | 0 |
| KIDNE20096470 | 100 | 0 |
| KIDNE20100070 | 100 | 0 |
| KIDNE20100840 | 100 | 0 |
| KIDNE20101370 | 100 | 0 |
| KIDNE20101510 | 100 | 0 |
| KIDNE20102650 | 8.237 | 0 |
| KIDNE20102710 | 100 | 0 |
| KIDNE20104300 | 33.246 | 0 |
| KIDNE20106740 | 100 | 0 |
| KIDNE20107390 | 100 | 0 |
| KIDNE20107500 | 74.264 | 0 |
| KIDNE20107620 | 100 | 0 |
| KIDNE20109730 | 100 | 0 |
| KIDNE20109890 | 100 | 0 |
| KIDNE20112000 | 100 | 0 |
| KIDNE20115080 | 65.178 | 0 |
| KIDNE20118580 | 100 | 0 |
| KIDNE20120090 | 33.186 | 0 |
| KIDNE20121880 | 62.256 | 0 |
| KIDNE20122910 | 83.085 | 0 |
| KIDNE20124400 | 6.171 | 0 |
| KIDNE20125630 | 100 | 0 |
| KIDNE20126010 | 100 | 0 |
| KIDNE20126130 | 100 | 0 |
| KIDNE20127100 | 33.012 | 0 |
| KIDNE20127450 | 100 | 0 |
| KIDNE20127750 | 100 | 0 |
| KIDNE20130450 | 100 | 0 |
| KIDNE20131580 | 63.24 | 0 |
| KIDNE20132180 | 100 | 0 |
| KIDNE20137340 | 100 | 0 |
| KIDNE20138010 | 100 | 0 |
| KIDNE20141190 | 49.697 | 0 |
| KIDNE20144890 | 100 | 0 |
| KIDNE20148900 | 100 | 0 |
| KIDNE20163880 | 100 | 0 |
| KIDNE20180710 | 49.105 | 0 |
| KIDNE20181660 | 100 | 0 |
| KIDNE20182690 | 100 | 0 |
| KIDNE20186780 | 100 | 0 |
| KIDNE20190740 | 100 | 0 |
| LIVER20035110 | 28.683 | 0 |
| MESAN20025190 | 16.169 | 0 |
| NT2RP70043480 | 7.879 | 0 |
| PROST20107820 | 1.696 | 0 |
| PROST20123530 | 32.771 | 0 |
| PROST20161950 | 20.387 | 0 |
| PUAEN20030180 | 46.744 | 0 |
| SKMUS20003610 | 3.728 | 0 |
| SMINT20033400 | 10.243 | 0 |
| TBAES20000590 | 5.253 | 0 |
| TESTI20044310 | 29.162 | 0 |
| TESTI20082330 | 45.847 | 0 |
| TRACH20032720 | 12.917 | 0 |
| UTERU20099720 | 12.351 | 0 |

[0423] TABLE 10

| CloneID | LIVER | TLIVE |
|---|---|---|
| BRAWH20166790 | 83.525 | 0 |
| CTONG20103480 | 15.35 | 0 |
| HEART20005410 | 11.598 | 0 |
| LIVER10001260 | 66.455 | 0 |
| LIVER10004790 | 100 | 0 |
| LIVER20002160 | 100 | 0 |
| LIVER20011130 | 92.988 | 0 |
| LIVER20011910 | 100 | 0 |
| LIVER20028420 | 16.548 | 0 |
| LIVER20035110 | 71.317 | 0 |
| LIVER20035680 | 100 | 0 |
| LIVER20038540 | 100 | 0 |
| LIVER20045650 | 100 | 0 |
| LIVER20055200 | 100 | 0 |
| LIVER20055440 | 100 | 0 |
| LIVER20059810 | 24.82 | 0 |
| LIVER20062510 | 100 | 0 |
| LIVER20064100 | 88.658 | 0 |
| LIVER20064690 | 100 | 0 |
| LIVER20075680 | 100 | 0 |
| LIVER20080530 | 100 | 0 |
| LIVER20084730 | 100 | 0 |
| LIVER20085800 | 100 | 0 |
| LIVER20087510 | 75.266 | 0 |
| LIVER20091180 | 100 | 0 |
| NTONG20063010 | 47.641 | 0 |
| PROST20087700 | 6.762 | 0 |
| PROST20107820 | 2.108 | 0 |
| TRACH20005400 | 12.349 | 0 |
| ASTRO20001410 | 0 | 10.441 |
| ASTRO20125520 | 0 | 10.162 |
| BRACE20152870 | 0 | 15.788 |
| BRAMY20167060 | 0 | 34.076 |
| BRAMY20181220 | 0 | 87.217 |
| BRAMY20285160 | 0 | 81.346 |
| BRCOC20001860 | 0 | 20.45 |
| FEBRA20144170 | 0 | 3.712 |
| HLUNG10000550 | 0 | 3.721 |
| OCBBF20073540 | 0 | 6.907 |
| OCBBF20088220 | 0 | 16.388 |
| PLACE60169420 | 0 | 26.895 |
| SMINT20152940 | 0 | 54.735 |
| SPLEN20242320 | 0 | 45.601 |
| THYMU20000570 | 0 | 18.649 |
| TRACH20077540 | 0 | 30.987 |
| UTERU20055930 | 0 | 15.433 |
| UTERU20065930 | 0 | 10.151 |

[0424] TABLE 11

| CloneID | HLUNG | TLUNG |
|---|---|---|
| BRACE20096200 | 70.38 | 0 |
| BRAWH20004600 | 2.238 | 0 |
| BRAWH20030250 | 11.121 | 0 |
| BRCAN20006390 | 61.519 | 0 |
| BRCAN20280360 | 8.855 | 0 |
| BRHIP20238880 | 1.35 | 0 |
| CTONG10000940 | 1.428 | 0 |
| CTONG20103480 | 6.495 | 0 |
| CTONG20129960 | 10.709 | 0 |
| CTONG20155180 | 48.707 | 0 |
| FCBBF10001210 | 36.439 | 0 |
| FEBRA20144170 | 1.98 | 0 |
| FEBRA20197110 | 7.756 | 0 |
| HCHON20002260 | 2.958 | 0 |
| HHDPC20034390 | 0.933 | 0 |
| HLUNG10000550 | 3.971 | 0 |
| HLUNG20016330 | 29.367 | o |
| HLUNG20016770 | 12.888 | 0 |
| HLUNG20017120 | 12.093 | 0 |
| HLUNG20023340 | 33.714 | 0 |
| HLUNG20033780 | 33.957 | 0 |
| HLUNG20084390 | 100 | 0 |
| IMR3220002430 | 3.147 | 0 |
| LIVER20028420 | 14.004 | 0 |
| NOVAR20000380 | 2.278 | 0 |
| NT2RI20023910 | 8.923 | 0 |
| NT2RI20054050 | 2.059 | 0 |
| NT2RI20091730 | 4.091 | 0 |
| NT2RP70044280 | 12.369 | 0 |
| OCBBF20020830 | 40.304 | 0 |
| OCBBF20125530 | 4.302 | 0 |
| PLACE60004630 | 28.618 | 0 |
| PROST20057930 | 14.383 | 0 |
| PROST20107820 | 0.892 | 0 |
| PROST20185830 | 33.898 | 0 |
| PUAEN20030180 | 12.294 | 0 |
| SMINT20121220 | 12.822 | 0 |
| SPLEN20002220 | 44.799 | 0 |
| SPLEN20008740 | 1.788 | 0 |
| SPLEN20054290 | 26.875 | 0 |
| SPLEN20128000 | 1.253 | 0 |
| SPLEN20157300 | 51.319 | 0 |
| SPLEN20176200 | 18.8 | 0 |
| SPLEN20179180 | 3.344 | 0 |
| SPLEN20211940 | 12.373 | 0 |
| STOMA20013890 | 21.183 | 0 |
| TBAES20000590 | 5.527 | 0 |
| TESTI20094230 | 59.311 | 0 |
| TESTI20184620 | 10.365 | 0 |
| TESTI20334410 | 8.049 | 0 |
| THYMU20000570 | 4.974 | 0 |
| THYMU20039810 | 1.915 | 0 |
| TRACH20007020 | 14.4 | 0 |
| TRACH20141240 | 3.786 | 0 |
| TRACH20183170 | 10.745 | 0 |
| ASTRO20108190 | 0 | 13.924 |
| ASTRO20155290 | 0 | 38.341 |
| BRHIP20096850 | 0 | 73.716 |
| FEBRA20080810 | 0 | 14.654 |
| MESAN20014500 | 0 | 59.68 |
| SMINT20028820 | 0 | 60.089 |
| SPLEN20162680 | 0 | 8.941 |

[0425] TABLE 12

| CloneID | NOVAR | TOVAR |
|---|---|---|
| BGGI120006160 | 21.31 | 0 |
| BRHIP20005340 | 8.158 | 0 |
| BRHIP20191860 | 47.038 | 0 |
| HHDPC20001040 | 44.094 | 0 |
| NOVAR10000150 | 72.374 | 0 |
| NOVAR10000910 | 46.155 | 0 |
| NOVAR10001020 | 99.094 | 0 |
| NOVAR20000380 | 14.805 | 0 |
| NOVAR20003520 | 100 | 0 |
| THYMU20271250 | 4.266 | 0 |
| ASTRO20141350 | 0 | 75.66 |
| BRAMY20157820 | 0 | 85.296 |
| BRCOC20001860 | 0 | 64.79 |
| HLUNG20016770 | 0 | 76.536 |
| NT2RI20054050 | 0 | 12.229 |
| NTONG20090600 | 0 | 60.694 |
| PROST20087700 | 0 | 16.991 |
| PUAEN20015860 | 0 | 62.197 |
| SPLEN20029310 | 0 | 88.828 |
| TOVAR20004760 | 0 | 49.428 |
| TOVAR20005750 | 0 | 96.313 |
| TRACH20079690 | 0 | 55.276 |
| UTERU20004240 | 0 | 18.499 |

[0426] TABLE 13

| CloneID | STOMA | TSTOM |
|---|---|---|
| BRACE20060840 | 0 | 65.917 |
| FEBRA20052910 | 0 | 77.883 |
| HCHON20002260 | 0 | 8.66 |
| HLUNG10000550 | 0 | 11.625 |
| NTONG20009770 | 0 | 21.112 |
| PROST20107820 | 0 | 5.223 |
| THYMU20039810 | 0 | 11.216 |
| TSTOM10001860 | 0 | 100 |
| TSTOM20001390 | 0 | 89.823 |
| TSTOM20003150 | 0 | 48.943 |
| TSTOM20005690 | 0 | 100 |
| ASTRO20125520 | 10.059 | 0 |
| BRACE20039040 | 17.642 | 0 |
| BRAMY20124260 | 42.064 | 0 |
| BRCOC20031870 | 10.704 | 0 |
| BRHIP20191860 | 13.43 | 0 |
| CTONG20128470 | 11.719 | 0 |
| FEBRA20037500 | 12.423 | 0 |
| HCHON20040020 | 5.343 | 0 |
| HHDPC10000830 | 6.661 | 0 |
| IMR3220002430 | 5.838 | 0 |
| KIDNE20007770 | 12.986 | 0 |
| NOVAR20000380 | 4.227 | 0 |
| NT2RI20054050 | 1.91 | 0 |
| NT2RI20091730 | 7.59 | 0 |
| PROST20130530 | 20.156 | 0 |
| SPLEN20149110 | 7.179 | 0 |
| SPLEN20157880 | 32.942 | 0 |
| STOMA20001830 | 100 | 0 |
| STOMA20005390 | 100 | 0 |
| STOMA20005670 | 100 | 0 |
| STOMA20006400 | 100 | 0 |
| STOMA20006780 | 100 | 0 |
| STOMA20006860 | 100 | 0 |
| STOMA20008880 | 100 | 0 |
| STOMA20010250 | 100 | 0 |
| STOMA20013890 | 39.303 | 0 |
| STOMA20026880 | 100 | 0 |
| STOMA20032890 | 100 | 0 |
| STOMA20034770 | 100 | 0 |
| STOMA20036460 | 100 | 0 |
| STOMA20046680 | 100 | 0 |
| STOMA20048520 | 100 | 0 |
| STOMA20048840 | 100 | 0 |
| STOMA20051200 | 85.988 | 0 |
| STOMA20056640 | 100 | 0 |
| STOMA20056670 | 100 | 0 |
| STOMA20057820 | 91.236 | 0 |
| STOMA20062130 | 100 | 0 |
| STOMA20062290 | 40.913 | 0 |
| STOMA20063250 | 100 | 0 |
| STOMA20063980 | 100 | 0 |
| STOMA20064470 | 100 | 0 |
| STOMA20067800 | 59.113 | 0 |
| STOMA20069040 | 100 | 0 |
| STOMA20072690 | 100 | 0 |
| STOMA20076800 | 100 | 0 |
| STOMA20077450 | 100 | 0 |
| STOMA20080500 | 100 | 0 |
| STOMA20083610 | 100 | 0 |
| STOMA20086140 | 100 | 0 |
| STOMA20088380 | 100 | 0 |
| STOMA20092530 | 100 | 0 |
| STOMA20092560 | 100 | 0 |
| STOMA20092890 | 39.042 | 0 |
| TESTI20184620 | 19.231 | 0 |
| TRACH20003590 | 40.588 | 0 |
| TRACH20183170 | 19.936 | 0 |
| PROST20083600 | 12.248 | 38.653 |
| TRACH20068660 | 6.753 | 21.311 |

[0427] TABLE 14

| CloneID | UTERU | TUTER |
|---|---|---|
| DFNES10001850 | 0 | 29.393 |
| NT2RI20023910 | 0 | 18.073 |
| SMINT20144800 | 0 | 35.406 |
| SPLEN20162680 | 0 | 9.628 |
| TOVAR20004760 | 0 | 50.572 |
| TUTER20002830 | 0 | 100 |
| ASTRO20008010 | 1.217 | 0 |
| ASTRO20033160 | 10.555 | 0 |
| ASTRO20058630 | 4.534 | 0 |
| ASTRO20105820 | 20.644 | 0 |
| ASTRO20108190 | 3.21 | 0 |
| BRACE20039040 | 3.092 | 0 |
| BRACE20057190 | 3.542 | 0 |
| BRACE20060840 | 3.661 | 0 |
| BRACE20111830 | 7.667 | 0 |
| BRACE20223330 | 10.589 | 0 |
| BRAMY20266850 | 2.956 | 0 |
| BRAWH20113430 | 8.367 | 0 |
| BRAWH20126980 | 22.868 | 0 |
| BRCOC20031870 | 0.938 | 0 |
| BRCOC20107300 | 12.892 | 0 |
| BRCOC20121720 | 6.71 | 0 |
| BRCOC20155970 | 25.187 | 0 |
| BRHIP20105710 | 18.366 | 0. |
| BRHIP20191490 | 13.172 | 0 |
| BRHIP20207990 | 12.072 | 0 |
| BRHIP20217620 | 6.646 | 0 |
| BRHIP20222280 | 10.898 | 0 |
| BRHIP20238880 | 0.439 | 0 |
| BRHIP20249110 | 11.054 | 0 |
| BRSSN20018690 | 3.6 | 0 |
| BRTHA20000570 | 51.819 | 0 |
| CTONG10000940 | 0.464 | 0 |
| CTONG10002770 | 24.668 | 0 |
| CTONG20095290 | 7.541 | 0 |
| CTONG20099380 | 23.863 | 0 |
| CTONG20103480 | 6.336 | 0 |
| CTONG20108210 | 2.557 | 0 |
| CTONG20118250 | 10.239 | 0 |
| CTONG20129960 | 3.482 | 0 |
| CTONG20131560 | 24.668 | 0 |
| CTONG20139070 | 2.571 | 0 |
| CTONG20139340 | 8.273 | 0 |
| CTONG20143690 | 4.963 | 0 |
| CTONG20160560 | 2.372 | 0 |
| D3OST30002580 | 22.242 | 0 |
| FCBBF10000240 | 5.237 | 0 |
| FCBBF10001820 | 10.114 | 0 |
| FCBBF10003670 | 1.812 | 0 |
| FCBBF10004120 | 2.308 | 0 |
| FCBBF10005740 | 4.952 | 0 |
| FCBBF30175310 | 1.912 | 0 |
| FCBBF30240020 | 6.769 | 0 |
| FCBBF30246230 | 6.682 | 0 |
| FCBBF40001420 | 4.36 | 0 |
| FEBRA20002100 | 0.843 | 0 |
| FEBRA20004620 | 6.733 | 0 |
| FEBRA20018280 | 6.489 | 0 |
| FEBRA20025270 | 3.416 | 0 |
| FEBRA20034360 | 6.63 | 0 |
| FEBRA20037500 | 19.596 | 0 |
| FEBRA20080810 | 0.845 | 0 |
| FEBRA20082100 | 15.999 | 0 |
| FEBRA20144170 | 1.288 | 0 |
| FEBRA20225040 | 1.959 | 0 |
| HCHON20002260 | 0.962 | 0 |
| HCHON20007380 | 3.551 | 0 |
| HCHON20015980 | 5.796 | 0 |
| HCHON20016650 | 1.84 | 0 |
| HCHON20022470 | 3.348 | 0 |
| HCHON20040020 | 0.936 | 0 |
| HCHON20076500 | 7.263 | 0 |
| HEART20072310 | 11.555 | 0 |
| HHDPC20034390 | 1.517 | 0 |
| HLUNG10000550 | 1.937 | 0 |
| HLUNG20016770 | 4.191 | 0 |
| KIDNE20131580 | 21.635 | 0 |
| LIVER20028420 | 9.107 | 0 |
| MAMGL10000830 | 0.346 | 0 |
| MESAN20171520 | 24.337 | 0 |
| NOVAR10000150 | 3.622 | 0 |
| NOVAR10000910 | 2.31 | 0 |
| NT2NE20053580 | 24.761 | 0 |
| NT2NE20159740 | 9.111 | 0 |
| NT2NE20174920 | 20.127 | 0 |
| NT2RI20023160 | 0.956 | 0 |
| NT2RI20041880 | 3.425 | 0 |
| NT2RI20054050 | 1.004 | 0 |
| NT2RI20076290 | 2.404 | 0 |
| NT2RI20273230 | 39.625 | 0 |
| NT2RP60000770 | 30.666 | 0 |
| NT2RP60000850 | 11.032 | 0 |
| NT2RP70036880 | 0.881 | 0 |
| NT2RP70043480 | 2.695 | 0 |
| NT2RP70045590 | 10.166 | 0 |
| NT2RP70056750 | 10.406 | 0 |
| NT2RP70062230 | 5.039 | 0 |
| NT2RP70081610 | 7.488 | 0 |
| OCBBF10001750 | 8.591 | 0 |
| OCBBF20006770 | 19.428 | 0 |
| OCBBF20032460 | 11.672 | 0 |
| OCBBF20039250 | 0.994 | 0 |
| OCBBF20047570 | 2.956 | 0 |
| OCBBF20054760 | 16.727 | 0 |
| OCBBF20059560 | 3.386 | 0 |
| OCBBF20068490 | 2.41 | 0 |
| OCBBF20080050 | 3.787 | 0 |
| OCBBF20094240 | 8.655 | 0 |
| OCBBF20097720 | 1.404 | 0 |
| OCBBF20103130 | 16.359 | 0 |
| OCBBF20105570 | 43.708 | 0 |
| OCBBF20140640 | 3.258 | 0 |
| OCBBF20173980 | 3.068 | 0 |
| OCBBF20180120 | 10.043 | 0 |
| OCBBF20188730 | 6.611 | 0 |
| OCBBF20189560 | 2.019 | 0 |
| PEBLM20044520 | 6.439 | 0 |
| PLACE60060420 | 6.493 | 0 |
| PROST20087700 | 0.93 | 0 |
| PROST20107820 | 0.29 | 0 |
| PROST20149160 | 4.345 | 0 |
| PROST20159240 | 8.082 | 0 |
| PROST20176170 | 25.167 | 0 |
| PROST20189770 | 15.499 | 0 |
| PUAEN20003740 | 1.145 | 0 |
| PUAEN20015860 | 3.406 | 0 |
| SKMUS20003610 | 1.275 | 0 |
| SKNSH20008190 | 5.937 | 0 |
| SKNSH20080430 | 12.076 | 0 |
| SMINT20026890 | 51.875 | 0 |
| SMINT20029760 | 6.221 | 0 |
| SMINT20068010 | 19.209 | 0 |
| SMINT20110330 | 25.261 | 0 |
| SMINT20121220 | 4.169 | 0 |
| SPLEN20008390 | 10.886 | 0 |
| SPLEN20011410 | 2.253 | 0 |
| SPLEN20054290 | 17.478 | 0 |
| SPLEN20128000 | 0.407 | 0 |
| SPLEN20140800 | 5.651 | 0 |
| SPLEN20145720 | 7.423 | 0 |
| SPLEN20169720 | 4.837 | 0 |
| SPLEN20179180 | 3.262 | 0 |
| SPLEN20193110 | 57.827 | 0 |
| SPLEN20194050 | 3.416 | 0 |
| SPLEN20211940 | 8.047 | 0 |
| SPLEN20212730 | 17.589 | 0 |
| SPLEN20225220 | 1.691 | 0 |
| TBAES20000590 | 1.797 | 0 |
| TESTI20061110 | 24.59 | 0 |
| TESTI20116830 | 38.615 | 0 |
| TESTI20184620 | 3.37 | 0 |
| TESTI20208710 | 64.596 | 0 |
| TESTI20211240 | 6.816 | 0 |
| TESTI20213580 | 40.357 | 0 |
| TESTI20214250 | 4.107 | 0 |
| TESTI20334410 | 2.618 | 0 |
| TESTI20369130 | 24.204 | 0 |
| TESTI20369690 | 4.285 | 0 |
| TESTI20391770 | 4.943 | 0 |
| THYMU20039810 | 2.491 | 0 |
| THYMU20216840 | 58.853 | 0 |
| THYMU20240710 | 39.309 | 0 |
| TRACH20003590 | 3.557 | 0 |
| TRACH20032720 | 4.419 | 0 |
| TRACH20033230 | 2.123 | 0 |
| TRACH20141240 | 3.693 | 0 |
| TRACH20149970 | 25.316 | 0 |
| UMVEN10001860 | 0.63 | 0 |
| UTERU20000740 | 62.692 | 0 |
| UTERU20004240 | 1.013 | 0 |
| UTERU20006290 | 100 | 0 |
| UTERU20020010 | 40.126 | 0 |
| UTERU20022940 | 2.165 | 0 |
| UTERU20030570 | 3.085 | 0 |
| UTERU20040610 | 100 | 0 |
| UTERU20046640 | 4.048 | 0 |
| UTERU20046980 | 100 | 0 |
| UTERU20050690 | 64.596 | 0 |
| UTERU20054460 | 24.816 | 0 |
| UTERU20055330 | 100 | 0 |
| UTERU20055930 | 4.016 | 0 |
| UTERU20056010 | 3.04 | 0 |
| UTERU20059050 | 100 | 0 |
| UTERU20061030 | 100 | 0 |
| UTERU20064000 | 15.228 | 0 |
| UTERU20064860 | 51.819 | 0 |
| UTERU20065930 | 3.522 | 0 |
| UTERU20067050 | 100 | 0 |
| UTERU20068990 | 100 | 0 |
| UTERU20070040 | 24.856 | 0 |
| UTERU20070810 | 17.449 | 0 |
| UTERU20076390 | 100 | 0 |
| UTERU20081300 | 53.896 | 0 |
| UTERU20084260 | 26.26 | 0 |
| UTERU20094350 | 12.756 | 0 |
| UTERU20095380 | 40.674 | 0 |
| UTERU20095400 | 100 | 0 |
| UTERU20097760 | 100 | 0 |
| UTERU20099720 | 16.901 | 0 |
| UTERU20101240 | 100 | 0 |
| UTERU20114100 | 100 | 0 |
| UTERU20115740 | 100 | 0 |
| UTERU20116570 | 100 | 0 |
| UTERU20118110 | 100 | 0 |
| UTERU20118970 | 100 | 0 |
| UTERU20119060 | 16.267 | 0 |
| UTERU20119680 | 100 | 0 |
| UTERU20120310 | 53.896 | 0 |
| UTERU20124070 | 29.356 | 0 |
| UTERU20126880 | 51.568 | 0 |
| UTERU20134910 | 13.929 | 0 |
| UTERU20135860 | 7.858 | 0 |
| UTERU20143980 | 100 | 0 |
| UTERU20144640 | 16.101 | 0 |
| UTERU20145480 | 39.231 | 0 |
| UTERU20146310 | 100 | 0 |
| UTERU20146680 | 39.231 | 0 |
| UTERU20150870 | 100 | 0 |
| UTERU20151980 | 100 | 0 |
| UTERU20158300 | 58.853 | 0 |
| UTERU20158800 | 100 | 0 |
| UTERU20161570 | 100 | 0 |
| UTERU20164260 | 15.158 | 0 |
| UTERU20168220 | 19.178 | 0 |
| UTERU20176130 | 12.264 | 0 |
| UTERU20176320 | 64.596 | 0 |
| UTERU20178100 | 100 | 0 |
| UTERU20179880 | 100 | 0 |
| UTERU20183640 | 53.896 | 0 |
| UTERU20185230 | 40.126 | 0 |
| UTERU20186740 | 100 | 0 |
| UTERU20188110 | 100 | 0 |
| UTERU20188810 | 100 | 0 |
| BRAWH10000930 | 2.2 | 10.279 |
| CTONG20128470 | 2.054 | 38.378 |
| UTERU20006960 | 3.394 | 63.416 |

[0428] TABLE 15

| CloneID | NTONG | CTONG |
|---|---|---|
| ADRGL20018300 | 0 | 22.262 |
| ASTRO20058630 | 0 | 14.161 |
| ASTRO20072210 | 0 | 34.963 |
| ASTRO20108190 | 0 | 5.013 |
| BRACE20003070 | 0 | 2.194 |
| BRACE20039040 | 0 | 4.829 |
| BRACE20060720 | 0 | 36.712 |
| BRACE20061050 | 0 | 39.515 |
| BRACE20210140 | 0 | 11.034 |
| BRACE20276430 | 0 | 26.828 |
| BRAMY20152110 | 0 | 24.194 |
| BRAMY20266850 | 0 | 4.616 |
| BRAMY20271400 | 0 | 48.032 |
| BRAWH10000930 | 0 | 3.436 |
| BRAWH20004600 | 0 | 1.137 |
| BRCAN20280360 | 0 | 4.497 |
| BRCOC20004870 | 0 | 0.54 |
| BRHIP20005340 | 0 | 5.1 |
| BRHIP20005530 | 0 | 4.786 |
| BRHIP20238880 | 0 | 2.741 |
| BRSSN20146100 | 0 | 6.65 |
| CTONG10000100 | 0 | 12.075 |
| CTONG10000220 | 0 | 100 |
| CTONG10000620 | 0 | 100 |
| CTONG10000930 | 0 | 74.021 |
| CTONG10000940 | 0 | 0.725 |
| CTONG10001650 | 0 | 100 |
| CTONG10002770 | 0 | 38.523 |
| CTONG20002180 | 0 | 100 |
| CTONG20004690 | 0 | 5.439 |
| CTONG20009770 | 0 | 100 |
| CTONG20014280 | 0 | 62.446 |
| CTONG20027090 | 0 | 4.036 |
| CTONG20028410 | 0 | 19.729 |
| CTONG20038890 | 0 | 100 |
| CTONG20049410 | 0 | 100 |
| CTONG20050280 | 0 | 25.499 |
| CTONG20052650 | 0 | 34.822 |
| CTONG20052900 | 0 | 42.764 |
| CTONG20075860 | 0 | 11.194 |
| CTONG20076130 | 0 | 16.303 |
| CTONG20077790 | 0 | 62.68 |
| CTONG20082690 | 0 | 12.672 |
| CTONG20085950 | 0 | 100 |
| CTONG20091080 | 0 | 44.201 |
| CTONG20091320 | 0 | 100 |
| CTONG20092570 | 0 | 100 |
| CTONG20092580 | 0 | 100 |
| CTONG20092680 | 0 | 100 |
| CTONG20092700 | 0 | 100 |
| CTONG20093950 | 0 | 100 |
| CTONG20095270 | 0 | 100 |
| CTONG20095290 | 0 | 11.777 |
| CTONG20095340 | 0 | 14.323 |
| CTONG20096430 | 0 | 100 |
| CTONG20096750 | 0 | 100 |
| CTONG20097660 | 0 | 100 |
| CTONG20098440 | 0 | 33.474 |
| CTONG20099380 | 0 | 37.266 |
| CTONG20099550 | 0 | 100 |
| CTONG20099630 | 0 | 38.502 |
| CTONG20100240 | 0 | 100 |
| CTONG20101480 | 0 | 100 |
| CTONG20103480 | 0 | 13.193 |
| CTONG20105080 | 0 | 15.273 |
| CTONG20105660 | 0 | 25.256 |
| CTONG20106230 | 0 | 100 |
| CTONG20106520 | 0 | 29.937 |
| CTONG20108210 | 0 | 2.662 |
| CTONG20114290 | 0 | 100 |
| CTONG20114740 | 0 | 100 |
| CTONG20118150 | 0 | 100 |
| CTONG20118250 | 0 | 15.991 |
| CTONG20119200 | 0 | 100 |
| CTONG20120770 | 0 | 100 |
| CTONG20121010 | 0 | 29.404 |
| CTONG20121580 | 0 | 33.983 |
| CTONG20124010 | 0 | 7.835 |
| CTONG20124220 | 0 | 69.076 |
| CTONG20124470 | 0 | 100 |
| CTONG20124730 | 0 | 100 |
| CTONG20125540 | 0 | 100 |
| CTONG20125640 | 0 | 7.359 |
| CTONG20126070 | 0 | 3.221 |
| CTONG20127450 | 0 | 10.331 |
| CTONG20128470 | 0 | 9.622 |
| CTONG20129960 | 0 | 32.63 |
| CTONG20131490 | 0 | 24.817 |
| CTONG20131560 | 0 | 38.523 |
| CTONG20132220 | 0 | 6.999 |
| CTONG20133390 | 0 | 100 |
| CTONG20133480 | 0 | 10.246 |
| CTONG20133520 | 0 | 50.616 |
| CTONG20136300 | 0 | 100 |
| CTONG20138030 | 0 | 100 |
| CTONG20139070 | 0 | 8.031 |
| CTONG20139340 | 0 | 12.919 |
| CTONG20139860 | 0 | 100 |
| CTONG20140320 | 0 | 100 |
| CTONG20140580 | 0 | 100 |
| CTONG20141650 | 0 | 8.968 |
| CTONG20146300 | 0 | 100 |
| CTONG20147050 | 0 | 34.963 |
| CTONG20149460 | 0 | 100 |
| CTONG20149950 | 0 | 100 |
| CTONG20153300 | 0 | 52.97 |
| CTONG20153580 | 0 | 74.021 |
| CTONG20155180 | 0 | 24.734 |
| CTONG20155400 | 0 | 100 |
| CTONG20156780 | 0 | 62.446 |
| CTONG20158040 | 0 | 100 |
| CTONG20158150 | 0 | 16.385 |
| CTONG20158660 | 0 | 100 |
| CTONG20159530 | 0 | 100 |
| CTONG20160560 | 0 | 3.704 |
| CTONG20161850 | 0 | 19.368 |
| CTONG20162170 | 0 | 100 |
| CTONG20163550 | 0 | 100 |
| CTONG20164990 | 0 | 65.066 |
| CTONG20165050 | 0 | 33.474 |
| CTONG20186320 | 0 | 14.897 |
| CTONG20200310 | 0 | 100 |
| CTONG20265130 | 0 | 100 |
| CTONG20267700 | 0 | 100 |
| CTONG20273610 | 0 | 100 |
| FCBBF10000240 | 0 | 12.268 |
| FCBBF10005740 | 0 | 3.866 |
| FCBBF30123470 | 0 | 4.088 |
| FCBBF30233680 | 0 | 9.14 |
| FEBRA20025270 | 0 | 5.334 |
| FEBRA20037500 | 0 | 6.8 |
| HCHON20002260 | 0 | 1.502 |
| HCHON20007380 | 0 | 5.546 |
| HCHON20007510 | 0 | 6.65 |
| HCHON20015350 | 0 | 17.176 |
| HCHON20040020 | 0 | 1.462 |
| HHDPC20034390 | 0 | 0.474 |
| HLUNG10000550 | 0 | 2.016 |
| KIDNE20002520 | 0 | 3.184 |
| KIDNE20009470 | 0 | 9.415 |
| KIDNE20115080 | 0 | 34.822 |
| KIDNE20127100 | 0 | 35.274 |
| LIVER20028420 | 0 | 3.556 |
| MESAN20029400 | 0 | 5.924 |
| NT2RI20023160 | 0 | 1.493 |
| NT2RI20023910 | 0 | 1.51 |
| NT2RI20091730 | 0 | 4.155 |
| NT2RP70043480 | 0 | 4.209 |
| NT2RP70078420 | 0 | 3.572 |
| NT2RP70081610 | 0 | 11.694 |
| OCBBF20006770 | 0 | 30.34 |
| OCBBF20059560 | 0 | 5.287 |
| OCBBF20073540 | 0 | 1.871 |
| OCBBF20094240 | 0 | 13.516 |
| OCBBF20108580 | 0 | 12.407 |
| PEBLM20044520 | 0 | 15.083 |
| PEBLM20071880 | 0 | 16.259 |
| PROST20107820 | 0 | 0.453 |
| PUAEN20030180 | 0 | 6.243 |
| SKNSH20008190 | 0 | 4.636 |
| SMINT20023280 | 0 | 34.547 |
| SMINT20089170 | 0 | 20.839 |
| SPLEN20179180 | 0 | 5.094 |
| TESTI20094020 | 0 | 17.075 |
| TESTI20094230 | 0 | 30.119 |
| TESTI20152460 | 0 | 22.051 |
| TESTI20184620 | 0 | 5.263 |
| TESTI20211240 | 0 | 10.645 |
| TESTI20442760 | 0 | 8.832 |
| THYMU20039810 | 0 | 0.973 |
| TRACH20028030 | 0 | 11.644 |
| TRACH20141240 | 0 | 1.923 |
| TSTOM20003150 | 0 | 4.245 |
| UTERU20004240 | 0 | 1.582 |
| UTERU20055930 | 0 | 2.091 |
| UTERU20065930 | 0 | 2.75 |
| UTERU20119060 | 0 | 12.702 |
| UTERU20124070 | 0 | 45.844 |
| BRACE20039440 | 34.336 | 0 |
| BRACE20068590 | 74.88 | 0 |
| FCBBF30018550 | 20.639 | 0 |
| IMR3220002430 | 6.323 | 0 |
| KIDNE20028830 | 16.715 | 0 |
| NT2RI20028470 | 9.251 | 0 |
| NT2RI20054050 | 2.069 | 0 |
| NT2RI20086220 | 23.258 | 0 |
| NTONG20009770 | 7.245 | 0 |
| NTONG20013620 | 25.727 | 0 |
| NTONG20028070 | 86.921 | 0 |
| NTONG20029480 | 32.729 | 0 |
| NTONG20029700 | 100 | 0 |
| NTONG20046140 | 43.643 | 0 |
| NTONG20048060 | 51.123 | 0 |
| NTONG20049910 | 100 | 0 |
| NTONG20050620 | 100 | 0 |
| NTONG20050860 | 100 | 0 |
| NTONG20051530 | 58.314 | 0 |
| NTONG20052650 | 100 | 0 |
| NTONG20056570 | 100 | 0 |
| NTONG20061870 | 100 | 0 |
| NTONG20063010 | 40.505 | 0 |
| NTONG20064400 | 100 | 0 |
| NTONG20064840 | 31.857 | 0 |
| NTONG20065010 | 100 | 0 |
| NTONG20066460 | 100 | 0 |
| NTONG20067090 | 66.789 | 0 |
| NTONG20067830 | 20.865 | 0 |
| NTONG20070200 | 100 | 0 |
| NTONG20070340 | 52.247 | 0 |
| NTONG20075220 | 100 | 0 |
| NTONG20076930 | 51.858 | 0 |
| NTONG20077560 | 49.744 | 0 |
| NTONG20083650 | 100 | 0 |
| NTONG20088620 | 100 | 0 |
| NTONG20090600 | 20.536 | 0 |
| NTONG20090680 | 100 | 0 |
| NTONG20092290 | 100 | 0 |
| NTONG20092330 | 100 | 0 |
| OCBBF20068490 | 14.895 | 0 |
| SKMUS20001980 | 23.281 | 0 |
| SMINT20138900 | 67.622 | 0 |
| SPLEN20008390 | 67.269 | 0 |
| SPLEN20162680 | 3.184 | 0 |
| UTERU20134910 | 86.071 | 0 |
| ASTRO20155290 | 13.655 | 3.451 |
| FEBRA20080810 | 10.438 | 1.319 |
| NT2RP70032610 | 10.013 | 27.835 |
| NT2RP70036880 | 5.442 | 16.504 |
| NTONG20015870 | 17.552 | 0.554 |
| OCBBF20188730 | 10.213 | 2.581 |
| SMINT20122910 | 33.985 | 8.589 |
| SPLEN20099700 | 37.585 | 9.499 |

[0429] TABLE 16

| | FC- | | | | | | | | | | | | |
|---|---|---|---|---|---|---|---|---|---|---|---|---|---|
| Clone ID | BBF | FEBRA | OCBBF | BRACE | BRALZ | BRAMY | BRAWH | BRCAN | BRCOC | BRHIP | BRSSN | BRSTN | BRTHA |
| 3NB6910001910 | 0 | 0 | 0 | 0 | 0 | 0 | 6.122 | 0 | 0 | 6.246 | 0 | 0 | 0 |
| ADRGL20018300 | 0 | 0 | 0 | 8.483 | 0 | 0 | 0 | 0 | 0 | 0 | 0 | 0 | 0 |
| ASTRO20001410 | 0 | 0 | 0 | 0 | 0 | 3.06 | 0 | 0 | 0 | 0 | 0 | 0 | 0 |
| ASTRO20033160 | 0 | 0 | 0 | 2.094 | 0 | 0 | 2.95 | 0 | 0 | 0 | 0 | 0 | 0 |
| ASTRO20058630 | 0 | 0 | 0 | 0 | 0 | 0 | 7.603 | 0 | 0 | 0 | 0 | 0 | 0 |
| ASTRO20064750 | 0 | 0 | 0 | 0 | 0 | 7.505 | 0 | 0 | 0 | 0 | 0 | 0 | 16.519 |
| ASTRO20100720 | 0 | 0 | 0 | 0 | 0 | 0 | 0 | 39.838 | 0 | 0 | 0 | 0 | 0 |
| ASTRO20141350 | 0 | 0 | 0 | 0 | 0 | 0 | 0 | 0 | 12.305 | 0 | 0 | 0 | 0 |
| ASTRO20145760 | 0 | 0 | 0 | 0 | 0 | 11.388 | 0 | 0 | 0 | 0 | 42.066 | 0 | 0 |
| ASTRO20181690 | 0 | 0 | 0 | 0 | 0 | 0.952 | 0 | 2.167 | 0 | 1.927 | 0 | 0 | 0 |
| BGGI120006160 | 0 | 0 | 0 | 1.269 | 0 | 0.901 | 0 | 2.051 | 0 | 0 | 0 | 3.224 | 0.991 |
| BRACE20006400 | 0 | 0 | 0 | 100 | 0 | 0 | 0 | 0 | 0 | 0 | 0 | 0 | 0 |
| BRACE20011070 | 0 | 0 | 0 | 10.447 | 53.184 | 0 | 0 | 0 | 0 | 0 | 0 | 0 | 0 |
| BRACE20019540 | 0 | 0 | 0 | 100 | 0 | 0 | 0 | 0 | 0 | 0 | 0 | 0 | 0 |
| BRACE20027620 | 0 | 0 | 0 | 100 | 0 | 0 | 0 | 0 | 0 | 0 | 0 | 0 | 0 |
| BRACE20037660 | 0 | 0 | 0 | 100 | 0 | 0 | 0 | 0 | 0 | 0 | 0 | 0 | 0 |
| BRACE20038000 | 0 | 0 | 0 | 38.906 | 0 | 0 | 0 | 0 | 0 | 0 | 0 | 0 | 30.394 |
| BRACE20038470 | 0 | 0 | 0 | 100 | 0 | 0 | 0 | 0 | 0 | 0 | 0 | 0 | 0 |
| BRACE20038480 | 0 | 0 | 0 | 38.787 | 0 | 0 | 0 | 0 | 0 | 0 | 0 | 0 | 0 |
| BRACE20038850 | 0 | 0 | 0 | 100 | 0 | 0 | 0 | 0 | 0 | 0 | 0 | 0 | 0 |
| BRACE20039440 | 0 | 0 | 0 | 0.367 | 0 | 2.086 | 0.518 | 1.188 | 1.834 | 0 | 1.927 | 1.867 | 0 |
| BRACE20039540 | 0 | 0 | 0 | 16.746 | 0 | 0 | 0 | 0 | 0 | 0 | 0 | 0 | 0 |
| BRACE20050900 | 0 | 0 | 0 | 52.057 | 0 | 0 | 0 | 0 | 0 | 0 | 0 | 0 | 0 |
| BRACE20051380 | 0 | 0 | 0 | 100 | 0 | 0 | 0 | 0 | 0 | 0 | 0 | 0 | 0 |
| BRACE20051690 | 0 | 0 | 0 | 100 | 0 | 0 | 0 | 0 | 0 | 0 | 0 | 0 | 0 |
| BRACE20052160 | 0 | 0 | 0 | 100 | 0 | 0 | 0 | 0 | 0 | 0 | 0 | 0 | 0 |
| BRACE20053280 | 0 | 0 | 0 | 100 | 0 | 0 | 0 | 0 | 0 | 0 | 0 | 0 | 0 |
| BRACE20053480 | 0 | 0 | 0 | 100 | 0 | 0 | 0 | 0 | 0 | 0 | 0 | 0 | 0 |
| BRACE20053630 | 0 | 0 | 0 | 10.086 | 0 | 0 | 0 | 0 | 0 | 0 | 0 | 0 | 0 |
| BRACE20054500 | 0 | 0 | 0 | 100 | 0 | 0 | 0 | 0 | 0 | 0 | 0 | 0 | 0 |
| BRACE20055180 | 0 | 0 | 0 | 100 | 0 | 0 | 0 | 0 | 0 | 0 | 0 | 0 | 0 |
| BRACE20057420 | 0 | 0 | 0 | 100 | 0 | 0 | 0 | 0 | 0 | 0 | 0 | 0 | 0 |
| BRACE20057620 | 0 | 0 | 0 | 100 | 0 | 0 | 0 | 0 | 0 | 0 | 0 | 0 | 0 |
| BRACE20057730 | 0 | 0 | 0 | 100 | 0 | 0 | 0 | 0 | 0 | 0 | 0 | 0 | 0 |
| BRACE20058580 | 0 | 0 | 0 | 14.668 | 0 | 0 | 41.331 | 0 | 0 | 21.084 | 0 | 0 | 22.917 |
| BRACE20058810 | 0 | 0 | 0 | 100 | 0 | 0 | 0 | 0 | 0 | 0 | 0 | 0 | 0 |

[0430] TABLE 17

| | | | | | | | | | | | | | |
|---|---|---|---|---|---|---|---|---|---|---|---|---|---|
| BRACE20060840 | 0 | 0 | 0 | 2.179 | 0 | 3.093 | 0 | 14.084 | 0 | 0 | 0 | 11.067 | 0 |
| BRACE20060890 | 0 | 0 | 0 | 54.983 | 0 | 0 | 16.309 | 0 | 0 | 0 | 0 | 0 | 0 |
| BRACE20061050 | 0 | 0 | 0 | 15.058 | 0 | 0 | 0 | 0 | 0 | 0 | 0 | 0 | 0 |
| BRACE20061740 | 0 | 0 | 0 | 100 | 0 | 0 | 0 | 0 | 0 | 0 | 0 | 0 | 0 |
| BRACE20062400 | 0 | 0 | 0 | 100 | 0 | 0 | 0 | 0 | 0 | 0 | 0 | 0 | 0 |
| BRACE20062740 | 0 | 0 | 0 | 41.329 | 0 | 58.671 | 0 | 0 | 0 | 0 | 0 | 0 | 0 |
| BRACE20063630 | 0 | 0 | 0 | 26.312 | 0 | 9.338 | 0 | 21.263 | 0 | 0 | 0 | 0 | 0 |
| BRACE20063780 | 0 | 0 | 0 | 38.787 | 0 | 0 | 0 | 0 | 0 | 0 | 0 | 0 | 0 |
| BRACE20063800 | 0 | 0 | 0 | 58.183 | 0 | 0 | 0 | 0 | 0 | 41.817 | 0 | 0 | 0 |
| BRACE20063930 | 0 | 0 | 0 | 100 | 0 | 0 | 0 | 0 | 0 | 0 | 0 | 0 | 0 |
| BRACE20064880 | 0 | 0 | 0 | 100 | 0 | 0 | 0 | 0 | 0 | 0 | 0 | 0 | 0 |
| BRACE20068590 | 0 | 0 | 0 | 7.211 | 0 | 0 | 0 | 0 | 0 | 0 | 0 | 0 | 11.267 |
| BRACE20069090 | 0 | 0 | 0 | 100 | 0 | 0 | 0 | 0 | 0 | 0 | 0 | 0 | 0 |
| BRACE20081720 | 0 | 0 | 0 | 100 | 0 | 0 | 0 | 0 | 0 | 0 | 0 | 0 | 0 |
| BRACE20082950 | 0 | 0 | 0 | 100 | 0 | 0 | 0 | 0 | 0 | 0 | 0 | 0 | 0 |
| BRACE20096200 | 0 | 0 | 0 | 13.619 | 0 | 0 | 0 | 0 | 0 | 0 | 0 | 0 | 0 |
| BRACE20096540 | 0 | 0 | 0 | 100 | 0 | 0 | 0 | 0 | 0 | 0 | 0 | 0 | 0 |
| BRACE20097320 | 0 | 0 | 0 | 100 | 0 | 0 | 0 | 0 | 0 | 0 | 0 | 0 | 0 |
| BRACE20101700 | 0 | 0 | 0 | 100 | 0 | 0 | 0 | 0 | 0 | 0 | 0 | 0 | 0 |
| BRACE20101710 | 0 | 0 | 0 | 100 | 0 | 0 | 0 | 0 | 0 | 0 | 0 | 0 | 0 |
| BRACE20106840 | 0 | 0 | 0 | 38.787 | 0 | 0 | 0 | 0 | 0 | 0 | 0 | 0 | 0 |
| BRACE20107530 | 0 | 0 | 0 | 13.239 | 0 | 0 | 0 | 0 | 66.077 | 0 | 0 | 0 | 20.684 |
| BRACE20108130 | 0 | 0 | 0 | 100 | 0 | 0 | 0 | 0 | 0 | 0 | 0 | 0 | 0 |
| BRACE20108880 | 0 | 0 | 0 | 100 | 0 | 0 | 0 | 0 | 0 | 0 | 0 | 0 | 0 |
| BRACE20109370 | 0 | 0 | 0 | 100 | 0 | 0 | 0 | 0 | 0 | 0 | 0 | 0 | 0 |
| BRACE20109830 | 0 | 0 | 0 | 100 | 0 | 0 | 0 | 0 | 0 | 0 | 0 | 0 | 0 |
| BRACE20114780 | 0 | 0 | 0 | 100 | 0 | 0 | 0 | 0 | 0 | 0 | 0 | 0 | 0 |
| BRACE20115450 | 0 | 0 | 0 | 100 | 0 | 0 | 0 | 0 | 0 | 0 | 0 | 0 | 0 |
| BRACE20115920 | 0 | 0 | 0 | 100 | 0 | 0 | 0 | 0 | 0 | 0 | 0 | 0 | 0 |
| BRACE20116110 | 0 | 0 | 0 | 100 | 0 | 0 | 0 | 0 | 0 | 0 | 0 | 0 | 0 |
| BRACE20116460 | 0 | 0 | 0 | 100 | 0 | 0 | 0 | 0 | 0 | 0 | 0 | 0 | 0 |
| BRACE20118380 | 0 | 0 | 0 | 100 | 0 | 0 | 0 | 0 | 0 | 0 | 0 | 0 | 0 |
| BRACE20121850 | 0 | 0 | 0 | 100 | 0 | 0 | 0 | 0 | 0 | 0 | 0 | 0 | 0 |
| BRACE20141080 | 0 | 0 | 0 | 100 | 0 | 0 | 0 | 0 | 0 | 0 | 0 | 0 | 0 |
| BRACE20142320 | 0 | 0 | 0 | 100 | 0 | 0 | 0 | 0 | 0 | 0 | 0 | 0 | 0 |
| BRACE20147800 | 0 | 0 | 0 | 100 | 0 | 0 | 0 | 0 | 0 | 0 | 0 | 0 | 0 |
| BRACE20148210 | 0 | 0 | 0 | 100 | 0 | 0 | 0 | 0 | 0 | 0 | 0 | 0 | 0 |

[0431] TABLE 18

| | | | | | | | | | | | | | |
|---|---|---|---|---|---|---|---|---|---|---|---|---|---|
| BRACE20148240 | 0 | 0 | 0 | 100 | 0 | 0 | 0 | 0 | 0 | 0 | 0 | 0 | 0 |
| BRACE20150310 | 0 | 0 | 0 | 100 | 0 | 0 | 0 | 0 | 0 | 0 | 0 | 0 | 0 |
| BRACE20151320 | 0 | 0 | 0 | 11.694 | 0 | 0 | 0 | 0 | 58.366 | 0 | 0 | 0 | 0 |
| BRACE20152870 | 0 | 0 | 0 | 1.63 | 0 | 0 | 0 | 0 | 8.135 | 0 | 0 | 0 | 2.547 |
| BRACE20153680 | 0 | 0 | 0 | 41.512 | 0 | 0 | 58.488 | 0 | 0 | 0 | 0 | 0 | 0 |
| BRACE20154120 | 0 | 0 | 0 | 17.282 | 0 | 0 | 12.174 | 0 | 0 | 0 | 0 | 0 | 0 |
| BRACE20163150 | 0 | 0 | 0 | 100 | 0 | 0 | 0 | 0 | 0 | 0 | 0 | 0 | 0 |
| BRACE20163350 | 0 | 0 | 0 | 9.897 | 0 | 0 | 0 | 0 | 0 | 0 | 0 | 0 | 0 |
| BRACE20165830 | 0 | 0 | 0 | 100 | 0 | 0 | 0 | 0 | 0 | 0 | 0 | 0 | 0 |
| BRACE20171240 | 0 | 0 | 0 | 100 | 0 | 0 | 0 | 0 | 0 | 0 | 0 | 0 | 0 |
| BRACE20172980 | 0 | 0 | 0 | 100 | 0 | 0 | 0 | 0 | 0 | 0 | 0 | 0 | 0 |
| BRACE20175870 | 0 | 0 | 0 | 100 | 0 | 0 | 0 | 0 | 0 | 0 | 0 | 0 | 0 |
| BRACE20177200 | 0 | 0 | 0 | 100 | 0 | 0 | 0 | 0 | 0 | 0 | 0 | 0 | 0 |
| BRACE20179340 | 0 | 0 | 0 | 13.12 | 0 | 0 | 0 | 0 | 0 | 0 | 0 | 33.326 | 0 |
| BRACE20185680 | 0 | 0 | 0 | 100 | 0 | 0 | 0 | 0 | 0 | 0 | 0 | 0 | 0 |
| BRACE20188470 | 0 | 0 | 0 | 13.846 | 0 | 0 | 39.016 | 0 | 0 | 0 | 0 | 0 | 21.634 |
| BRACE20190040 | 0 | 0 | 0 | 39.025 | 0 | 0 | 0 | 0 | 0 | 0 | 0 | 0 | 60.975 |
| BRACE20190440 | 0 | 0 | 0 | 100 | 0 | 0 | 0 | 0 | 0 | 0 | 0 | 0 | 0 |
| BRACE20192440 | 0 | 0 | 0 | 28.977 | 0 | 0 | 0 | 0 | 0 | 0 | 0 | 0 | 0 |
| BRACE20195100 | 0 | 0 | 0 | 100 | 0 | 0 | 0 | 0 | 0 | 0 | 0 | 0 | 0 |
| BRACE20201570 | 0 | 0 | 0 | 100 | 0 | 0 | 0 | 0 | 0 | 0 | 0 | 0 | 0 |
| BRACE20220300 | 0 | 0 | 0 | 100 | 0 | 0 | 0 | 0 | 0 | 0 | 0 | 0 | 0 |
| BRACE20223280 | 0 | 0 | 0 | 100 | 0 | 0 | 0 | 0 | 0 | 0 | 0 | 0 | 0 |
| BRACE20223330 | 0 | 0 | 0 | 12.602 | 0 | 0 | 17.756 | 0 | 0 | 18.115 | 0 | 0 | 19.69 |
| BRACE20224480 | 0 | 0 | 0 | 100 | 0 | 0 | 0 | 0 | 0 | 0 | 0 | 0 | 0 |
| BRACE20224500 | 0 | 0 | 0 | 100 | 0 | 0 | 0 | 0 | 0 | 0 | 0 | 0 | 0 |
| BRACE20228480 | 0 | 0 | 0 | 100 | 0 | 0 | 0 | 0 | 0 | 0 | 0 | 0 | 0 |
| BRACE20229280 | 0 | 0 | 0 | 100 | 0 | 0 | 0 | 0 | 0 | 0 | 0 | 0 | 0 |
| BRACE20230700 | 0 | 0 | 0 | 100 | 0 | 0 | 0 | 0 | 0 | 0 | 0 | 0 | 0 |
| BRACE20232840 | 0 | 0 | 0 | 100 | 0 | 0 | 0 | 0 | 0 | 0 | 0 | 0 | 0 |
| BRACE20235400 | 0 | 0 | 0 | 100 | 0 | 0 | 0 | 0 | 0 | 0 | 0 | 0 | 0 |
| BRACE20237270 | 0 | 0 | 0 | 14.013 | 0 | 0 | 0 | 0 | 0 | 0 | 0 | 0 | 0 |
| BRACE20238000 | 0 | 0 | 0 | 100 | 0 | 0 | 0 | 0 | 0 | 0 | 0 | 0 | 0 |
| BRACE20240740 | 0 | 0 | 0 | 45.981 | 0 | 0 | 0 | 0 | 0 | 0 | 0 | 0 | 0 |
| BRACE20248260 | 0 | 0 | 0 | 100 | 0 | 0 | 0 | 0 | 0 | 0 | 0 | 0 | 0 |
| BRACE20253160 | 0 | 0 | 0 | 100 | 0 | 0 | 0 | 0 | 0 | 0 | 0 | 0 | 0 |
| BRACE20253330 | 0 | 0 | 0 | 100 | 0 | 0 | 0 | 0 | 0 | 0 | 0 | 0 | 0 |

[0432] TABLE 19

| | | | | | | | | | | | | | |
|---|---|---|---|---|---|---|---|---|---|---|---|---|---|
| BRACE20257100 | 0 | 0 | 0 | 100 | 0 | 0 | 0 | 0 | 0 | 0 | 0 | 0 | 0 |
| BRACE20262930 | 0 | 0 | 0 | 100 | 0 | 0 | 0 | 0 | 0 | 0 | 0 | 0 | 0 |
| BRACE20262940 | 0 | 0 | 0 | 100 | 0 | 0 | 0 | 0 | 0 | 0 | 0 | 0 | 0 |
| BRACE20266750 | 0 | 0 | 0 | 100 | 0 | 0 | 0 | 0 | 0 | 0 | 0 | 0 | 0 |
| BRACE20267250 | 0 | 0 | 0 | 13.014 | 0 | 0 | 0 | 0 | 0 | 0 | 0 | 0 | 0 |
| BRACE20269200 | 0 | 0 | 0 | 100 | 0 | 0 | 0 | 0 | 0 | 0 | 0 | 0 | 0 |
| BRACE20269710 | 0 | 0 | 0 | 100 | 0 | 0 | 0 | 0 | 0 | 0 | 0 | 0 | 0 |
| BRACE20273890 | 0 | 0 | 0 | 100 | 0 | 0 | 0 | 0 | 0 | 0 | 0 | 0 | 0 |
| BRACE20274080 | 0 | 0 | 0 | 100 | 0 | 0 | 0 | 0 | 0 | 0 | 0 | 0 | 0 |
| BRACE20283920 | 0 | 0 | 0 | 7.236 | 0 | 0 | 0 | 0 | 18.058 | 0 | 37.945 | 36.76 | 0 |
| BRACE20284100 | 0 | 0 | 0 | 100 | 0 | 0 | 0 | 0 | 0 | 0 | 0 | 0 | 0 |
| BRACE20286360 | 0 | 0 | 0 | 37.993 | 48.354 | 0 | 0 | 0 | 0 | 13.653 | 0 | 0 | 0 |
| BRACE20287410 | 0 | 0 | 0 | 100 | 0 | 0 | 0 | 0 | 0 | 0 | 0 | 0 | 0 |
| BRALZ20013500 | 0 | 0 | 0 | 0 | 100 | 0 | 0 | 0 | 0 | 0 | 0 | 0 | 0 |
| BRALZ20014450 | 0 | 0 | 0 | 0 | 100 | 0 | 0 | 0 | 0 | 0 | 0 | 0 | 0 |
| BRALZ20017430 | 0 | 0 | 0 | 0 | 100 | 0 | 0 | 0 | 0 | 0 | 0 | 0 | 0 |
| BRALZ20018340 | 0 | 0 | 0 | 0 | 76.517 | 0 | 0 | 0 | 0 | 0 | 0 | 0 | 23.483 |
| BRALZ20054710 | 0 | 0 | 0 | 0 | 100 | 0 | 0 | 0 | 0 | 0 | 0 | 0 | 0 |
| BRALZ20058880 | 0 | 0 | 0 | 0 | 100 | 0 | 0 | 0 | 0 | 0 | 0 | 0 | 0 |
| BRALZ20059500 | 0 | 0 | 0 | 0 | 100 | 0 | 0 | 0 | 0 | 0 | 0 | 0 | 0 |
| BRALZ20064740 | 0 | 0 | 0 | 0 | 100 | 0 | 0 | 0 | 0 | 0 | 0 | 0 | 0 |
| BRALZ20065600 | 0 | 0 | 0 | 0 | 100 | 0 | 0 | 0 | 0 | 0 | 0 | 0 | 0 |
| BRALZ20069760 | 0 | 0 | 0 | 0 | 100 | 0 | 0 | 0 | 0 | 0 | 0 | 0 | 0 |
| BRALZ20073760 | 0 | 0 | 0 | 0 | 100 | 0 | 0 | 0 | 0 | 0 | 0 | 0 | 0 |
| BRALZ20075450 | 0 | 0 | 0 | 0 | 100 | 0 | 0 | 0 | 0 | 0 | 0 | 0 | 0 |
| BRALZ20075760 | 0 | 0 | 0 | 0 | 100 | 0 | 0 | 0 | 0 | 0 | 0 | 0 | 0 |
| BRALZ20077900 | 0 | 0 | 0 | 0 | 100 | 0 | 0 | 0 | 0 | 0 | 0 | 0 | 0 |
| BRALZ20077930 | 0 | 0 | 0 | 0 | 100 | 0 | 0 | 0 | 0 | 0 | 0 | 0 | 0 |
| BRALZ20080310 | 0 | 0 | 0 | 0 | 100 | 0 | 0 | 0 | 0 | 0 | 0 | 0 | 0 |
| BRALZ20088690 | 0 | 0 | 0 | 0 | 100 | 0 | 0 | 0 | 0 | 0 | 0 | 0 | 0 |
| BRAMY10001300 | 0 | 0 | 0 | 0 | 0 | 12.137 | 0 | 0 | 0 | 0 | 0 | 0 | 0 |
| BRAMY10001570 | 0 | 0 | 0 | 0 | 0 | 100 | 0 | 0 | 0 | 0 | 0 | 0 | 0 |
| BRAMY20000520 | 0 | 0 | 0 | 0 | 39.13 | 21.823 | 0 | 0 | 0 | 0 | 0 | 39.047 | 0 |
| BRAMY20000860 | 0 | 0 | 0 | 0 | 0 | 100 | 0 | 0 | 0 | 0 | 0 | 0 | 0 |
| BRAMY20002770 | 0 | 0 | 0 | 0 | 0 | 100 | 0 | 0 | 0 | 0 | 0 | 0 | 0 |
| BRAMY20004110 | 0 | 0 | 0 | 4.399 | 0 | 18.735 | 0 | 0 | 0 | 12.647 | 23.069 | 0 | 0 |
| BRAMY20011140 | 0 | 0 | 0 | 0 | 0 | 100 | 0 | 0 | 0 | 0 | 0 | 0 | 0 |

[0433] TABLE 20

| | | | | | | | | | | | | | |
|---|---|---|---|---|---|---|---|---|---|---|---|---|---|
| BRAMY20025840 | 0 | 0 | 0 | 0 | 0 | 100 | 0 | 0 | 0 | 0 | 0 | 0 | 0 |
| BRAMY20039260 | 0 | 0 | 0 | 0 | 0 | 100 | 0 | 0 | 0 | 0 | 0 | 0 | 0 |
| BRAMY20045240 | 0 | 0 | 0 | 0 | 0 | 21.841 | 0 | 0 | 0 | 0 | 0 | 78.159 | 0 |
| BRAMY20054880 | 0 | 0 | 0 | 8.088 | 0 | 22.964 | 0 | 0 | 40.37 | 11.626 | 0 | 0 | 0 |
| BRAMY20060920 | 0 | 0 | 0 | 0 | 0 | 100 | 0 | 0 | 0 | 0 | 0 | 0 | 0 |
| BRAMY20063970 | 0 | 0 | 0 | 0 | 0 | 2.83 | 0 | 6.443 | 0 | 2.865 | 10.452 | 0 | 0 |
| BRAMY20071850 | 0 | 0 | 0 | 0 | 0 | 100 | 0 | 0 | 0 | 0 | 0 | 0 | 0 |
| BRAMY20102080 | 0 | 0 | 0 | 0 | 0 | 36.63 | 0 | 0 | 0 | 0 | 0 | 0 | 0 |
| BRAMY20104640 | 0 | 0 | 0 | 15.639 | 0 | 33.302 | 11.017 | 0 | 0 | 0 | 0 | 0 | 0 |
| BRAMY20110640 | 0 | 0 | 0 | 0 | 0 | 100 | 0 | 0 | 0 | 0 | 0 | 0 | 0 |
| BRAMY20111960 | 0 | 0 | 0 | 0 | 0 | 100 | 0 | 0 | 0 | 0 | 0 | 0 | 0 |
| BRAMY20116790 | 0 | 0 | 0 | 0 | 0 | 100 | 0 | 0 | 0 | 0 | 0 | 0 | 0 |
| BRAMY20121190 | 0 | 0 | 0 | 0 | 0 | 100 | 0 | 0 | 0 | 0 | 0 | 0 | 0 |
| BRAMY20121620 | 0 | 0 | 0 | 0 | 0 | 100 | 0 | 0 | 0 | 0 | 0 | 0 | 0 |
| BRAMY20124260 | 0 | 0 | 0 | 0 | 0 | 6.228 | 0 | 0 | 0 | 0 | 0 | 0 | 0 |
| BRAMY20134140 | 0 | 0 | 0 | 0 | 0 | 100 | 0 | 0 | 0 | 0 | 0 | 0 | 0 |
| BRAMY20135900 | 0 | 0 | 0 | 0 | 0 | 43.537 | 0 | 0 | 0 | 0 | 0 | 0 | 0 |
| BRAMY20136210 | 0 | 0 | 0 | 0 | 0 | 29.482 | 0 | 0 | 0 | 0 | 0 | 0 | 0 |
| BRAMY20137560 | 0 | 0 | 0 | 0 | 0 | 19.026 | 0 | 0 | 0 | 0 | 0 | 0 | 0 |
| BRAMY20144620 | 0 | 0 | 0 | 0 | 0 | 49.688 | 0 | 0 | 0 | 50.312 | 0 | 0 | 0 |
| BRAMY20147540 | 0 | 0 | 0 | 5.965 | 5.061 | 4.234 | 5.603 | 12.854 | 9.924 | 27.152 | 10.427 | 0 | 12.427 |
| BRAMY20148130 | 0 | 0 | 0 | 0 | 0 | 19.441 | 0 | 0 | 0 | 0 | 0 | 0 | 0 |
| BRAMY20152110 | 0 | 0 | 0 | 0 | 0 | 13.088 | 0 | 0 | 0 | 0 | 0 | 0 | 0 |
| BRAMY20153110 | 0 | 0 | 0 | 0 | 0 | 100 | 0 | 0 | 0 | 0 | 0 | 0 | 0 |
| BRAMY20157820 | 0 | 0 | 0 | 0 | 0 | 7.891 | 0 | 0 | 0 | 0 | 0 | 0 | 0 |
| BRAMY20160700 | 0 | 0 | 0 | 0 | 0 | 100 | 0 | 0 | 0 | 0 | 0 | 0 | 0 |
| BRAMY20163250 | 0 | 0 | 0 | 0 | 0 | 3.796 | 11.304 | 0 | 0 | 3.844 | 0 | 0 | 4.178 |
| BRAMY20163270 | 0 | 0 | 0 | 0 | 0 | 100 | 0 | 0 | 0 | 0 | 0 | 0 | 0 |
| BRAMY20167060 | 0 | 0 | 0 | 0 | 0 | 4.994 | 0 | 0 | 0 | 0 | 0 | 0 | 0 |
| BRAMY20167710 | 0 | 0 | 0 | 0 | 0 | 100 | 0 | 0 | 0 | 0 | 0 | 0 | 0 |
| BRAMY20168920 | 0 | 0 | 0 | 10.306 | 0 | 14.63 | 14.52 | 0 | 0 | 44.442 | 0 | 0 | 16.102 |
| BRAMY20170140 | 0 | 0 | 0 | 0 | 0 | 100 | 0 | 0 | 0 | 0 | 0 | 0 | 0 |
| BRAMY20174550 | 0 | 0 | 0 | 0 | 0 | 100 | 0 | 0 | 0 | 0 | 0 | 0 | 0 |
| BRAMY20178640 | 0 | 0 | 0 | 0 | 0 | 13.922 | 0 | 0 | 0 | 14.097 | 51.427 | 0 | 0 |
| BRAMY20181220 | 0 | 0 | 0 | 0 | 0 | 12.783 | 0 | 0 | 0 | 0 | 0 | 0 | 0 |
| BRAMY20182730 | 0 | 0 | 0 | 0 | 0 | 100 | 0 | 0 | 0 | 0 | 0 | 0 | 0 |
| BRAMY20183080 | 0 | 0 | 0 | 0 | 0 | 100 | 0 | 0 | 0 | 0 | 0 | 0 | 0 |

[0434] TABLE 21

| | | | | | | | | | | | | | |
|---|---|---|---|---|---|---|---|---|---|---|---|---|---|
| BRAMY20184670 | 0 | 0 | 0 | 0 | 0 | 100 | 0 | 0 | 0 | 0 | 0 | 0 | 0 |
| BRAMY20195090 | 0 | 0 | 0 | 0 | 0 | 100 | 0 | 0 | 0 | 0 | 0 | 0 | 0 |
| BRAMY20204450 | 0 | 0 | 0 | 0 | 0 | 100 | 0 | 0 | 0 | 0 | 0 | 0 | 0 |
| BRAMY20205740 | 0 | 0 | 0 | 0 | 0 | 100 | 0 | 0 | 0 | 0 | 0 | 0 | 0 |
| BRAMY20210400 | 0 | 0 | 0 | 0 | 0 | 100 | 0 | 0 | 0 | 0 | 0 | 0 | 0 |
| BRAMY20211390 | 0 | 0 | 0 | 0 | 0 | 25.787 | 0 | 0 | 0 | 0 | 0 | 0 | 0 |
| BRAMY20211420 | 0 | 0 | 0 | 38.011 | 0 | 26.981 | 0 | 0 | 0 | 0 | 0 | 0 | 0 |
| BRAMY20213100 | 0 | 0 | 0 | 0 | 0 | 12.518 | 0 | 0 | 0 | 0 | 0 | 0 | 0 |
| BRAMY20215230 | 0 | 0 | 0 | 0 | 0 | 21.367 | 0 | 0 | 0 | 0 | 0 | 0 | 0 |
| BRAMY20217460 | 0 | 0 | 0 | 0 | 0 | 100 | 0 | 0 | 0 | 0 | 0 | 0 | 0 |
| BRAMY20218250 | 0 | 0 | 0 | 0 | 0 | 66.389 | 0 | 0 | 0 | 33.611 | 0 | 0 | 0 |
| BRAMY20218670 | 0 | 0 | 0 | 25.113 | 0 | 35.65 | 0 | 0 | 0 | 0 | 0 | 0 | 39.237 |
| BRAMY20229800 | 0 | 0 | 0 | 0 | 0 | 15.383 | 30.533 | 0 | 54.084 | 0 | 0 | 0 | 0 |
| BRAMY20229840 | 0 | 0 | 0 | 0 | 0 | 100 | 0 | 0 | 0 | 0 | 0 | 0 | 0 |
| BRAMY20230600 | 0 | 0 | 0 | 0 | 0 | 100 | 0 | 0 | 0 | 0 | 0 | 0 | 0 |
| BRAMY20231720 | 0 | 0 | 0 | 0 | 0 | 100 | 0 | 0 | 0 | 0 | 0 | 0 | 0 |
| BRAMY20240040 | 0 | 0 | 0 | 1.963 | 0 | 2.787 | 0 | 6.346 | 9.799 | 0 | 0 | 0 | 3.067 |
| BRAMY20245300 | 0 | 0 | 0 | 0 | 0 | 100 | 0 | 0 | 0 | 0 | 0 | 0 | 0 |
| BRAMY20247110 | 0 | 0 | 0 | 0 | 0 | 12.354 | 0 | 0 | 43.436 | 0 | 0 | 44.21 | 0 |
| BRAMY20247280 | 0 | 0 | 0 | 0 | 0 | 100 | 0 | 0 | 0 | 0 | 0 | 0 | 0 |
| BRAMY20248490 | 0 | 0 | 0 | 0 | 0 | 100 | 0 | 0 | 0 | 0 | 0 | 0 | 0 |
| BRAMY20250240 | 0 | 0 | 0 | 0 | 0 | 100 | 0 | 0 | 0 | 0 | 0 | 0 | 0 |
| BRAMY20250320 | 0 | 0 | 0 | 0 | 0 | 100 | 0 | 0 | 0 | 0 | 0 | 0 | 0 |
| BRAMY20252180 | 0 | 0 | 0 | 0 | 0 | 100 | 0 | 0 | 0 | 0 | 0 | 0 | 0 |
| BRAMY20252720 | 0 | 0 | 0 | 0 | 0 | 47.605 | 0 | 0 | 0 | 0 | 0 | 0 | 52.395 |
| BRAMY20260910 | 0 | 0 | 0 | 0 | 0 | 100 | 0 | 0 | 0 | 0 | 0 | 0 | 0 |
| BRAMY20261680 | 0 | 0 | 0 | 0 | 0 | 32.33 | 32.087 | 0 | 0 | 0 | 0 | 0 | 35.583 |
| BRAMY20266850 | 0 | 0 | 0 | 0 | 0 | 2.497 | 0 | 0 | 0 | 0 | 0 | 0 | 0 |
| BRAMY20267130 | 0 | 0 | 0 | 0 | 0 | 100 | 0 | 0 | 0 | 0 | 0 | 0 | 0 |
| BRAMY20268990 | 0 | 0 | 0 | 0 | 0 | 100 | 0 | 0 | 0 | 0 | 0 | 0 | 0 |
| BRAMY20270730 | 0 | 0 | 0 | 0 | 0 | 100 | 0 | 0 | 0 | 0 | 0 | 0 | 0 |
| BRAMY20271400 | 0 | 0 | 0 | 0 | 0 | 51.968 | 0 | 0 | 0 | 0 | 0 | 0 | 0 |
| BRAMY20273960 | 0 | 0 | 0 | 0 | 0 | 100 | 0 | 0 | 0 | 0 | 0 | 0 | 0 |
| BRAMY20277140 | 0 | 0 | 0 | 0 | 0 | 100 | 0 | 0 | 0 | 0 | 0 | 0 | 0 |
| BRAMY20277170 | 0 | 0 | 0 | 0 | 0 | 16.593 | 20.585 | 0 | 0 | 12.601 | 0 | 0 | 50.221 |
| BRAMY20280720 | 0 | 0 | 0 | 0 | 0 | 100 | 0 | 0 | 0 | 0 | 0 | 0 | 0 |
| BRAMY20284910 | 0 | 0 | 0 | 0 | 0 | 36.15 | 0 | 0 | 0 | 0 | 0 | 0 | 0 |

[0435] TABLE 22

| | | | | | | | | | | | | | |
|---|---|---|---|---|---|---|---|---|---|---|---|---|---|
| BRAMY20285160 | 0 | 0 | 0 | 0 | 0 | 3.974 | 0 | 0 | 0 | 0 | 14.68 | 0 | 0 |
| BRAMY20285930 | 0 | 0 | 0 | 0 | 0 | 100 | 0 | 0 | 0 | 0 | 0 | 0 | 0 |
| BRAMY20286820 | 0 | 0 | 0 | 0 | 0 | 21.396 | 0 | 0 | 0 | 0 | 0 | 0 | 0 |
| BRAWH20002320 | 0 | 0 | 0 | 0 | 0 | 0 | 100 | 0 | 0 | 0 | 0 | 0 | 0 |
| BRAWH20012390 | 0 | 0 | 0 | 0 | 0 | 0 | 7.296 | 0 | 0 | 0 | 27.156 | 0 | 8.091 |
| BRAWH20014920 | 0 | 0 | 0 | 0 | 0 | 0 | 100 | 0 | 0 | 0 | 0 | 0 | 0 |
| BRAWH20015350 | 0 | 0 | 0 | 0 | 5.352 | 6.965 | 1.975 | 15.859 | 5.247 | 10.075 | 16.539 | 14.243 | 10.951 |
| BRAWH20015890 | 0 | 0 | 0 | 0 | 0 | 0 | 100 | 0 | 0 | 0 | 0 | 0 | 0 |
| BRAWH20016660 | 0 | 0 | 0 | 0 | 0 | 0 | 100 | 0 | 0 | 0 | 0 | 0 | 0 |
| BRAWH20016860 | 0 | 0 | 0 | 0 | 0 | 0 | 100 | 0 | 0 | 0 | 0 | 0 | 0 |
| BRAWH20017010 | 0 | 0 | 0 | 0 | 0 | 0 | 100 | 0 | 0 | 0 | 0 | 0 | 0 |
| BRAWH20018730 | 0 | 0 | 0 | 0 | 0 | 0 | 100 | 0 | 0 | 0 | 0 | 0 | 0 |
| BRAWH20028110 | 0 | 0 | 0 | 0 | 31.162 | 17.379 | 8.624 | 0 | 0 | 17.598 | 0 | 0 | 9.564 |
| BRAWH20029630 | 0 | 0 | 0 | 8.469 | 0 | 0 | 11.932 | 0 | 0 | 0 | 0 | 0 | 0 |
| BRAWH20064050 | 0 | 0 | 0 | 0 | 0 | 0 | 12.977 | 0 | 0 | 13.24 | 0 | 0 | 0 |
| BRAWH20075700 | 0 | 0 | 0 | 0 | 0 | 0 | 100 | 0 | 0 | 0 | 0 | 0 | 0 |
| BRAWH20096780 | 0 | 0 | 0 | 0 | 0 | 0 | 21.269 | 0 | 0 | 0 | 0 | 0 | 0 |
| BRAWH20100690 | 0 | 0 | 0 | 0 | 0 | 0 | 100 | 0 | 0 | 0 | 0 | 0 | 0 |
| BRAWH20101360 | 0 | 0 | 0 | 0 | 0 | 26.605 | 26.404 | 0 | 0 | 0 | 0 | 0 | 0 |
| BRAWH20103180 | 0 | 0 | 0 | 0 | 0 | 0 | 100 | 0 | 0 | 0 | 0 | 0 | 0 |
| BRAWH20105840 | 0 | 0 | 0 | 0 | 0 | 0 | 30.356 | 69.644 | 0 | 0 | 0 | 0 | 0 |
| BRAWH20106180 | 0 | 0 | 0 | 0 | 0 | 0 | 100 | 0 | 0 | 0 | 0 | 0 | 0 |
| BRAWH20107540 | 0 | 0 | 0 | 7.94 | 0 | 0 | 11.186 | 0 | 0 | 0 | 0 | 40.334 | 0 |
| BRAWH20110660 | 0 | 0 | 0 | 0 | 0 | 0 | 21.178 | 0 | 0 | 0 | 78.822 | 0 | 0 |
| BRAWH20110790 | 0 | 0 | 0 | 0 | 0 | 0 | 100 | 0 | 0 | 0 | 0 | 0 | 0 |
| BRAWH20110960 | 0 | 0 | 0 | 0 | 0 | 0 | 54.53 | 0 | 0 | 0 | 0 | 0 | 0 |
| BRAWH20111550 | 0 | 0 | 0 | 0 | 0 | 0 | 100 | 0 | 0 | 0 | 0 | 0 | 0 |
| BRAWH20112940 | 0 | 0 | 0 | 0 | 0 | 0 | 100 | 0 | 0 | 0 | 0 | 0 | 0 |
| BRAWH20114000 | 0 | 0 | 0 | 0 | 0 | 0 | 100 | 0 | 0 | 0 | 0 | 0 | 0 |
| BRAWH20117950 | 0 | 0 | 0 | 0 | 0 | 0 | 100 | 0 | 0 | 0 | 0 | 0 | 0 |
| BRAWH20118230 | 0 | 0 | 0 | 0 | 0 | 0 | 21.626 | 0 | 0 | 0 | 0 | 0 | 0 |
| BRAWH20122580 | 0 | 0 | 0 | 0 | 0 | 0 | 100 | 0 | 0 | 0 | 0 | 0 | 0 |
| BRAWH20125380 | 0 | 0 | 0 | 0 | 0 | 0 | 10.145 | 0 | 0 | 0 | 18.88 | 0 | 0 |
| BRAWH20126190 | 0 | 0 | 0 | 0 | 0 | 0 | 100 | 0 | 0 | 0 | 0 | 0 | 0 |
| BRAWH20126980 | 0 | 0 | 0 | 0 | 0 | 57.958 | 19.174 | 0 | 0 | 0 | 0 | 0 | 0 |
| BRAWH20132190 | 0 | 0 | 0 | 0 | 35.004 | 9.761 | 19.375 | 0 | 0 | 0 | 0 | 0 | 0 |
| BRAWH20137480 | 0 | 0 | 0 | 0 | 0 | 8.068 | 2.669 | 6.123 | 9.455 | 2.723 | 9.934 | 0 | 2.96 |

[0436] TABLE 23

| | | | | | | | | | | | | | |
|---|---|---|---|---|---|---|---|---|---|---|---|---|---|
| BRAWH20138660 | 0 | 0 | 0 | 0 | 0 | 0 | 100 | 0 | 0 | 0 | 0 | 0 | 0 |
| BRAWH20139410 | 0 | 0 | 0 | 0 | 0 | 0 | 100 | 0 | 0 | 0 | 0 | 0 | 0 |
| BRAWH20142340 | 0 | 0 | 0 | 0 | 0 | 0 | 100 | 0 | 0 | 0 | 0 | 0 | 0 |
| BRAWH20147290 | 0 | 0 | 0 | 0 | 0 | 0 | 100 | 0 | 0 | 0 | 0 | 0 | 0 |
| BRAWH20149340 | 0 | 0 | 0 | 0 | 0 | 0 | 35.975 | 0 | 0 | 0 | 0 | 0 | 0 |
| BRAWH20155950 | 0 | 0 | 0 | 0 | 0 | 0 | 100 | 0 | 0 | 0 | 0 | 0 | 0 |
| BRAWH20158530 | 0 | 0 | 0 | 0 | 0 | 0 | 100 | 0 | 0 | 0 | 0 | 0 | 0 |
| BRAWH20160280 | 0 | 0 | 0 | 0 | 0 | 50.189 | 49.811 | 0 | 0 | 0 | 0 | 0 | 0 |
| BRAWH20162690 | 0 | 0 | 0 | 0.936 | 0 | 1.328 | 1.318 | 3.025 | 4.67 | 0 | 4.907 | 0 | 0 |
| BRAWH20166790 | 0 | 0 | 0 | 6.839 | 0 | 0 | 9.636 | 0 | 0 | 0 | 0 | 0 | 0 |
| BRAWH20171030 | 0 | 0 | 0 | 0 | 0 | 0 | 100 | 0 | 0 | 0 | 0 | 0 | 0 |
| BRAWH20173050 | 0 | 0 | 0 | 0 | 0 | 0 | 100 | 0 | 0 | 0 | 0 | 0 | 0 |
| BRAWH20182060 | 0 | 0 | 0 | 0 | 0 | 0 | 11.051 | 0 | 0 | 11.275 | 0 | 0 | 36.766 |
| BRAWH20185060 | 0 | 0 | 0 | 0 | 0 | 0 | 100 | 0 | 0 | 0 | 0 | 0 | 0 |
| BRCAN10001490 | 0 | 0 | 0 | 0 | 0 | 0 | 0 | 56.874 | 0 | 0 | 0 | 0 | 0 |
| BRCAN20003460 | 0 | 0 | 0 | 0 | 0 | 0 | 0 | 100 | 0 | 0 | 0 | 0 | 0 |
| BRCAN20006200 | 0 | 0 | 0 | 0 | 0 | 0 | 0 | 100 | 0 | 0 | 0 | 0 | 0 |
| BRCAN20006390 | 0 | 0 | 0 | 0 | 0 | 0 | 0 | 38.481 | 0 | 0 | 0 | 0 | 0 |
| BRCAN20054490 | 0 | 0 | 0 | 0 | 0 | 0 | 0 | 100 | 0 | 0 | 0 | 0 | 0 |
| BRCAN20060190 | 0 | 0 | 0 | 2.666 | 13.575 | 0 | 0 | 25.857 | 26.617 | 3.833 | 0 | 13.546 | 0 |
| BRCAN20064010 | 0 | 0 | 0 | 0 | 0 | 22.844 | 0 | 52.014 | 0 | 0 | 0 | 0 | 25.142 |
| BRCAN20071190 | 0 | 0 | 0 | 0 | 0 | 0 | 0 | 38.885 | 0 | 0 | 0 | 61.115 | 0 |
| BRCAN20091560 | 0 | 0 | 0 | 0 | 0 | 0 | 0 | 100 | 0 | 0 | 0 | 0 | 0 |
| BRCAN20103740 | 0 | 0 | 0 | 0 | 0 | 30.516 | 0 | 69.484 | 0 | 0 | 0 | 0 | 0 |
| BRCAN20124080 | 0 | 0 | 0 | 0 | 0 | 0 | 0 | 100 | 0 | 0 | 0 | 0 | 0 |
| BRCAN20126130 | 0 | 0 | 0 | 0 | 0 | 0 | 0 | 100 | 0 | 0 | 0 | 0 | 0 |
| BRCAN20143700 | 0 | 0 | 0 | 0 | 0 | 0 | 0 | 100 | 0 | 0 | 0 | 0 | 0 |
| BRCAN20147880 | 0 | 0 | 0 | 0 | 0 | 0 | 0 | 100 | 0 | 0 | 0 | 0 | 0 |
| BRCAN20216690 | 0 | 0 | 0 | 0 | 0 | 0 | 0 | 100 | 0 | 0 | 0 | 0 | 0 |
| BRCAN20224720 | 0 | 0 | 0 | 0 | 0 | 0 | 0 | 100 | 0 | 0 | 0 | 0 | 0 |
| BRCAN20237240 | 0 | 0 | 0 | 0 | 0 | 0 | 0 | 100 | 0 | 0 | 0 | 0 | 0 |
| BRCAN20263400 | 0 | 0 | 0 | 10.726 | 54.604 | 0 | 0 | 34.67 | 0 | 0 | 0 | 0 | 0 |
| BRCAN20273100 | 0 | 0 | 0 | 0 | 0 | 0 | 0 | 100 | 0 | 0 | 0 | 0 | 0 |
| BRCAN20273340 | 0 | 0 | 0 | 0 | 0 | 30.516 | 0 | 69.484 | 0 | 0 | 0 | 0 | 0 |
| BRCAN20273550 | 0 | 0 | 0 | 0 | 0 | 0 | 0 | 100 | 0 | 0 | 0 | 0 | 0 |
| BRCAN20275130 | 0 | 0 | 0 | 0 | 0 | 0 | 0 | 100 | 0 | 0 | 0 | 0 | 0 |
| BRCAN20279700 | 0 | 0 | 0 | 0 | 0 | 0 | 0 | 100 | 0 | 0 | 0 | 0 | 0 |

[0437] TABLE 24

| | | | | | | | | | | | | | |
|---|---|---|---|---|---|---|---|---|---|---|---|---|---|
| BRCAN20280210 | 0 | 0 | 0 | 0 | 0 | 0 | 0 | 100 | 0 | 0 | 0 | 0 | 0 |
| BRCAN20280400 | 0 | 0 | 0 | 0 | 0 | 0 | 0 | 60.666 | 0 | 0 | 0 | 0 | 0 |
| BRCAN20283190 | 0 | 0 | 0 | 0 | 0 | 0 | 0 | 29.858 | 0 | 0 | 48.439 | 0 | 0 |
| BRCAN20283380 | 0 | 0 | 0 | 0 | 0 | 0 | 0 | 100 | 0 | 0 | 0 | 0 | 0 |
| BRCAN20284600 | 0 | 0 | 0 | 0 | 0 | 0 | 0 | 100 | 0 | 0 | 0 | 0 | 0 |
| BRCAN20285450 | 0 | 0 | 0 | 0 | 0 | 0 | 0 | 38.885 | 0 | 0 | 0 | 61.115 | 0 |
| BRCOC10000870 | 0 | 0 | 0 | 0 | 0 | 0 | 0 | 0 | 100 | 0 | 0 | 0 | 0 |
| BRCOC20001860 | 0 | 0 | 0 | 4.222 | 0 | 0 | 0 | 0 | 10.537 | 0 | 0 | 0 | 0 |
| BRCOC20004040 | 0 | 0 | 0 | 0 | 0 | 0 | 0 | 0 | 100 | 0 | 0 | 0 | 0 |
| BRCOC20004870 | 0 | 0 | 0 | 0 | 0 | 0 | 0 | 0.665 | 1.026 | 0 | 0 | 0 | 0.643 |
| BRCOC20006370 | 0 | 0 | 0 | 0 | 0 | 0 | 0 | 0 | 100 | 0 | 0 | 0 | 0 |
| BRCOC20008160 | 0 | 0 | 0 | 0 | 0 | 0 | 22.014 | 0 | 77.986 | 0 | 0 | 0 | 0 |
| BRCOC20008500 | 0 | 0 | 0 | 0 | 0 | 0 | 0 | 0 | 100 | 0 | 0 | 0 | 0 |
| BRCOC20020850 | 0 | 0 | 0 | 0 | 0 | 0 | 0 | 0 | 100 | 0 | 0 | 0 | 0 |
| BRCOC20021550 | 0 | 0 | 0 | 0 | 0 | 0 | 0 | 0 | 75.977 | 0 | 0 | 0 | 0 |
| BRCOC20023230 | 0 | 0 | 0 | 0 | 0 | 0 | 0 | 0 | 100 | 0 | 0 | 0 | 0 |
| BRCOC20026640 | 0 | 0 | 0 | 0 | 0 | 0 | 0 | 0 | 100 | 0 | 0 | 0 | 0 |
| BRCOC20027510 | 0 | 0 | 0 | 0 | 0 | 0 | 0 | 0 | 100 | 0 | 0 | 0 | 0 |
| BRCOC20031000 | 0 | 0 | 0 | 16.691 | 0 | 0 | 0 | 0 | 83.309 | 0 | 0 | 0 | 0 |
| BRCOC20031250 | 0 | 0 | 0 | 0 | 0 | 0 | 0 | 0 | 20.131 | 0 | 0 | 0 | 0 |
| BRCOC20031870 | 0 | 0 | 0 | 0.558 | 0 | 0 | 0.786 | 1.804 | 2.786 | 0 | 5.854 | 2.836 | 0 |
| BRCOC20035130 | 0 | 0 | 0 | 0 | 0 | 0 | 0 | 0 | 100 | 0 | 0 | 0 | 0 |
| BRCOC20037320 | 0 | 0 | 0 | 0 | 0 | 0 | 0 | 0 | 75.977 | 0 | 0 | 0 | 0 |
| BRCOC20037400 | 0 | 0 | 0 | 0 | 0 | 0 | 0 | 0 | 100 | 0 | 0 | 0 | 0 |
| BRCOC20041750 | 0 | 0 | 0 | 0 | 0 | 0 | 0 | 0 | 34.465 | 0 | 0 | 0 | 0 |
| BRCOC20055420 | 0 | 0 | 0 | 0 | 0 | 17.805 | 0 | 0 | 62.599 | 0 | 0 | 0 | 19.596 |
| BRCOC20059510 | 0 | 0 | 0 | 0 | 0 | 0 | 0 | 0 | 100 | 0 | 0 | 0 | 0 |
| BRCOC20077690 | 0 | 0 | 0 | 0 | 0 | 0 | 0 | 0 | 100 | 0 | 0 | 0 | 0 |
| BRCOC20090520 | 0 | 0 | 0 | 0 | 0 | 0 | 0 | 0 | 100 | 0 | 0 | 0 | 0 |
| BRCOC20091960 | 0 | 0 | 0 | 0 | 0 | 0 | 0 | 0 | 100 | 0 | 0 | 0 | 0 |
| BRCOC20093800 | 0 | 0 | 0 | 0 | 0 | 0 | 0 | 0 | 100 | 0 | 0 | 0 | 0 |
| BRCOC20099370 | 0 | 0 | 0 | 0 | 0 | 16.189 | 0 | 0 | 56.917 | 16.392 | 0 | 0 | 0 |
| BRCOC20101230 | 0 | 0 | 0 | 0 | 0 | 0 | 0 | 2.513 | 3.881 | 0 | 0 | 0 | 0 |
| BRCOC20107300 | 0 | 0 | 0 | 0 | 0 | 0 | 0 | 0 | 38.292 | 0 | 0 | 0 | 11.987 |
| BRCOC20110100 | 0 | 0 | 0 | 0 | 0 | 0 | 0 | 0 | 100 | 0 | 0 | 0 | 0 |
| BRCOC20114180 | 0 | 0 | 0 | 0 | 0 | 0 | 0 | 0 | 100 | 0 | 0 | 0 | 0 |
| BRCOC20117690 | 0 | 0 | 0 | 0 | 0 | 0 | 0 | 0 | 100 | 0 | 0 | 0 | 0 |

[0438] TABLE 25

| | | | | | | | | | | | | | |
|---|---|---|---|---|---|---|---|---|---|---|---|---|---|
| BRCOC20119960 | 0 | 0 | 0 | 0 | 0 | 0 | 0 | 0 | 100 | 0 | 0 | 0 | 0 |
| BRCOC20121720 | 0 | 0 | 0 | 1.996 | 0 | 0 | 0 | 0 | 9.965 | 2.87 | 0 | 0 | 3.119 |
| BRCOC20122290 | 0 | 0 | 0 | 0 | 0 | 0 | 0 | 0 | 100 | 0 | 0 | 0 | 0 |
| BRCOC20128130 | 0 | 0 | 0 | 0 | 0 | 0 | 0 | 39.306 | 60.694 | 0 | 0 | 0 | 0 |
| BRCOC20134480 | 0 | 0 | 0 | 0 | 0 | 0 | 0 | 0 | 100 | 0 | 0 | 0 | 0 |
| BRCOC20135730 | 0 | 0 | 0 | 0 | 0 | 0 | 0 | 0 | 100 | 0 | 0 | 0 | 0 |
| BRCOC20136750 | 0 | 0 | 0 | 0 | 0 | 0 | 0 | 0 | 100 | 0 | 0 | 0 | 0 |
| BRCOC20144000 | 0 | 0 | 0 | 0 | 0 | 0 | 0 | 0 | 59.512 | 0 | 0 | 0 | 0 |
| BRCOC20147480 | 0 | 0 | 0 | 0 | 0 | 0 | 0 | 0 | 100 | 0 | 0 | 0 | 0 |
| BRCOC20148330 | 0 | 0 | 0 | 0 | 0 | 0 | 0 | 0 | 100 | 0 | 0 | 0 | 0 |
| BRCOC20155970 | 0 | 0 | 0 | 0 | 0 | 0 | 0 | 0 | 74.813 | 0 | 0 | 0 | 0 |
| BRCOC20158240 | 0 | 0 | 0 | 0 | 0 | 0 | 0 | 0 | 100 | 0 | 0 | 0 | 0 |
| BRCOC20176520 | 0 | 0 | 0 | 0 | 0 | 0 | 0 | 0 | 48.902 | 0 | 0 | 0 | 0 |
| BRCOC20178560 | 0 | 0 | 0 | 0 | 0 | 0 | 0 | 0 | 100 | 0 | 0 | 0 | 0 |
| BRHIP10001290 | 0 | 0 | 0 | 0 | 0 | 49.688 | 0 | 0 | 0 | 50.312 | 0 | 0 | 0 |
| BRHIP20000870 | 0 | 0 | 0 | 0 | 23.781 | 6.632 | 0 | 0 | 0 | 13.429 | 24.496 | 0 | 7.299 |
| BRHIP20001630 | 0 | 0 | 0 | 0 | 0 | 0 | 37.398 | 0 | 0 | 38.155 | 0 | 0 | 0 |
| BRHIP20096170 | 0 | 0 | 0 | 0 | 0 | 0 | 0 | 0 | 0 | 100 | 0 | 0 | 0 |
| BRHIP20096850 | 0 | 0 | 0 | 0 | 0 | 0 | 7.124 | 0 | 0 | 7.269 | 0 | 0 | 7.901 |
| BRHIP20103090 | 0 | 0 | 0 | 0 | 0 | 0 | 0 | 0 | 0 | 100 | 0 | 0 | 0 |
| BRHIP20104440 | 0 | 0 | 0 | 0 | 0 | 0 | 0 | 0 | 0 | 47.917 | 0 | 0 | 52.083 |
| BRHIP20105710 | 0 | 0 | 0 | 21.859 | 0 | 15.515 | 0 | 0 | 0 | 31.42 | 0 | 0 | 0 |
| BRHIP20106100 | 0 | 0 | 0 | 0 | 0 | 0 | 0 | 0 | 0 | 100 | 0 | 0 | 0 |
| BRHIP20107440 | 0 | 0 | 0 | 0 | 0 | 0 | 0 | 0 | 0 | 100 | 0 | 0 | 0 |
| BRHIP20111200 | 0 | 0 | 0 | 32.686 | 0 | 7.734 | 15.351 | 0 | 0 | 15.661 | 28.568 | 0 | 0 |
| BRHIP20115080 | 0 | 0 | 0 | 0 | 0 | 0 | 0 | 0 | 0 | 22.032 | 0 | 0 | 23.948 |
| BRHIP20115760 | 0 | 0 | 0 | 13.607 | 0 | 0 | 0 | 0 | 0 | 19.559 | 0 | 0 | 0 |
| BRHIP20118380 | 0 | 0 | 0 | 0 | 0 | 0 | 0 | 0 | 0 | 100 | 0 | 0 | 0 |
| BRHIP20118910 | 0 | 0 | 0 | 0 | 0 | 0 | 0 | 0 | 0 | 60.949 | 0 | 0 | 0 |
| BRHIP20119330 | 0 | 0 | 0 | 0 | 0 | 0 | 0 | 0 | 0 | 100 | 0 | 0 | 0 |
| BRHIP20121410 | 0 | 0 | 0 | 0 | 0 | 0 | 0 | 0 | 0 | 47.917 | 0 | 0 | 52.083 |
| BRHIP20123140 | 0 | 0 | 0 | 0 | 0 | 0 | 0 | 0 | 0 | 100 | 0 | 0 | 0 |
| BRHIP20129720 | 0 | 0 | 0 | 0 | 0 | 0 | 0 | 0 | 0 | 47.917 | 0 | 0 | 52.083 |
| BRHIP20132860 | 0 | 0 | 0 | 0 | 0 | 0 | 0 | 0 | 0 | 17.468 | 0 | 0 | 0 |
| BRHIP20135100 | 0 | 0 | 0 | 0 | 0 | 0 | 0 | 0 | 0 | 100 | 0 | 0 | 0 |
| BRHIP20137230 | 0 | 0 | 0 | 0 | 0 | 0 | 0 | 0 | 0 | 100 | 0 | 0 | 0 |
| BRHIP20139720 | 0 | 0 | 0 | 0 | 0 | 0 | 0 | 0 | 0 | 100 | 0 | 0 | 0 |

[0439] TABLE 26

| | | | | | | | | | | | | | |
|---|---|---|---|---|---|---|---|---|---|---|---|---|---|
| BRHIP20140630 | 0 | 0 | 0 | 0 | 0 | 0 | 0 | 0 | 0 | 36.967 | 0 | 0 | 0 |
| BRHIP20142850 | 0 | 0 | 0 | 0 | 0 | 0 | 0 | 0 | 0 | 100 | 0 | 0 | 0 |
| BRHIP20143730 | 0 | 0 | 0 | 0 | 0 | 0 | 0 | 0 | 0 | 34.432 | 0 | 0 | 37.426 |
| BRHIP20143860 | 0 | 0 | 0 | 0 | 0 | 0 | 0 | 0 | 0 | 55.026 | 0 | 0 | 0 |
| BRHIP20149540 | 0 | 0 | 0 | 0 | 0 | 0 | 0 | 0 | 0 | 100 | 0 | 0 | 0 |
| BRHIP20153560 | 0 | 0 | 0 | 0 | 0 | 0 | 0 | 0 | 0 | 100 | 0 | 0 | 0 |
| BRHIP20153600 | 0 | 0 | 0 | 0 | 0 | 0 | 0 | 0 | 0 | 100 | 0 | 0 | 0 |
| BRHIP20167880 | 0 | 0 | 0 | 0 | 0 | 0 | 0 | 0 | 0 | 100 | 0 | 0 | 0 |
| BRHIP20169680 | 0 | 0 | 0 | 0 | 0 | 0 | 0 | 0 | 0 | 100 | 0 | 0 | 0 |
| BRHIP20169900 | 0 | 0 | 0 | 0 | 0 | 0 | 0 | 0 | 0 | 100 | 0 | 0 | 0 |
| BRHIP20170100 | 0 | 0 | 0 | 0 | 0 | 0 | 0 | 0 | 0 | 14.025 | 0 | 0 | 0 |
| BRHIP20173150 | 0 | 0 | 0 | 0 | 0 | 0 | 0 | 0 | 0 | 100 | 0 | 0 | 0 |
| BRHIP20174040 | 0 | 0 | 0 | 0 | 0 | 0 | 0 | 0 | 0 | 100 | 0 | 0 | 0 |
| BRHIP20175420 | 0 | 0 | 0 | 0 | 0 | 0 | 0 | 0 | 0 | 100 | 0 | 0 | 0 |
| BRHIP20180140 | 0 | 0 | 0 | 0 | 0 | 0 | 0 | 0 | 0 | 100 | 0 | 0 | 0 |
| BRHIP20183690 | 0 | 0 | 0 | 0 | 0 | 0 | 0 | 0 | 0 | 100 | 0 | 0 | 0 |
| BRHIP20186120 | 0 | 0 | 0 | 0 | 0 | 0 | 0 | 0 | 0 | 100 | 0 | 0 | 0 |
| BRHIP20186500 | 0 | 0 | 0 | 0 | 0 | 0 | 0 | 0 | 0 | 100 | 0 | 0 | 0 |
| BRHIP20189980 | 0 | 0 | 0 | 0 | 0 | 0 | 0 | 0 | 0 | 100 | 0 | 0 | 0 |
| BRHIP20190070 | 0 | 0 | 0 | 0 | 0 | 0 | 0 | 0 | 0 | 100 | 0 | 0 | 0 |
| BRHIP20191490 | 0 | 0 | 0 | 0 | 0 | 0 | 0 | 0 | 0 | 11.267 | 0 | 0 | 0 |
| BRHIP20191770 | 0 | 0 | 0 | 0 | 0 | 0 | 0 | 0 | 0 | 100 | 0 | 0 | 0 |
| BRHIP20194940 | 0 | 0 | 0 | 25.807 | 0 | 0 | 0 | 0 | 0 | 74.193 | 0 | 0 | 0 |
| BRHIP20195890 | 0 | 0 | 0 | 0 | 0 | 0 | 0 | 0 | 0 | 100 | 0 | 0 | 0 |
| BRHIP20196410 | 0 | 0 | 0 | 0 | 0 | 0 | 0 | 0 | 0 | 100 | 0 | 0 | 0 |
| BRHIP20205090 | 0 | 0 | 0 | 0 | 0 | 0 | 0 | 0 | 0 | 19.104 | 0 | 0 | 0 |
| BRHIP20207430 | 0 | 0 | 0 | 0 | 0 | 0 | 0 | 0 | 0 | 100 | 0 | 0 | 0 |
| BRHIP20207990 | 0 | 0 | 0 | 3.592 | 0 | 15.298 | 5.061 | 0 | 0 | 36.143 | 0 | 0 | 5.612 |
| BRHIP20208420 | 0 | 0 | 0 | 0 | 0 | 0 | 0 | 0 | 0 | 100 | 0 | 0 | 0 |
| BRHIP20208590 | 0 | 0 | 0 | 0 | 0 | 0 | 0 | 0 | 0 | 100 | 0 | 0 | 0 |
| BRHIP20227080 | 0 | 0 | 0 | 0 | 0 | 0 | 0 | 0 | 0 | 100 | 0 | 0 | 0 |
| BRHIP20230710 | 0 | 0 | 0 | 0 | 0 | 49.688 | 0 | 0 | 0 | 50.312 | 0 | 0 | 0 |
| BRHIP20232290 | 0 | 0 | 0 | 0 | 0 | 0 | 0 | 0 | 0 | 15.312 | 0 | 0 | 0 |
| BRHIP20233090 | 0 | 0 | 0 | 8.28 | 0 | 0 | 11.666 | 0 | 0 | 23.804 | 0 | 0 | 0 |
| BRHIP20234380 | 0 | 0 | 0 | 0 | 0 | 0 | 0 | 0 | 0 | 26.026 | 0 | 0 | 0 |
| BRHIP20236950 | 0 | 0 | 0 | 0 | 0 | 0 | 0 | 0 | 0 | 36.438 | 0 | 0 | 0 |
| BRHIP20238600 | 0 | 0 | 0 | 0 | 0 | 0 | 0 | 0 | 0 | 100 | 0 | 0 | 0 |

[0440] TABLE 27

| | | | | | | | | | | | | | |
|---|---|---|---|---|---|---|---|---|---|---|---|---|---|
| BRHIP20238690 | 0 | 0 | 0 | 0 | 0 | 0 | 0 | 0 | 0 | 36.661 | 0 | 0 | 39.849 |
| BRHIP20240460 | 0 | 0 | 0 | 0 | 0 | 0 | 0 | 0 | 0 | 31.291 | 0 | 0 | 0 |
| BRHIP20243470 | 0 | 0 | 0 | 0 | 0 | 0 | 0 | 0 | 0 | 100 | 0 | 0 | 0 |
| BRHIP20249110 | 0 | 0 | 0 | 0 | 0 | 0 | 0 | 0 | 0 | 9.456 | 0 | 0 | 0 |
| BRHIP20252450 | 0 | 0 | 0 | 0 | 0 | 0 | 0 | 0 | 0 | 47.666 | 0 | 0 | 0 |
| BRHIP20253660 | 0 | 0 | 0 | 0 | 0 | 0 | 0 | 0 | 0 | 100 | 0 | 0 | 0 |
| BRHIP20277620 | 0 | 0 | 0 | 0 | 0 | 0 | 0 | 0 | 0 | 100 | 0 | 0 | 0 |
| BRHIP20283030 | 0 | 0 | 0 | 0 | 0 | 0 | 0 | 0 | 0 | 100 | 0 | 0 | 0 |
| BRHIP20284800 | 0 | 0 | 0 | 0 | 0 | 0 | 0 | 0 | 0 | 100 | 0 | 0 | 0 |
| BRHIP20285830 | 0 | 0 | 0 | 0 | 0 | 0 | 0 | 0 | 0 | 12.691 | 0 | 0 | 0 |
| BRHIP20285930 | 0 | 0 | 0 | 0 | 0 | 0 | 0 | 0 | 0 | 100 | 0 | 0 | 0 |
| BRHIP30004880 | 0 | 0 | 0 | 0 | 0 | 0 | 0 | 0 | 0 | 100 | 0 | 0 | 0 |
| BRSSN10000920 | 0 | 0 | 0 | 0 | 0 | 0 | 0 | 0 | 0 | 0 | 100 | 0 | 0 |
| BRSSN20013420 | 0 | 0 | 0 | 0 | 0 | 0 | 0 | 0 | 0 | 0 | 100 | 0 | 0 |
| BRSSN20014260 | 0 | 0 | 0 | 0 | 0 | 0 | 0 | 0 | 0 | 0 | 100 | 0 | 0 |
| BRSSN20015030 | 0 | 0 | 0 | 0 | 0 | 0 | 0 | 0 | 0 | 0 | 100 | 0 | 0 |
| BRSSN20015790 | 0 | 0 | 0 | 0 | 0 | 0 | 0 | 0 | 0 | 0 | 50.137 | 0 | 0 |
| BRSSN20018690 | 0 | 0 | 0 | 2.142 | 0 | 0 | 0 | 6.925 | 0 | 0 | 11.235 | 0 | 6.695 |
| BRSSN20028570 | 0 | 0 | 0 | 0 | 0 | 0 | 0 | 0 | 0 | 0 | 100 | 0 | 0 |
| BRSSN20038200 | 0 | 0 | 0 | 0 | 0 | 0 | 0 | 0 | 0 | 0 | 100 | 0 | 0 |
| BRSSN20038410 | 0 | 0 | 0 | 0 | 0 | 0 | 0 | 0 | 0 | 0 | 100 | 0 | 0 |
| BRSSN20039370 | 0 | 0 | 0 | 0 | 0 | 0 | 0 | 0 | 0 | 0 | 100 | 0 | 0 |
| BRSSN20043040 | 0 | 0 | 0 | 0 | 0 | 0 | 0 | 0 | 0 | 0 | 100 | 0 | 0 |
| BRSSN20046570 | 0 | 0 | 0 | 0 | 0 | 0 | 0 | 0 | 0 | 0 | 85.061 | 0 | 0 |
| BRSSN20046790 | 0 | 0 | 0 | 0 | 0 | 0 | 0 | 0 | 0 | 0 | 56.646 | 0 | 16.878 |
| BRSSN20046860 | 0 | 0 | 0 | 0 | 0 | 0 | 0 | 0 | 0 | 0 | 100 | 0 | 0 |
| BRSSN20066110 | 0 | 0 | 0 | 0 | 0 | 21.304 | 0 | 0 | 0 | 0 | 78.696 | 0 | 0 |
| BRSSN20097020 | 0 | 0 | 0 | 0 | 0 | 0 | 0 | 0 | 0 | 0 | 100 | 0 | 0 |
| BRSSN20101100 | 0 | 0 | 0 | 0 | 0 | 0 | 0 | 0 | 0 | 0 | 100 | 0 | 0 |
| BRSSN20105870 | 0 | 0 | 0 | 16.015 | 0 | 0 | 0 | 0 | 0 | 0 | 83.985 | 0 | 0 |
| BRSSN20105960 | 0 | 0 | 0 | 0 | 43.31 | 12.077 | 0 | 0 | 0 | 0 | 44.612 | 0 | 0 |
| BRSSN20108300 | 0 | 0 | 0 | 0 | 0 | 0 | 0 | 0 | 0 | 0 | 100 | 0 | 0 |
| BRSSN20120810 | 0 | 0 | 0 | 0 | 0 | 0 | 0 | 0 | 0 | 0 | 100 | 0 | 0 |
| BRSSN20121030 | 0 | 0 | 0 | 0 | 0 | 0 | 0 | 0 | 0 | 0 | 100 | 0 | 0 |
| BRSSN20137020 | 0 | 0 | 0 | 0 | 0 | 0 | 0 | 0 | 33.606 | 0 | 35.308 | 0 | 0 |
| BRSSN20142940 | 0 | 0 | 0 | 0 | 0 | 0 | 0 | 0 | 0 | 0 | 34.652 | 0 | 0 |
| BRSSN20146100 | 0 | 0 | 0 | 5.068 | 0 | 3.597 | 0 | 0 | 0 | 10.927 | 13.288 | 0 | 11.878 |

[0441] TABLE 28

| | | | | | | | | | | | | | |
|---|---|---|---|---|---|---|---|---|---|---|---|---|---|
| BRSSN20151990 | 0 | 0 | 0 | 16.015 | 0 | 0 | 0 | 0 | 0 | 0 | 83.985 | 0 | 0 |
| BRSSN20159070 | 0 | 0 | 0 | 0 | 0 | 0 | 0 | 0 | 0 | 0 | 100 | 0 | 0 |
| BRSSN20159820 | 0 | 0 | 0 | 0 | 0 | 0 | 0 | 0 | 0 | 0 | 60.467 | 0 | 0 |
| BRSSN20169050 | 0 | 0 | 0 | 0 | 0 | 0 | 0 | 0 | 0 | 0 | 100 | 0 | 0 |
| BRSSN20176820 | 0 | 0 | 0 | 0 | 0 | 0 | 0 | 0 | 0 | 0 | 100 | 0 | 0 |
| BRSSN20177570 | 0 | 0 | 0 | 0 | 0 | 0 | 0 | 0 | 0 | 0 | 100 | 0 | 0 |
| BRSSN20187310 | 0 | 0 | 0 | 0 | 0 | 0 | 0 | 0 | 0 | 0 | 100 | 0 | 0 |
| BRSTN20000580 | 0 | 0 | 0 | 3.424 | 0 | 2.431 | 0 | 33.205 | 25.637 | 0 | 8.978 | 17.396 | 0 |
| BRSTN20005360 | 0 | 0 | 0 | 0 | 0 | 0 | 0 | 0 | 0 | 22.055 | 0 | 77.945 | 0 |
| BRTHA20000570 | 0 | 0 | 0 | 0 | 0 | 0 | 0 | 0 | 0 | 0 | 0 | 0 | 48.181 |
| BRTHA20004740 | 0 | 0 | 0 | 0 | 0 | 0 | 0 | 0 | 0 | 0 | 0 | 0 | 100 |
| BRTHA20046290 | 0 | 0 | 0 | 0 | 0 | 0 | 0 | 0 | 0 | 0 | 0 | 0 | 100 |
| BRTHA20046390 | 0 | 0 | 0 | 0 | 0 | 0 | 0 | 0 | 0 | 0 | 0 | 0 | 100 |
| BRTHA20046420 | 0 | 0 | 0 | 0 | 0 | 0 | 0 | 0 | 0 | 0 | 0 | 0 | 100 |
| CD34C30001250 | 0 | 0 | 0 | 0 | 0 | 0 | 0 | 0 | 0 | 2.372 | 0 | 0 | 0 |
| CD34C30004240 | 0 | 0 | 0 | 0 | 0 | 0 | 0 | 0 | 0 | 2.336 | 0 | 0 | 0 |
| CTONG10000100 | 0 | 0 | 0 | 0 | 0 | 6.532 | 0 | 0 | 0 | 0 | 0 | 0 | 7.19 |
| CTONG20004690 | 0 | 0 | 0 | 0 | 0 | 0 | 0 | 0 | 10.345 | 0 | 0 | 0 | 0 |
| CTONG20027090 | 0 | 0 | 0 | 1.538 | 0 | 0 | 0 | 0 | 0 | 0 | 0 | 0 | 0 |
| CTONG20050280 | 0 | 0 | 0 | 14.575 | 0 | 0 | 6.845 | 0 | 0 | 0 | 0 | 0 | 7.591 |
| CTONG20076130 | 0 | 0 | 0 | 0 | 0 | 0 | 0 | 0 | 0 | 0 | 0 | 0 | 9.707 |
| CTONG20077790 | 0 | 0 | 0 | 0 | 0 | 0 | 0 | 0 | 0 | 0 | 0 | 0 | 37.32 |
| CTONG20095290 | 0 | 0 | 0 | 0 | 0 | 0 | 0 | 14.506 | 0 | 0 | 0 | 0 | 0 |
| CTONG20095340 | 0 | 0 | 0 | 16.375 | 0 | 0 | 0 | 0 | 0 | 23.537 | 28.623 | 0 | 8.528 |
| CTONG20099380 | 0 | 0 | 0 | 0 | 0 | 0 | 0 | 0 | 0 | 0 | 0 | 0 | 22.188 |
| CTONG20106520 | 0 | 0 | 0 | 0 | 0 | 0 | 0 | 0 | 0 | 0 | 0 | 0 | 35.648 |
| CTONG20118250 | 0 | 0 | 0 | 6.093 | 0 | 0 | 0 | 0 | 0 | 0 | 0 | 0 | 0 |
| CTONG20121010 | 0 | 0 | 0 | 0 | 0 | 15.907 | 0 | 0 | 0 | 0 | 0 | 0 | 0 |
| CTONG20127450 | 0 | 0 | 0 | 0 | 0 | 0 | 0 | 0 | 0 | 5.659 | 0 | 0 | 0 |
| CTONG20128470 | 0 | 0 | 0 | 1.222 | 0 | 0 | 3.444 | 0 | 0 | 0 | 0 | 0 | 1.91 |
| CTONG20141650 | 0 | 0 | 0 | 0 | 0 | 0 | 0 | 0 | 0 | 0 | 0 | 0 | 5.339 |
| CTONG20143690 | 0 | 0 | 0 | 2.954 | 0 | 0 | 0 | 0 | 0 | 4.246 | 0 | 0 | 0 |
| CTONG20153300 | 0 | 0 | 0 | 0 | 0 | 0 | 28.439 | 0 | 0 | 0 | 0 | 0 | 0 |
| CTONG20155180 | 0 | 0 | 0 | 0 | 0 | 0 | 26.559 | 0 | 0 | 0 | 0 | 0 | 0 |
| CTONG20158150 | 0 | 0 | 0 | 6.244 | 0 | 0 | 8.797 | 0 | 0 | 0 | 0 | 0 | 0 |
| CTONG20161850 | 0 | 0 | 0 | 3.69 | 0 | 2.619 | 0 | 0 | 0 | 0 | 0 | 0 | 0 |
| CTONG20164990 | 0 | 0 | 0 | 0 | 0 | 0 | 34.934 | 0 | 0 | 0 | 0 | 0 | 0 |

[0442] TABLE 29

| | | | | | | | | | | | | | |
|---|---|---|---|---|---|---|---|---|---|---|---|---|---|
| CTONG20186320 | 0 | 0 | 0 | 5.677 | 0 | 0 | 0 | 0 | 0 | 0 | 0 | 0 | 0 |
| D30ST10002700 | 0 | 0 | 0 | 0 | 0 | 7.81 | 0 | 0 | 9.153 | 0 | 0 | 0 | 0 |
| D60ST20003580 | 0 | 0 | 0 | 0 | 0 | 1.432 | 0 | 0 | 0 | 0 | 0 | 0 | 1.576 |
| D90ST20000310 | 0 | 0 | 0 | 0 | 0 | 0 | 0 | 0 | 16.736 | 0 | 0 | 0 | 0 |
| D90ST20035800 | 0 | 0 | 0 | 0 | 0 | 6.953 | 0 | 0 | 0 | 0 | 0 | 0 | 0 |
| DFNES20010910 | 0 | 0 | 0 | 0 | 0 | 0 | 0 | 19.689 | 0 | 0 | 0 | 0 | 0 |
| DFNES20071130 | 0 | 0 | 0 | 0 | 0 | 0 | 0 | 0 | 0 | 0 | 0 | 0 | 7.411 |
| HCHON20002260 | 0 | 0 | 0 | 1.431 | 0 | 0 | 0.403 | 0.925 | 2.857 | 0.411 | 0 | 1.454 | 0 |
| HCHON20003220 | 0 | 0 | 0 | 0 | 0 | 0 | 10.98 | 0 | 0 | 0 | 0 | 0 | 0 |
| HCHON20010990 | 0 | 0 | 0 | 0 | 0 | 0 | 0 | 0 | 0 | 2.783 | 0 | 0 | 3.025 |
| HCHON20015350 | 0 | 0 | 0 | 0 | 0 | 0 | 18.444 | 0 | 0 | 0 | 0 | 0 | 0 |
| HCHON20022470 | 0 | 0 | 0 | 1.993 | 10.144 | 0 | 5.615 | 0 | 9.945 | 2.864 | 0 | 0 | 9.34 |
| HCHON20067220 | 0 | 0 | 0 | 0 | 0 | 0 | 0 | 0 | 35.892 | 0 | 0 | 0 | 0 |
| HCHON20067700 | 0 | 0 | 0 | 0 | 0 | 0 | 2.822 | 0 | 0 | 0 | 0 | 0 | 0 |
| HEART20003060 | 0 | 0 | 0 | 9.616 | 0 | 0 | 0 | 0 | 0 | 0 | 0 | 0 | 0 |
| HEART20005410 | 0 | 0 | 0 | 0 | 0 | 0 | 0 | 3.07 | 4.74 | 0 | 0 | 0 | 0 |
| HEART20061950 | 0 | 0 | 0 | 0 | 0 | 0 | 0 | 0 | 0 | 9.669 | 0 | 0 | 0 |
| HEART20090000 | 0 | 0 | 0 | 7.336 | 0 | 0 | 0 | 23.712 | 0 | 0 | 0 | 0 | 0 |
| HHDPC10000650 | 0 | 0 | 0 | 0 | 0 | 0 | 0 | 0 | 0 | 27.988 | 0 | 0 | 0 |
| HHDPC20057940 | 0 | 0 | 0 | 0 | 0 | 8.015 | 0 | 0 | 0 | 8.116 | 0 | 0 | 8.821 |
| HLUNG20033780 | 0 | 0 | 0 | 6.571 | 0 | 0 | 0 | 0 | 0 | 0 | 0 | 0 | 0 |
| KIDNE20011170 | 0 | 0 | 0 | 0 | 0 | 0 | 22.29 | 0 | 0 | 0 | 0 | 0 | 0 |
| KIDNE20027250 | 0 | 0 | 0 | 7.303 | 0 | 0 | 10.289 | 23.605 | 0 | 0 | 0 | 0 | 11.41 |
| KIDNE20104300 | 0 | 0 | 0 | 0 | 0 | 0 | 0 | 21.878 | 0 | 0 | 0 | 0 | 10.575 |
| KIDNE20107500 | 0 | 0 | 0 | 0 | 0 | 0 | 0 | 0 | 0 | 0 | 0 | 0 | 11.811 |
| KIDNE20122910 | 0 | 0 | 0 | 16.915 | 0 | 0 | 0 | 0 | 0 | 0 | 0 | 0 | 0 |
| KIDNE20127100 | 0 | 0 | 0 | 0 | 0 | 0 | 0 | 0 | 0 | 0 | 0 | 0 | 10.501 |
| KIDNE20180710 | 0 | 0 | 0 | 0 | 50.895 | 0 | 0 | 0 | 0 | 0 | 0 | 0 | 0 |
| LIVER10001260 | 0 | 0 | 0 | 0 | 0 | 0 | 0 | 0 | 0 | 0 | 28.534 | 0 | 0 |
| LIVER20064100 | 0 | 0 | 0 | 0 | 0 | 0 | 0 | 0 | 0 | 0 | 0 | 0 | 11.342 |
| LIVER20087510 | 0 | 0 | 0 | 0 | 0 | 0 | 0 | 0 | 0 | 0 | 0 | 0 | 9.629 |
| MAMGL10000830 | 0 | 0 | 0 | 0.206 | 0 | 0 | 0 | 0 | 0 | 0.296 | 0 | 0 | 0.321 |
| MESAN20031900 | 0 | 0 | 0 | 0 | 0 | 0 | 0 | 0 | 0 | 0 | 0 | 0 | 19.624 |
| MESAN20036460 | 0 | 0 | 0 | 0 | 0 | 0 | 0 | 0 | 0 | 0 | 0 | 0 | 23.021 |
| MESAN20106640 | 0 | 0 | 0 | 6.16 | 0 | 0 | 0 | 19.91 | 0 | 0 | 0 | 0 | 9.624 |
| MESAN20164090 | 0 | 0 | 0 | 0 | 0 | 0 | 0 | 38.222 | 0 | 0 | 0 | 0 | 0 |
| NOVAR10000150 | 0 | 0 | 0 | 0 | 0 | 0 | 0 | 0 | 10.757 | 0 | 0 | 0 | 0 |

[0443] TABLE 30

| | | | | | | | | | | | | | |
|---|---|---|---|---|---|---|---|---|---|---|---|---|---|
| NOVAR20000380 | 0 | 0 | 0 | 3.968 | 15.711 | 0.626 | 1.242 | 4.275 | 6.602 | 0 | 9.248 | 17.918 | 0 |
| NT2NE20010400 | 0 | 0 | 0 | 11.003 | 0 | 15.621 | 0 | 0 | 0 | 0 | 0 | 0 | 17.192 |
| NT2NE20010490 | 0 | 0 | 0 | 0 | 0 | 0 | 0 | 0 | 0 | 0 | 0 | 31.686 | 0 |
| NT2NE20021620 | 0 | 0 | 0 | 0 | 0 | 0 | 0 | 0 | 0 | 0 | 45.501 | 0 | 0 |
| NT2NE20122430 | 0 | 0 | 0 | 0 | 0 | 0 | 0 | 0 | 0 | 0 | 0 | 0 | 23.43 |
| NT2NE20125050 | 0 | 0 | 0 | 13.014 | 0 | 0 | 0 | 0 | 0 | 0 | 0 | 0 | 0 |
| NT2NE20174920 | 0 | 0 | 0 | 0 | 0 | 0 | 0 | 0 | 0 | 0 | 0 | 0 | 18.714 |
| NT2RI20001330 | 0 | 0 | 0 | 1.819 | 0 | 0 | 0 | 0 | 0 | 0 | 0 | 0 | 0 |
| NT2RI20023590 | 0 | 0 | 0 | 0 | 0 | 0 | 8.23 | 0 | 0 | 0 | 0 | 0 | 0 |
| NT2RI20041880 | 0 | 0 | 0 | 0 | 0 | 0 | 0 | 0 | 0 | 0 | 0 | 10.353 | 0 |
| NT2RI20046080 | 0 | 0 | 0 | 0 | 0 | 0 | 0 | 8.488 | 0 | 0 | 0 | 0 | |
| NT2RI20216250 | 0 | 0 | 0 | 0 | 0 | 0 | 0 | 0 | 0 | 19.442 | 0 | 0 | 0 |
| NT2RI20252550 | 0 | 0 | 0 | 0 | 0 | 0 | 0 | 0 | 0 | 0 | 0 | 0 | 37.898 |
| NT2RP60000770 | 0 | 0 | 0 | 0 | 0 | 0 | 0 | 0 | 0 | 0 | 0 | 0 | 7.128 |
| NT2RP70045590 | 0 | 0 | 0 | 0 | 0 | 0 | 0 | 0 | 0 | 0 | 0 | 0 | 9.452 |
| NT2RP70063950 | 0 | 0 | 0 | 0 | 0 | 0 | 0 | 0 | 0 | 17.468 | 0 | 0 | 0 |
| NT2RP70195430 | 0 | 0 | 0 | 0 | 38.221 | 0 | 0 | 0 | 0 | 10.792 | 0 | 0 | 0 |
| NT2RP70198350 | 0 | 0 | 0 | 0 | 0 | 0 | 1.042 | 0 | 0 | 0 | 0 | 3.758 | 0 |
| NTONG20028070 | 0 | 0 | 0 | 0 | 0 | 0 | 0 | 0 | 0 | 0 | 0 | 0 | 13.079 |
| NTON620046140 | 0 | 0 | 0 | 0 | 0 | 0 | 0 | 0 | 0 | 0 | 0 | 0 | 6.567 |
| NTONG20064840 | 0 | 0 | 0 | 3.068 | 0 | 0 | 0 | 0 | 0 | 0 | 0 | 0 | 0 |
| NTONG20067830 | 0 | 0 | 0 | 0 | 0 | 2.853 | 0 | 0 | 0 | 0 | 0 | 0 | 0 |
| NTONG20077560 | 0 | 0 | 0 | 4.791 | 0 | 0 | 0 | 0 | 0 | 0 | 0 | 0 | 0 |
| PANCR10000910 | 0 | 0 | 0 | 0.214 | 0 | 0 | 0 | 0 | 0 | 0 | 0 | 0 | 0 |
| PEBLM20024550 | 0 | 0 | 0 | 0 | 0 | 0 | 0 | 0 | 0 | 0 | 33.118 | 0 | 0 |
| PEBLM20052820 | 0 | 0 | 0 | 0 | 0 | 11.82 | 0 | 0 | 0 | 0 | 0 | 0 | 0 |
| PEBLM20074370 | 0 | 0 | 0 | 0 | 21.543 | 0 | 0 | 0 | 0 | 0 | 0 | 0 | 0 |
| PERIC20004780 | 0 | 0 | 0 | 7.727 | 0 | 0 | 0 | 0 | 0 | 0 | 0 | 0 | 0 |
| PLACE50000660 | 0 | 0 | 0 | 0 | 0 | 18.438 | 0 | 0 | 0 | 0 | 0 | 32.991 | 0 |
| PLACE60079250 | 0 | 0 | 0 | 0 | 0 | 0 | 0 | 23.248 | 0 | 0 | 0 | 0 | 0 |
| PLACE60136720 | 0 | 0 | 0 | 0 | 0 | 27.825 | 0 | 0 | 0 | 0 | 0 | 0 | 0 |
| PLACE60138830 | 0 | 0 | 0 | 0 | 0 | 0 | 0 | 0 | 0 | 0 | 0 | 0 | 38.39 |
| PROST20005670 | 0 | 0 | 0 | 0 | 0 | 14.432 | 0 | 0 | 0 | 0 | 0 | 0 | 0 |
| PROST20050670 | 0 | 0 | 0 | 11.45 | 0 | 0 | 0 | 0 | 0 | 0 | 0 | 0 | 17.889 |
| PROST20107820 | 0 | 0 | 0 | 0 | 0 | 0 | 0.243 | 0 | 0 | 0 | 0 | 0 | 0 |
| PROST20111050 | 0 | 0 | 0 | 25.26 | 0 | 0 | 0 | 0 | 0 | 0 | 0 | 0 | 0 |
| PR0ST20116600 | 0 | 0 | 0 | 16.676 | 0 | 0 | 0 | 0 | 0 | 0 | 0 | 0 | 0 |

[0444] TABLE 31

| | | | | | | | | | | | | | |
|---|---|---|---|---|---|---|---|---|---|---|---|---|---|
| PROST20120160 | 0 | 0 | 0 | 0 | 0 | 22.126 | 0 | 0 | 0 | 0 | 0 | 0 | 0 |
| PROST20123530 | 0 | 0 | 0 | 0 | 0 | 0 | 0 | 0 | 0 | 0 | 0 | 33.893 | 0 |
| PROST20161950 | 0 | 0 | 0 | 0 | 0 | 0 | 0 | 0 | 0 | 0 | 0 | 21.086 | 0 |
| PROST20171280 | 0 | 0 | 0 | 0 | 0 | 8.119 | 0 | 0 | 0 | 0 | 0 | 0 | 0 |
| PROST20175290 | 0 | 0 | 0 | 1.802 | 0 | 0 | 0 | 0 | 0 | 0 | 0 | 0 | 2.815 |
| PROST20185830 | 0 | 0 | 0 | 0 | 0 | 0 | 0 | 0 | 0 | 0 | 0 | 33.325 | 0 |
| PROST20191640 | 0 | 0 | 0 | 0 | 0 | 0 | 3.687 | 0 | 0 | 0 | 0 | 0 | 0 |
| PUAEN20015860 | 0 | 0 | 0 | 2.027 | 0 | 0 | 0 | 0 | 0 | 2.913 | 0 | 0 | 0 |
| PUAEN20030180 | 0 | 0 | 0 | 0 | 0 | 0 | 0 | 0 | 0 | 0 | 0 | 12.086 | 3.717 |
| PUAEN20044000 | 0 | 0 | 0 | 0 | 0 | 7.259 | 0 | 0 | 0 | 0 | 0 | 0 | 0 |
| PUAEN20078980 | 0 | 0 | 0 | 0 | 39.038 | 0 | 0 | 0 | 0 | 0 | 0 | 0 | 0 |
| PUAEN20085150 | 0 | 0 | 0 | 13.781 | 0 | 0 | 0 | 0 | 0 | 9.905 | 0 | 0 | 21.533 |
| PUAEN2010B240 | 0 | 0 | 0 | 11.155 | 0 | 26.393 | 5.239 | 0 | 0 | 16.034 | 0 | 0 | 11.619 |
| SKMUS20012010 | 0 | 0 | 0 | 0 | 0 | 1.795 | 0 | 0 | 0 | 0 | 0 | 0 | 0 |
| SKNSH20062340 | 0 | 0 | 0 | 0 | 0 | 3.527 | 0 | 0 | 0 | 0 | 0 | 0 | 0 |
| SMINT20013480 | 0 | 0 | 0 | 0 | 0 | 0 | 0 | 0 | 32.864 | 0 | 0 | 0 | 0 |
| SMINT20042990 | 0 | 0 | 0 | 6.406 | 0 | 0 | 0 | 0 | 0 | 0 | 0 | 0 | 0 |
| SMINT20053300 | 0 | 0 | 0 | 0 | 0 | 0 | 0 | 0 | 0 | 0 | 51.332 | 0 | 0 |
| SMINT20076470 | 0 | 0 | 0 | 0 | 0 | 22.212 | 0 | 0 | 0 | 0 | 0 | 0 | 0 |
| SMINT20092330 | 0 | 0 | 0 | 16.746 | 0 | 0 | 0 | 0 | 0 | 0 | 0 | 0 | 0 |
| SMINT20101440 | 0 | 0 | 0 | 0 | 0 | 0 | 0 | 0 | 0 | 0 | 0 | 0 | 23.912 |
| SMINT20121220 | 0 | 0 | 0 | 0 | 0 | 0 | 0 | 0 | 12.384 | 0 | 0 | 0 | 3.877 |
| SMINT20121950 | 0 | 0 | 0 | 16.746 | 0 | 0 | 0 | 0 | 0 | 0 | 0 | 0 | 0 |
| SMINT20122910 | 0 | 0 | 0 | 6.546 | 0 | 0 | 0 | 0 | 0 | 0 | 0 | 0 | 0 |
| SMINT20130320 | 0 | 0 | 0 | 0 | 0 | 12.051 | 0 | 0 | 0 | 0 | 0 | 0 | 0 |
| SMINT20131810 | 0 | 0 | 0 | 0 | 0 | 22.212 | 0 | 0 | 0 | 0 | 0 | 0 | 0 |
| SMINT20144800 | 0 | 0 | 0 | 0 | 0 | 0 | 0 | 0 | 5.628 | 0 | 5.913 | 0 | 0 |
| SMINT20163960 | 0 | 0 | 0 | 0 | 0 | 0 | 0 | 0 | 50.098 | 0 | 0 | 0 | 0 |
| SPLEN20002220 | 0 | 0 | 0 | 0 | 0 | 0 | 12.214 | 0 | 0 | 0 | 0 | 0 | 0 |
| SPLEN20008740 | 0 | 0 | 0 | 0 | 1.761 | 0 | 0.487 | 0 | 0 | 0 | 0 | 0 | 0 |
| SPLEN20011410 | 0 | 0 | 0 | 0.67 | 0 | 0 | 0 | 0 | 0 | 0.963 | 0 | 0 | 2.094 |
| SPLEN20016260 | 0 | 0 | 0 | 0 | 0 | 0 | 0 | 0 | 0 | 0 | 0 | 67.455 | 0 |
| SPLEN20027440 | 0 | 0 | 0 | 0 | 0 | 0 | 2.23 | 0 | 7.901 | 0 | 0 | 0 | |
| SPLEN20029310 | 0 | 0 | 0 | 0 | 0 | 0 | 4.078 | 0 | 0 | 0 | 0 | 0 | 0 |
| SPLEN20033960 | 0 | 0 | 0 | 0 | 0 | 0 | 0 | 0 | 0 | 0 | 0 | 67.455 | 0 |
| SPLEN20054290 | 0 | 0 | 0 | 5.201 | 0 | 0 | 0 | 0 | 0 | 3.738 | 0 | 0 | 4.063 |
| SPLEN20126190 | 0 | 0 | 0 | 0 | 0 | 0 | 36.501 | 0 | 0 | 0 | 0 | 0 | 0 |

[0445] TABLE 32

| | | | | | | | | | | | | | |
|---|---|---|---|---|---|---|---|---|---|---|---|---|---|
| SPLEN20128000 | 0 | 0 | 0 | 0 | 0 | 0 | 0 | 0.784 | 0 | 0 | 0 | 0 | 0.379 |
| SPLEN20145720 | 0 | 0 | 0 | 0 | 0 | 0 | 0 | 0 | 22.047 | 0 | 0 | 0 | 6.902 |
| SPLEN20146450 | 0 | 0 | 0 | 0 | 0 | 0 | 0 | 0 | 0 | 0 | 68.148 | 0 | 0 |
| SPLEN20147110 | 0 | 0 | 0 | 0 | 0 | 0 | 2.652 | 0 | 0 | 0 | 0 | 0 | 0 |
| SPLEN20149110 | 0 | 0 | 0 | 0.749 | 0 | 0 | 0 | 0 | 0 | 0 | 0 | 0 | 2.34 |
| SPLEN20157880 | 0 | 0 | 0 | 3.436 | 0 | 0 | 0 | 0 | 0 | 0 | 0 | 0 | 5.368 |
| SPLEN20158900 | 0 | 0 | 0 | 28.977 | 0 | 0 | 0 | 0 | 0 | 0 | 0 | 0 | 0 |
| SPLEN20171210 | 0 | 0 | 0 | 0 | 0 | 15.624 | 7.753 | 0 | 0 | 0 | 0 | 0 | 8.598 |
| SPLEN20179180 | 0 | 0 | 0 | 0 | 0 | 0 | 0 | 0 | 3.23 | 0 | 0 | 0 | 0 |
| SPLEN20186430 | 0 | 0 | 0 | 0 | 0 | 0 | 36.501 | 0 | 0 | 0 | 0 | 0 | 0 |
| SPLEN20204170 | 0 | 0 | 0 | 9.907 | 0 | 0 | 0 | 0 | 0 | 0 | 0 | 50.331 | 15.479 |
| SPLEN20212730 | 0 | 0 | 0 | 0 | 0 | 0 | 14.747 | 0 | 0 | 0 | 0 | 0 | 16.354 |
| SPLEN20214580 | 0 | 0 | 0 | 0 | 0 | 0 | 0 | 0 | 0 | 0 | 0 | 0 | 38.93 |
| SPLEN20250390 | 0 | 0 | 0 | 28.977 | 0 | 0 | 0 | 0 | 0 | 0 | 0 | 0 | 0 |
| STOMA20051200 | 0 | 0 | 0 | 0 | 0 | 0 | 0 | 0 | 0 | 0 | 0 | 0 | 14.012 |
| STOMA20062290 | 0 | 0 | 0 | 0 | 0 | 0 | 6.012 | 0 | 0 | 0 | 0 | 0 | 0 |
| STOMA20092890 | 0 | 0 | 0 | 4.072 | 0 | 0 | 5.737 | 0 | 0 | 0 | 0 | 0 | 0 |
| SYNOV20003970 | 0 | 0 | 0 | 0 | 0 | 0 | 0 | 0 | 0 | 48.614 | 0 | 0 | 0 |
| TESOP20005270 | 0 | 0 | 0 | 0 | 0 | 0 | 0 | 0 | 0 | 0 | 0 | 0 | 11.444 |
| TESTI10000940 | 0 | 0 | 0 | 0 | 0 | 0 | 0 | 22.629 | 0 | 0 | 0 | 0 | 0 |
| TESTI20001720 | 0 | 0 | 0 | 0 | 0 | 0 | 0 | 0 | 0 | 0 | 0 | 0 | 9.487 |
| TESTI20002720 | 0 | 0 | 0 | 6.872 | 0 | 0 | 0 | 0 | 0 | 0 | 0 | 0 | 0 |
| TESTI20004890 | 0 | 0 | 0 | 0 | 0 | 0 | 0 | 0 | 0 | 0 | 0 | 57.966 | 0 |
| TESTI20011200 | 0 | 0 | 0 | 0 | 0 | 0 | 0 | 0 | 0 | 0.986 | 0 | 0 | 0 |
| TESTI20035960 | 0 | 0 | 0 | 0 | 0 | 0 | 0 | 0 | 14.759 | 0 | 0 | 0 | 0 |
| TESTI20037560 | 0 | 0 | 0 | 0 | 0 | 0 | 0 | 0 | 0 | 0 | 0 | 0 | 11.634 |
| TESTI20044310 | 0 | 0 | 0 | 0 | 0 | 0 | 8.365 | 0 | 0 | 0 | 0 | 0 | 0 |
| TESTI20061110 | 0 | 0 | 0 | 14.633 | 0 | 0 | 0 | 47.3 | 0 | 0 | 0 | 0 | 0 |
| TESTI20063830 | 0 | 0 | 0 | 0 | 0 | 4.084 | 0 | 0 | 0 | 4.135 | 0 | 0 | 0 |
| TESTI20086210 | 0 | 0 | 0 | 0 | 0 | 0 | 0 | 0 | 35.791 | 0 | 0 | 0 | 0 |
| TESTI20152460 | 0 | 0 | 0 | 8.403 | 0 | 0 | 0 | 0 | 0 | 0 | 0 | 0 | 0 |
| TESTI20168960 | 0 | 0 | 0 | 0 | 0 | 0 | 0 | 0 | 0 | 43.832 | 0 | 0 | 0 |
| TESTI20170350 | 0 | 0 | 0 | 29.776 | 0 | 0 | 0 | 0 | 0 | 42.801 | 0 | 0 | 0 |
| TESTI20208400 | 0 | 0 | 0 | 11.599 | 0 | 0 | 0 | 0 | 0 | 0 | 0 | 0 | 0 |
| TESTI20213580 | 0 | 0 | 0 | 0 | 0 | 0 | 0 | 0 | 0 | 0 | 0 | 0 | 37.524 |
| TESTI20214250 | 0 | 0 | 0 | 1.222 | 0 | 0 | 1.722 | 0 | 0 | 0 | 0 | 0 | 1.909 |
| TESTI20254220 | 0 | 0 | 0 | 1.762 | 0 | 0 | 0 | 0 | 0 | 0 | 0 | 0 | 0 |

[0446] TABLE 33

| | | | | | | | | | | | | | |
|---|---|---|---|---|---|---|---|---|---|---|---|---|---|
| TESTI20258460 | 0 | 0 | 0 | 43.347 | 0 | 0 | 0 | 0 | 0 | 20.77 | 0 | 0 | 22.576 |
| TESTI20330310 | 0 | 0 | 0 | 0 | 0 | 0 | 0 | 0 | 0 | 0 | 0 | 0 | 34.12 |
| TESTI20334410 | 0 | 0 | 0 | 0 | 0 | 0 | 0 | 0 | 0 | 0 | 0 | 0 | 2.434 |
| TESTI20366910 | 0 | 0 | 0 | 0 | 0 | 0 | 0 | 0 | 0 | 0 | 0 | 84.653 | 0 |
| TESTI20391770 | 0 | 0 | 0 | 5.883 | 0 | 0 | 16.578 | 0 | 0 | 21.141 | 0 | 0 | 18.384 |
| TESTI20432750 | 0 | 0 | 0 | 0 | 31.972 | 0 | 0 | 0 | 0 | 0 | 0 | 0 | 0 |
| TESTI20455620 | 0 | 0 | 0 | 0 | 0 | 0 | 0 | 0 | 0 | 0 | 0 | 84.653 | 0 |
| THYMU20000570 | 0 | 0 | 0 | 0 | 0 | 0 | 0 | 0 | 0 | 0 | 0 | 0 | 1.504 |
| THYMU20058070 | 0 | 0 | 0 | 45.981 | 0 | 0 | 0 | 0 | 0 | 0 | 0 | 0 | 0 |
| THYMU20066100 | 0 | 0 | 0 | 0 | 0 | 0 | 0 | 0 | 0 | 0 | 0 | 0 | 30.115 |
| THYMU20075320 | 0 | 0 | 0 | 0 | 56.448 | 0 | 0 | 0 | 0 | 0 | 0 | 0 | 0 |
| THYMU20081490 | 0 | 0 | 0 | 0 | 0 | 0 | 0 | 0 | 0 | 0 | 0 | 0 | 6.532 |
| THYMU20100410 | 0 | 0 | 0 | 0 | 0 | 18.787 | 0 | 0 | 0 | 19.023 | 0 | 0 | 0 |
| THYMU20101920 | 0 | 0 | 0 | 0 | 0 | 0 | 0 | 0 | 0 | 0 | 0 | 0 | 57.08 |
| THYMU20108310 | 0 | 0 | 0 | 0 | 0 | 0 | 0 | 54.53 | 0 | 0 | 0 | 0 | 0 |
| THYMU20119390 | 0 | 0 | 0 | 45.981 | 0 | 0 | 0 | 0 | 0 | 0 | 0 | 0 | 0 |
| THYMU20126900 | 0 | 0 | 0 | 0 | 0 | 0 | 3.915 | 0 | 0 | 0 | 0 | 0 | 0 |
| THYMU20128260 | 0 | 0 | 0 | 0 | 0 | 0 | 22.315 | 22.147 | 0 | 22.595 | 0 | 0 | 0 |
| THYMU20169680 | 0 | 0 | 0 | 0 | 0 | 0 | 0 | 0 | 0 | 7.541 | 0 | 0 | 0 |
| THYMU20193640 | 0 | 0 | 0 | 29.854 | 0 | 0 | 0 | 0 | 0 | 0 | 0 | 0 | 0 |
| THYMU20209590 | 0 | 0 | 0 | 7.868 | 0 | 0 | 11.085 | 25.432 | 0 | 0 | 0 | 0 | 12.293 |
| THYMU20235760 | 0 | 0 | 0 | 0 | 0 | 0 | 15.94 | 0 | 0 | 0 | 0 | 57.476 | 0 |
| THYMU20239430 | 0 | 0 | 0 | 0 | 0 | 0 | 54.53 | 0 | 0 | 0 | 0 | 0 | 0 |
| THYMU20240710 | 0 | 0 | 0 | 0 | 0 | 33.209 | 0 | 0 | 0 | 0 | 0 | 0 | 0 |
| THYMU20253250 | 0 | 0 | 0 | 0 | 0 | 13.123 | 0 | 29.879 | 46.138 | 0 | 0 | 0 | 0 |
| THYMU20286290 | 0 | 0 | 0 | 0 | 0 | 0 | 0 | 0 | 0 | 0 | 0 | 0 | 20.303 |
| TKIDN10000010 | 0 | 0 | 0 | 7.899 | 0 | 0 | 0 | 0 | 0 | 0 | 0 | 0 | 12.342 |
| TKIDN20005210 | 0 | 0 | 0 | 0 | 0 | 0 | 29.753 | 0 | 0 | 15.178 | 0 | 0 | 0 |
| TKIDN20030590 | 0 | 0 | 0 | 0 | 0 | 0 | 0 | 0 | 0 | 21.607 | 0 | 0 | 0 |
| TRACH20005020 | 0 | 0 | 0 | 0 | 0 | 0 | 47.167 | 0 | 0 | 0 | 0 | 0 | 0 |
| TRACH20005400 | 0 | 0 | 0 | 0 | 0 | 0 | 0 | 0 | 0 | 0 | 0 | 0 | 3.16 |
| TRACH20007020 | 0 | 0 | 0 | 5.573 | 0 | 0 | 0 | 0 | 0 | 0 | 0 | 0 | 0 |
| TRACH2001996O | 0 | 0 | 0 | 0 | 0 | 0 | 0 | 67.193 | 0 | 0 | 0 | 0 | 0 |
| TRACH20034840 | 0 | 0 | 0 | 38.787 | 0 | 0 | 0 | 0 | 0 | 0 | 0 | 0 | 0 |
| TRACH20079690 | 0 | 0 | 0 | 0 | 0 | 0 | 2.538 | 0 | 0 | 0 | 0 | 0 | 0 |
| TRACH20128110 | 0 | 0 | 0 | 5.533 | 28.17 | 0 | 0 | 17.886 | 0 | 0 | 0 | 0 | 34.582 |
| TRACH20149970 | 0 | 0 | 0 | 12.555 | 0 | 0 | 14.151 | 0 | 0 | 7.219 | 0 | 0 | 0 |

[0447] TABLE 34

| | | | | | | | | | | | | | |
|---|---|---|---|---|---|---|---|---|---|---|---|---|---|
| TRACH20183170 | 0 | 0 | 0 | 0 | 0 | 0 | 2.93 | 0 | 0 | 0 | 0 | 0 | 0 |
| UMVEN10001860 | 0 | 0 | 0 | 0 | 0 | 0 | 0 | 0.606 | 0 | 0 | 0 | 0 | 0 |
| UMVEN20003540 | 0 | 0 | 0 | 0 | 0 | 0 | 0 | 1.89 | 2.918 | 0 | 0 | 2.97 | 0.913 |
| UTERU20000740 | 0 | 0 | 0 | 37.308 | 0 | 0 | 0 | 0 | 0 | 0 | 0 | 0 | 0 |
| UTERU20030570 | 0 | 0 | 0 | 1.836 | 0 | 0 | 0 | 0 | 0 | 0 | 0 | 9.326 | 0 |
| UTERU20054460 | 0 | 0 | 0 | 0 | 75.184 | 0 | 0 | 0 | 0 | 0 | 0 | 0 | 0 |
| UTERU20055930 | 0 | 0 | 0 | 1.593 | 0 | 3.393 | 4.49 | 0 | 0 | 0 | 4.178 | 4.047 | 4.979 |
| UTERU20056010 | 0 | 0 | 0 | 0 | 0 | 0 | 0 | 5.848 | 0 | 2.601 | 0 | 0 | 0 |
| UTERU20064860 | 0 | 0 | 0 | 0 | 0 | 0 | 0 | 0 | 0 | 0 | 0 | 0 | 48.181 |
| UTERU20065930 | 0 | 0 | 0 | 1.048 | 5.951 | 2.953 | 0 | 0 | 0 | 1.506 | 0 | 0 | 3.275 |
| UTERU2007004O | 0 | 0 | 0 | 0 | 0 | 0 | 0 | 0 | 0 | 0 | 0 | 75.144 | 0 |
| UTERU20081300 | 0 | 0 | 0 | 0 | 0 | 0 | 0 | 0 | 0 | 46.104 | 0 | 0 | 0 |
| UTERU20084260 | 0 | 0 | 0 | 0 | 0 | 0 | 0 | 0 | 0 | 0 | 0 | 0 | 24.416 |
| UTERU20094350 | 0 | 0 | 0 | 0 | 0 | 5.388 | 26.737 | 0 | 0 | 16.367 | 0 | 0 | 5.93 |
| UTERU20120310 | 0 | 0 | 0 | 0 | 0 | 0 | 0 | 0 | 0 | 46.104 | 0 | 0 | 0 |
| UTERU20124070 | 0 | 0 | 0 | 0 | 0 | 24.8 | 0 | 0 | 0 | 0 | 0 | 0 | 0 |
| UTERU20164260 | 0 | 0 | 0 | 0 | 0 | 0 | 12.709 | 0 | 0 | 0 | 0 | 0 | 14.093 |
| UTERU20168220 | 0 | 0 | 0 | 0 | 0 | 4.05 | 10.05 | 0 | 0 | 6.152 | 0 | 0 | 0 |
| UTERU20183640 | 0 | 0 | 0 | 0 | 0 | 0 | 0 | 0 | 0 | 46.104 | 0 | 0 | 0 |
| ASTRO20032120 | 27.675 | 0 | 0 | 10.632 | 0 | 0 | 0 | 0 | 0 | 0 | 0 | 0 | 0 |
| ASTRO20125520 | 2.731 | 0 | 0 | 1.049 | 0 | 0 | 0 | 0 | 0 | 0 | 0 | 0 | 1.639 |
| BRACE20039040 | 4.789 | 0 | 0 | 3.68 | 9.367 | 0 | 0 | 0 | 0 | 0 | 0 | 9.348 | 0 |
| BRACE20060720 | 36.414 | 0 | 0 | 13.99 | 0 | 0 | 0 | 0 | 0 | 0 | 0 | 0 | 0 |
| BRACE20062640 | 15.593 | 0 | 0 | 5.99 | 0 | 0 | 0 | 0 | 29.9 | 0 | 0 | 0 | 9.36 |
| BRACE20090440 | 18.536 | 0 | 0 | 7.121 | 0 | 0 | 0 | 0 | 0 | 0 | 0 | 0 | 0 |
| BRACE20099570 | 72.245 | 0 | 0 | 27.755 | 0 | 0 | 0 | 0 | 0 | 0 | 0 | 0 | 0 |
| BRACE20111830 | 11.876 | 0 | 0 | 22.812 | 0 | 6.477 | 0 | 0 | 0 | 13.116 | 0 | 0 | 14.257 |
| BRACE20142570 | 22.91 | 0 | 0 | 44.008 | 0 | 0 | 12.401 | 0 | 0 | 0 | 0 | 0 | 0 |
| BRAWH20128270 | 16.614 | 0 | 0 | 0 | 0 | 9.061 | 8.993 | 0 | 31.859 | 0 | 33.472 | 0 | 0 |
| BRCAN20280360 | 4.46 | 0 | 0 | 0 | 8.724 | 4.865 | 0 | 5.539 | 0 | 2.463 | 0 | 0 | 0 |
| BRHIP20110800 | 64.423 | 0 | 0 | 0 | 0 | 0 | 0 | 0 | 0 | 35.577 | 0 | 0 | 0 |
| BRHIP20176420 | 47.719 | 0 | 0 | 0 | 0 | 13.013 | 12.915 | 0 | 0 | 26.353 | 0 | 0 | 0 |
| BRSSN20003120 | 19.877 | 0 | 0 | 7.636 | 0 | 21.682 | 10.759 | 0 | 0 | 0 | 40.045 | 0 | 0 |
| CTONG20105660 | 50.102 | 0 | 0 | 0 | 0 | 0 | 0 | 0 | 0 | 0 | 0 | 0 | 0 |
| CTONG20124010 | 15.543 | 0 | 0 | 0 | 0 | 4.239 | 0 | 0 | 0 | 0 | 0 | 0 | 0 |
| CTONG20133480 | 10.163 | 0 | 0 | 0 | 0 | 5.543 | 5.501 | 0 | 0 | 0 | 0 | 0 | 12.201 |
| CT0NG20139070 | 7.966 | 0 | 0 | 4.591 | 0 | 2.172 | 2.156 | 0 | 0 | 0 | 0 | 0 | 2.391 |

[0448] TABLE 35

| | | | | | | | | | | | | | |
|---|---|---|---|---|---|---|---|---|---|---|---|---|---|
| CTONG20160560 | 3.674 | 0 | 0 | 0 | 0 | 0 | 3.977 | 0 | 0 | 0 | 0 | 0 | 0 |
| FCBBF10001210 | 18.354 | 0 | 0 | 0 | 0 | 10.01 | 0 | 0 | 35.196 | 0 | 0 | 0 | 0 |
| FCBBF10001550 | 100 | 0 | 0 | 0 | 0 | 0 | 0 | 0 | 0 | 0 | 0 | 0 | 0 |
| FCBBF10001710 | 100 | 0 | 0 | 0 | 0 | 0 | 0 | 0 | 0 | 0 | 0 | 0 | 0 |
| FCBBF10001820 | 15.666 | 0 | 0 | 0 | 0 | 0 | 0 | 0 | 0 | 0 | 0 | 0 | 0 |
| FCBBF10002430 | 100 | 0 | 0 | 0 | 0 | 0 | 0 | 0 | 0 | 0 | 0 | 0 | 0 |
| FCBBF10002700 | 10 | 0 | 0 | 0 | 0 | 0 | 0 | 0 | 0 | 0 | 0 | 0 | 0 |
| FCBBF10002800 | 10.435 | 0 | 0 | 0 | 0 | 0 | 0 | 0 | 0 | 0 | 0 | 0 | 0 |
| FCBBF10003220 | 100 | 0 | 0 | 0 | 0 | 0 | 0 | 0 | 0 | 0 | 0 | 0 | 0 |
| FCB8F10003740 | 73.865 | 0 | 0 | 0 | 0 | 0 | 0 | 0 | 0 | 0 | 0 | 0 | 0 |
| FCBBF10003760 | 78.7 | 0 | 0 | 0 | 0 | 0 | 21.3 | 0 | 0 | 0 | 0 | 0 | 0 |
| FCBBF10005060 | 34.365 | 0 | 0 | 0 | 0 | 0 | 0 | 0 | 0 | 0 | 0 | 0 | 0 |
| FCBBF10005460 | 100 | 0 | 0 | 0 | 0 | 0 | 0 | 0 | 0 | 0 | 0 | 0 | 0 |
| FCBBF10005500 | 100 | 0 | 0 | 0 | 0 | 0 | 0 | 0 | 0 | 0 | 0 | 0 | 0 |
| FCB5F20006780 | 100 | 0 | 0 | 0 | 0 | 0 | 0 | 0 | 0 | 0 | 0 | 0 | 0 |
| FCBBF20014270 | 100 | 0 | 0 | 0 | 0 | 0 | 0 | 0 | 0 | 0 | 0 | 0 | 0 |
| FCB8F20023700 | 100 | 0 | 0 | 0 | 0 | 0 | 0 | 0 | 0 | 0 | 0 | 0 | 0 |
| FCBBF20032970 | 100 | 0 | 0 | 0 | 0 | 0 | 0 | 0 | 0 | 0 | 0 | 0 | 0 |
| FCBBF20035280 | 100 | 0 | 0 | 0 | 0 | 0 | 0 | 0 | 0 | 0 | 0 | 0 | 0 |
| FCBBF20042170 | 100 | 0 | 0 | 0 | 0 | 0 | 0 | 0 | 0 | 0 | 0 | 0 | 0 |
| FCBBF20042560 | 100 | 0 | 0 | 0 | 0 | 0 | 0 | 0 | 0 | 0 | 0 | 0 | 0 |
| FCBBF20051220 | 100 | 0 | 0 | 0 | 0 | 0 | 0 | 0 | 0 | 0 | 0 | 0 | 0 |
| FCBBF20054280 | 72.245 | 0 | 0 | 27.755 | 0 | 0 | 0 | 0 | 0 | 0 | 0 | 0 | 0 |
| FCBBF20056370 | 5.134 | 0 | 0 | 0 | 0 | 0 | 0 | 0 | 0 | 0 | 0 | 0 | 0 |
| FCBBF20064520 | 100 | 0 | 0 | 0 | 0 | 0 | 0 | 0 | 0 | 0 | 0 | 0 | 0 |
| FCBBF20067810 | 11.69 | 0 | 0 | 0 | 0 | 6.376 | 0 | 0 | 0 | 0 | 0 | 0 | 7.017 |
| FCBBF20071860 | 100 | 0 | 0 | 0 | 0 | 0 | 0 | 0 | 0 | 0 | 0 | 0 | 0 |
| FCBBF20072650 | 100 | 0 | 0 | 0 | 0 | 0 | 0 | 0 | 0 | 0 | 0 | 0 | 0 |
| FCBBF20076330 | 100 | 0 | 0 | 0 | 0 | 0 | 0 | 0 | 0 | 0 | 0 | 0 | 0 |
| FCBBF30008470 | 100 | 0 | 0 | 0 | 0 | 0 | 0 | 0 | 0 | 0 | 0 | 0 | 0 |
| FCBBF30010810 | 9.702 | 0 | 0 | 1.864 | 9.488 | 2.646 | 0 | 0 | 0 | 0 | 0 | 0 | 5.824 |
| FCBBF30012350 | 100 | 0 | 0 | 0 | 0 | 0 | 0 | 0 | 0 | 0 | 0 | 0 | 0 |
| FCBBF30012810 | 37.617 | 0 | 0 | 0 | 0 | 0 | 0 | 0 | 0 | 0 | 0 | 0 | 0 |
| FCBBF30015940 | 100 | 0 | 0 | 0 | 0 | 0 | 0 | 0 | 0 | 0 | 0 | 0 | 0 |
| FCBBF30019120 | 100 | 0 | 0 | 0 | 0 | 0 | 0 | 0 | 0 | 0 | 0 | 0 | 0 |
| FCBBF30024750 | 100 | 0 | 0 | 0 | 0 | 0 | 0 | 0 | 0 | 0 | 0 | 0 | 0 |
| FCBBF30028180 | 64.881 | 0 | 0 | 0 | 0 | 0 | 35.119 | 0 | 0 | 0 | 0 | 0 | 0 |

[0449] TABLE 36

| | | | | | | | | | | | | | |
|---|---|---|---|---|---|---|---|---|---|---|---|---|---|
| FCBBF30033050 | 100 | 0 | 0 | 0 | 0 | 0 | 0 | 0 | 0 | 0 | 0 | 0 | 0 |
| FCBBF30039020 | 43.392 | 0 | 0 | 0 | 0 | 0 | 0 | 0 | 0 | 0 | 0 | 0 | 0 |
| FCBBF30052180 | 100 | 0 | 0 | 0 | 0 | 0 | 0 | 0 | 0 | 0 | 0 | 0 | 0 |
| FCBBF30054440 | 100 | 0 | 0 | 0 | 0 | 0 | 0 | 0 | 0 | 0 | 0 | 0 | 0 |
| FCBBF30057290 | 100 | 0 | 0 | 0 | 0 | 0 | 0 | 0 | 0 | 0 | 0 | 0 | 0 |
| FCBBF30062880 | 100 | 0 | 0 | 0 | 0 | 0 | 0 | 0 | 0 | 0 | 0 | 0 | 0 |
| FCBBF30070770 | 100 | 0 | 0 | 0 | 0 | 0 | 0 | 0 | 0 | 0 | 0 | 0 | 0 |
| FCBBF30071520 | 100 | 0 | 0 | 0 | 0 | 0 | 0 | 0 | 0 | 0 | 0 | 0 | 0 |
| FCBBF30078290 | 20.784 | 0 | 0 | 0 | 0 | 0 | 0 | 0 | 0 | 0 | 0 | 0 | 0 |
| FCBBF30083620 | 100 | 0 | 0 | 0 | 0 | 0 | 0 | 0 | 0 | 0 | 0 | 0 | 0 |
| FCBBF30123470 | 4.055 | 0 | 0 | 0 | 0 | 0 | 0 | 0 | 7.775 | 0 | 8.169 | 0 | 2.434 |
| FCBBF30170590 | 100 | 0 | 0 | 0 | 0 | 0 | 0 | 0 | 0 | 0 | 0 | 0 | 0 |
| FCBBF30172550 | 64.423 | 0 | 0 | 0 | 0 | 0 | 0 | 0 | 0 | 35.577 | 0 | 0 | 0 |
| FCBBF30175310 | 2.962 | 0 | 0 | 0 | 5.793 | 0 | 3.207 | 3.678 | 0 | 0 | 0 | 0 | 3.556 |
| FCBBF30178730 | 100 | 0 | 0 | 0 | 0 | 0 | 0 | 0 | 0 | 0 | 0 | 0 | 0 |
| FCBBF30190850 | 100 | 0 | 0 | 0 | 0 | 0 | 0 | 0 | 0 | 0 | 0 | 0 | 0 |
| FCBBF30195640 | 100 | 0 | 0 | 0 | 0 | 0 | 0 | 0 | 0 | 0 | 0 | 0 | 0 |
| FCBBF30199610 | 100 | 0 | 0 | 0 | 0 | 0 | 0 | 0 | 0 | 0 | 0 | 0 | 0 |
| FCBBF30215060 | 100 | 0 | 0 | 0 | 0 | 0 | 0 | 0 | 0 | 0 | 0 | 0 | 0 |
| FCBBF30225660 | 64.881 | 0 | 0 | 0 | 0 | 0 | 35.119 | 0 | 0 | 0 | 0 | 0 | 0 |
| FCBBF30240960 | 100 | 0 | 0 | 0 | 0 | 0 | 0 | 0 | 0 | 0 | 0 | 0 | 0 |
| FCBBF30242250 | 100 | 0 | 0 | 0 | 0 | 0 | 0 | 0 | 0 | 0 | 0 | 0 | 0 |
| FCBBF30243640 | 100 | 0 | 0 | 0 | 0 | 0 | 0 | 0 | 0 | 0 | 0 | 0 | 0 |
| FCBBF30247930 | 29.517 | 0 | 0 | 11.34 | 0 | 0 | 0 | 0 | 0 | 0 | 0 | 0 | 0 |
| FCBBF30252520 | 100 | 0 | 0 | 0 | 0 | 0 | 0 | 0 | 0 | 0 | 0 | 0 | 0 |
| FCBBF30252800 | 100 | 0 | 0 | 0 | 0 | 0 | 0 | 0 | 0 | 0 | 0 | 0 | 0 |
| FCBBF30252850 | 44.606 | 0 | 0 | 0 | 0 | 0 | 0 | 55.394 | 0 | 0 | 0 | 0 | 0 |
| FCBBF30262510 | 100 | 0 | 0 | 0 | 0 | 0 | 0 | 0 | 0 | 0 | 0 | 0 | 0 |
| FCBBF30266780 | 100 | 0 | 0 | 0 | 0 | 0 | 0 | 0 | 0 | 0 | 0 | 0 | 0 |
| FCBBF30266920 | 29.977 | 0 | 0 | 11.517 | 0 | 0 | 0 | 0 | 0 | 0 | 0 | 58.507 | 0 |
| FCBBF30278630 | 100 | 0 | 0 | 0 | 0 | 0 | 0 | 0 | 0 | 0 | 0 | 0 | 0 |
| FCBBF30279030 | 100 | 0 | 0 | 0 | 0 | 0 | 0 | 0 | 0 | 0 | 0 | 0 | 0 |
| FCBBF30281880 | 100 | 0 | 0 | 0 | 0 | 0 | 0 | 0 | 0 | 0 | 0 | 0 | 0 |
| FCBBF30284720 | 100 | 0 | 0 | 0 | 0 | 0 | 0 | 0 | 0 | 0 | 0 | 0 | 0 |
| FCBBF30285280 | 100 | 0 | 0 | 0 | 0 | 0 | 0 | 0 | 0 | 0 | 0 | 0 | 0 |
| FCBBF40001730 | 100 | 0 | 0 | 0 | 0 | 0 | 0 | 0 | 0 | 0 | 0 | 0 | 0 |
| FCBBF40005480 | 27.002 | 0 | 0 | 10.374 | 0 | 14.727 | 0 | 0 | 0 | 0 | 0 | 0 | 0 |

[0450] TABLE 37

| | | | | | | | | | | | | | |
|---|---|---|---|---|---|---|---|---|---|---|---|---|---|
| HCHON20007380 | 5.501 | 0 | 0 | 0 | 0 | 0 | 0 | 0 | 0 | 0 | 11.082 | 0 | 0 |
| HEART20072310 | 8.949 | 0 | 0 | 0 | 0 | 4.881 | 0 | 0 | 0 | 4.942 | 0 | 0 | 0 |
| HHDPC20068620 | 13.827 | 0 | 0 | 0 | 0 | 7.541 | 0 | 0 | 0 | 0 | 0 | 0 | 0 |
| HLUNG20023340 | 16.982 | 0 | 0 | 0 | 0 | 0 | 0 | 0 | 0 | 0 | 0 | 0 | 0 |
| KIDNE20017130 | 28.625 | 0 | 0 | 0 | 0 | 0 | 0 | 0 | 0 | 0 | 0 | 0 | 0 |
| KIDNE20028830 | 8.38 | 0 | 0 | 0 | 0 | 0 | 0 | 5.203 | 0 | 0 | 8.442 | 8.178 | 0 |
| MESAN20014500 | 5.328 | 0 | 0 | 6.141 | 0 | 0 | 0 | 0 | 0 | 0 | 0 | 0 | 0 |
| NT2RP70072690 | 43.392 | 0 | 0 | 0 | 0 | 0 | 0 | 0 | 0 | 0 | 0 | 0 | 0 |
| NT2RP70137640 | 20.975 | 0 | 0 | 0 | 0 | 0 | 0 | 0 | 0 | 11.583 | 0 | 0 | 0 |
| NTONG20067090 | 16.742 | 0 | 0 | 0 | 0 | 0 | 0 | 0 | 0 | 0 | 0 | 0 | 0 |
| PLACE60004630 | 14.415 | 0 | 0 | 0 | 0 | 0 | 0 | 17.901 | 0 | 0 | 0 | 0 | 0 |
| PROST20083600 | 3.325 | 0 | 0 | 2.555 | 0 | 0 | 1.8 | 0 | 0 | 1.836 | 0 | 0 | 3.992 |
| PROST20189770 | 24.007 | 0 | 0 | 0 | 0 | 0 | 0 | 0 | 0 | 0 | 0 | 0 | 14.411 |
| RECTM20003490 | 7.826 | 0 | 0 | 0 | 0 | 0 | 0 | 0 | 0 | 0 | 0 | 0 | 0 |
| SKNSH20008190 | 4.598 | 0 | 0 | 1.767 | 8.994 | 12.539 | 2.489 | 0 | 0 | 0 | 0 | 0 | 8.28 |
| SMINT20115880 | 34.363 | 0 | 0 | 0 | 0 | 0 | 0 | 0 | 0 | 0 | 0 | 0 | 0 |
| SPLEN20169720 | 3.746 | 0 | 0 | 2.878 | 0 | 0 | 0 | 0 | 0 | 2.069 | 0 | 0 | 0 |
| SPLEN20194050 | 2.646 | 0 | 0 | 1.016 | 0 | 7.215 | 1.432 | 6.571 | 5.073 | 1.461 | 0 | 0 | 1.588 |
| SPLEN20284240 | 51.503 | 0 | 0 | 0 | 0 | 0 | 0 | 0 | 0 | 0 | 0 | 0 | 0 |
| TESTI20083940 | 73.865 | 0 | 0 | 0 | 0 | 0 | 0 | 0 | 0 | 0 | 0 | 0 | 0 |
| TESTI20213150 | 37.439 | 0 | 0 | 0 | 0 | 0 | 0 | 0 | 0 | 0 | 0 | 0 | 0 |
| TESTI20254540 | 20.808 | 0 | 0 | 0 | 0 | 0 | 0 | 0 | 0 | 0 | 0 | 0 | 12.49 |
| TESTI20265250 | 16.076 | 0 | 0 | 3.088 | 0 | 0 | 0 | 0 | 0 | 0 | 16.193 | 0 | 0 |
| TRACH20118940 | 32.856 | 0 | 0 | 0 | 0 | 8.96 | 0 | 0 | 0 | 0 | 0 | 32.063 | 0 |
| UTERU20145480 | 60.769 | 0 | 0 | 0 | 0 | 0 | 0 | 0 | 0 | 0 | 0 | 0 | 0 |
| UTERU20146680 | 60.769 | 0 | 0 | 0 | 0 | 0 | 0 | 0 | 0 | 0 | 0 | 0 | 0 |
| ASTR020155290 | 0 | 9.237 | 0 | 0 | 0 | 0 | 0 | 0 | 0 | 0 | 0 | 0 | 0 |
| BRAWH20030250 | 0 | 7.559 | 0 | 0 | 10.956 | 3.055 | 6.064 | 0 | 0 | 0 | 11.285 | 0 | 0 |
| BRAWH20113430 | 0 | 17.488 | 0 | 9.958 | 0 | 0 | 7.015 | 0 | 0 | 7.157 | 0 | 0 | 7.779 |
| BRAWH20122770 | 0 | 71.37 | 0 | 0 | 0 | 0 | 28.63 | 0 | 0 | 0 | 0 | 0 | 0 |
| BRHIP20005340 | 0 | 0.853 | 0 | 0 | 0 | 0 | 0.342 | 0 | 0 | 0.349 | 0 | 0 | 0 |
| BRHIP30001110 | 0 | 2.552 | 0 | 0.727 | 3.699 | 2.063 | 0 | 2.349 | 3.627 | 3.133 | 3.81 | 3.691 | 3.406 |
| BRSTN20002200 | 0 | 8.553 | 0 | 0 | 0 | 20.742 | 0 | 7.871 | 0 | 10.501 | 0 | 37.113 | 15.219 |
| CTONG20052900 | 0 | 57.236 | 0 | 0 | 0 | 0 | 0 | 0 | 0 | 0 | 0 | 0 | 0 |
| CTONG20108210 | 0 | 3.563 | 0 | 3.55 | 0 | 1.44 | 1.429 | 0 | 0 | 2.187 | 0 | 0 | 3.17 |
| DFNES20031920 | 0 | 7.467 | 0 | 0 | 0 | 3.018 | 0 | 0 | 0 | 0 | 0 | 0 | 0 |
| FEBRA10001900 | 0 | 19.812 | 0 | 0 | 0 | 0 | 0 | 18.233 | 0 | 0 | 0 | 0 | 0 |

[0451] TABLE 38

| | | | | | | | | | | | | | |
|---|---|---|---|---|---|---|---|---|---|---|---|---|---|
| FEBRA20003210 | 0 | 100 | 0 | 0 | 0 | 0 | 0 | 0 | 0 | 0 | 0 | 0 | 0 |
| FEBRA20007620 | 0 | 15.507 | 0 | 0 | 0 | 0 | 0 | 0 | 0 | 0 | 0 | 22.43 | 0 |
| FEBRA20009090 | 0 | 100 | 0 | 0 | 0 | 0 | 0 | 0 | 0 | 0 | 0 | 0 | 0 |
| FEBRA20010120 | 0 | 100 | 0 | 0 | 0 | 0 | 0 | 0 | 0 | 0 | 0 | 0 | 0 |
| FEBRA20017050 | 0 | 100 | 0 | 0 | 0 | 0 | 0 | 0 | 0 | 0 | 0 | 0 | 0 |
| FEBRA20018280 | 0 | 27.125 | 0 | 3.861 | 0 | 0 | 0 | 0 | 0 | 0 | 0 | 0 | 0 |
| FEBRA20025270 | 0 | 7.139 | 0 | 0 | 0 | 2.886 | 0 | 0 | 0 | 0 | 0 | 0 | 0 |
| FEBRA20025520 | 0 | 100 | 0 | 0 | 0 | 0 | 0 | 0 | 0 | 0 | 0 | 0 | 0 |
| FEBRA20026110 | 0 | 54.171 | 0 | 0 | 0 | 0 | 21.73 | 0 | 0 | 0 | 0 | 0 | 24.098 |
| FEBRA20026280 | 0 | 100 | 0 | 0 | 0 | 0 | 0 | 0 | 0 | 0 | 0 | 0 | 0 |
| FEBRA20029860 | 0 | 100 | 0 | 0 | 0 | 0 | 0 | 0 | 0 | 0 | 0 | 0 | 0 |
| FEBRA20034680 | 0 | 100 | 0 | 0 | 0 | 0 | 0 | 0 | 0 | 0 | 0 | 0 | 0 |
| FEBRA20037260 | 0 | 2.482 | 0 | 0.707 | 3.598 | 1.003 | 0 | 2.285 | 0 | 0 | 0 | 0 | 1.104 |
| FEBRA20040530 | 0 | 100 | 0 | 0 | 0 | 0 | 0 | 0 | 0 | 0 | 0 | 0 | 0 |
| FEBRA20042190 | 0 | 70.959 | 0 | 0 | 0 | 0 | 0 | 0 | 0 | 29.041 | 0 | 0 | 0 |
| FEBRA20052910 | 0 | 9.04 | 0 | 0 | 0 | 0 | 0 | 0 | 0 | 0 | 0 | 13.076 | 0 |
| FEBRA20060610 | 0 | 100 | 0 | 0 | 0 | 0 | 0 | 0 | 0 | 0 | 0 | 0 | 0 |
| FEBRA20072120 | 0 | 9.786 | 0 | 11.144 | 0 | 0 | 0 | 0 | 0 | 16.019 | 0 | 0 | 4.353 |
| FEBRA20079310 | 0 | 100 | 0 | 0 | 0 | 0 | 0 | 0 | 0 | 0 | 0 | 0 | 0 |
| FEBRA20082010 | 0 | 5.978 | 0 | 0 | 0 | 0 | 2.398 | 0 | 0 | 0 | 0 | 0 | 2.659 |
| FEBRA20088360 | 0 | 79.225 | 0 | 0 | 0 | 0 | 0 | 0 | 0 | 0 | 0 | 0 | 0 |
| FEBRA20090290 | 0 | 100 | 0 | 0 | 0 | 0 | 0 | 0 | 0 | 0 | 0 | 0 | 0 |
| FEBRA20092890 | 0 | 34.98 | 0 | 0 | 50.703 | 0 | 0 | 0 | 0 | 14.316 | 0 | 0 | 0 |
| FEBRA20093520 | 0 | 70.959 | 0 | 0 | 0 | 0 | 0 | 0 | 0 | 29.041 | 0 | 0 | 0 |
| FEBRA20097310 | 0 | 100 | 0 | 0 | 0 | 0 | 0 | 0 | 0 | 0 | 0 | 0 | 0 |
| FEBRA20113560 | 0 | 100 | 0 | 0 | 0 | 0 | 0 | 0 | 0 | 0 | 0 | 0 | 0 |
| FEBRA20125070 | 0 | 18.603 | 0 | 0 | 26.964 | 0 | 0 | 0 | 0 | 0 | 0 | 0 | 0 |
| FEBRA20132740 | 0 | 100 | 0 | 0 | 0 | 0 | 0 | 0 | 0 | 0 | 0 | 0 | 0 |
| FEBRA20140100 | 0 | 40.243 | 0 | 0 | 0 | 0 | 0 | 0 | 0 | 0 | 0 | 0 | 0 |
| FEBRA20161120 | 0 | 100 | 0 | 0 | 0 | 0 | 0 | 0 | 0 | 0 | 0 | 0 | 0 |
| FEBRA20166540 | 0 | 100 | 0 | 0 | 0 | 0 | 0 | 0 | 0 | 0 | 0 | 0 | 0 |
| FEBRA20167390 | 0 | 100 | 0 | 0 | 0 | 0 | 0 | 0 | 0 | 0 | 0 | 0 | 0 |
| FEBRA20171380 | 0 | 100 | 0 | 0 | 0 | 0 | 0 | 0 | 0 | 0 | 0 | 0 | 0 |
| FEBRA20176800 | 0 | 23.704 | 0 | 0 | 0 | 9.581 | 0 | 21.815 | 0 | 9.701 | 0 | 0 | 0 |
| FEBRA20184330 | 0 | 77.838 | 0 | 22.162 | 0 | 0 | 0 | 0 | 0 | 0 | 0 | 0 | 0 |
| FEBRA20192420 | 0 | 20.225 | 0 | 5.758 | 0 | 0 | 0 | 0 | 0 | 8.277 | 0 | 0 | 0 |
| FEBRA20195820 | 0 | 100 | 0 | 0 | 0 | 0 | 0 | 0 | 0 | 0 | 0 | 0 | 0 |

[0452] TABLE 39

| | | | | | | | | | | | | | |
|---|---|---|---|---|---|---|---|---|---|---|---|---|---|
| FEBRA20196370 | 0 | 40.753 | 0 | 0 | 0 | 0 | 0 | 0 | 0 | 0 | 0 | 0 | 0 |
| FEBRA20196630 | 0 | 21.712 | 0 | 0 | 0 | 0 | 0 | 0 | 0 | 0 | 0 | 0 | 0 |
| FEBRA20197110 | 0 | 5.271 | 0 | 0 | 0 | 0 | 0 | 4.851 | 0 | 0 | 0 | 0 | 2.345 |
| FEBRA20211710 | 0 | 26.519 | 0 | 0 | 0 | 10.719 | 0 | 24.406 | 0 | 0 | 0 | 38.357 | 0 |
| FEBRA20214970 | 0 | 100 | 0 | 0 | 0 | 0 | 0 | 0 | 0 | 0 | 0 | 0 | 0 |
| FEBRA20215500 | 0 | 77.838 | 0 | 22.162 | 0 | 0 | 0 | 0 | 0 | 0 | 0 | 0 | 0 |
| FEBRA20216360 | 0 | 50.44 | 0 | 14.361 | 0 | 0 | 0 | 0 | 0 | 0 | 0 | 0 | 0 |
| FEBRA20222040 | 0 | 100 | 0 | 0 | 0 | 0 | 0 | 0 | 0 | 0 | 0 | 0 | 0 |
| FEBRA20223220 | 0 | 100 | 0 | 0 | 0 | 0 | 0 | 0 | 0 | 0 | 0 | 0 | 0 |
| FEBRA20225040 | 0 | 4.094 | 0 | 0 | 0 | 0 | 0 | 3.768 | 11.636 | 0 | 0 | 0 | 0 |
| FEBRA20226010 | 0 | 77.838 | 0 | 22.162 | 0 | 0 | 0 | 0 | 0 | 0 | 0 | 0 | 0 |
| FEBRA20229560 | 0 | 100 | 0 | 0 | 0 | 0 | 0 | 0 | 0 | 0 | 0 | 0 | 0 |
| FEBRA20229630 | 0 | 100 | 0 | 0 | 0 | 0 | 0 | 0 | 0 | 0 | 0 | 0 | 0 |
| FEBRA20232850 | 0 | 100 | 0 | 0 | 0 | 0 | 0 | 0 | 0 | 0 | 0 | 0 | 0 |
| FEBRA20235500 | 0 | 40.825 | 0 | 0 | 59.175 | 0 | 0 | 0 | 0 | 0 | 0 | 0 | 0 |
| HCHON20040020 | 0 | 1.957 | 0 | 0 | 0 | 1.582 | 0 | 0 | 0 | 0 | 0 | 0 | 1.741 |
| KIDNE20102650 | 0 | 5.89 | 0 | 0 | 0 | 0 | 2.363 | 0 | 0 | 0 | 0 | 0 | 0 |
| NT2RP70037240 | 0 | 23.02 | 0 | 26.217 | 0 | 0 | 0 | 0 | 0 | 0 | 0 | 0 | 0 |
| PEBLM20072960 | 0 | 4.311 | 0 | 0 | 0 | 0 | 0 | 0 | 0 | 0 | 0 | 0 | 0 |
| PLACE60169420 | 0 | 9.752 | 0 | 0 | 0 | 3.942 | 3.912 | 8.975 | 13.858 | 0 | 14.56 | 0 | 4.338 |
| SKMUS20003610 | 0 | 2.666 | 0 | 0 | 0 | 1.077 | 0 | 2.453 | 0 | 0 | 0 | 0 | 0 |
| SMINT20026890 | 0 | 2.93 | 0 | 10.012 | 0 | 1.184 | 4.702 | 0 | 0 | 0 | 0 | 0 | 1.304 |
| SMINT20033400 | 0 | 7.324 | 0 | 0 | 0 | 2.96 | 0 | 0 | 0 | 0 | 0 | 0 | 0 |
| SPLEN20020070 | 0 | 47.573 | 0 | 0 | 0 | 19.229 | 0 | 0 | 0 | 0 | 0 | 0 | 0 |
| SPLEN20079510 | 0 | 58.898 | 0 | 0 | 0 | 0 | 0 | 0 | 0 | 0 | 0 | 0 | 0 |
| TESTI20001000 | 0 | 48.295 | 0 | 0 | 0 | 39.041 | 0 | 0 | 0 | 0 | 0 | 0 | 0 |
| TESTI20094020 | 0 | 22.853 | 0 | 0 | 0 | 9.237 | 0 | 0 | 0 | 0 | 0 | 0 | 0 |
| THYMU20027560 | 0 | 18.25 | 0 | 0 | 0 | 0 | 0 | 0 | 0 | 0 | 0 | 0 | 0 |
| THYMU20180280 | 0 | 74.935 | 0 | 0 | 0 | 0 | 0 | 0 | 0 | 0 | 0 | 0 | 0 |
| THYMU20271250 | 0 | 0.446 | 0 | 2.287 | 2.587 | 0.902 | 0.179 | 0.411 | 0 | 0 | 0 | 4.518 | 0.198 |
| TRACH20003590 | 0 | 7.434 | 0 | 0 | 0 | 0 | 0 | 0 | 0 | 3.042 | 0 | 0 | 0 |
| UMVEN10001560 | 0 | 2.576 | 0 | 0 | 0 | 0 | 0 | 0 | 0 | 0 | 0 | 0 | 0 |
| UTERU20022940 | 0 | 13.576 | 0 | 0 | 0 | 0 | 1.815 | 0 | 0 | 0 | 0 | 0 | 4.026 |
| UTERU20046640 | 0 | 4.23 | 0 | 0 | 0 | 1.71 | 1.697 | 0 | 0 | 0 | 0 | 0 | 1.882 |
| UTERU20119060 | 0 | 17 | 0 | 0 | 0 | 13.742 | 13.639 | 0 | 0 | 0 | 0 | 0 | 0 |
| UTERU20144640 | 0 | 33.653 | 0 | 0 | 0 | 0 | 0 | 0 | 0 | 0 | 50.246 | 0 | 0 |
| UTERU20176130 | 0 | 51.268 | 0 | 0 | 0 | 0 | 0 | 0 | 0 | 0 | 0 | 0 | 0 |

[0453] TABLE 40

| | | | | | | | | | | | | | |
|---|---|---|---|---|---|---|---|---|---|---|---|---|---|
| ASTRO20008010 | 0 | 0 | 1.267 | 0 | 0 | 0 | 0 | 0 | 0 | 0 | 0 | 0 | 0 |
| BRACE20276430 | 0 | 0 | 17.893 | 10.223 | 0 | 0 | 0 | 33.045 | 0 | 0 | 0 | 0 | 0 |
| BRAMY20103570 | 0 | 0 | 18.549 | 21.196 | 0 | 30.09 | 14.931 | 0 | 0 | 15.234 | 0 | 0 | 0 |
| BRAMY20120910 | 0 | 0 | 7.377 | 0 | 0 | 5.983 | 0 | 0 | 0 | 0 | 0 | 0 | 0 |
| BRAMY20162510 | 0 | 0 | 8.934 | 5.104 | 25.986 | 43.477 | 0 | 16.499 | 0 | 0 | 0 | 0 | 0 |
| BRAMY20196000 | 0 | 0 | 30.091 | 0 | 0 | 8.135 | 16.148 | 0 | 0 | 0 | 0 | 0 | 8.954 |
| BRAWH20164460 | 0 | 0 | 10.808 | 0 | 0 | 0 | 8.7 | 0 | 0 | 0 | 0 | 0 | 0 |
| BRCAN20273640 | 0 | 0 | 7.379 | 0 | 10.731 | 5.985 | 2.97 | 20.44 | 21.042 | 0 | 11.054 | 0 | 13.174 |
| BRC0C20105100 | 0 | 0 | 14.918 | 0 | 0 | 0 | 0 | 0 | 85.082 | 0 | 0 | 0 | 0 |
| BRHIP20198190 | 0 | 0 | 10.771 | 30.77 | 0 | 0 | 8.671 | 0 | 0 | 17.692 | 0 | 0 | 0 |
| BRHIP20222280 | 0 | 0 | 11.352 | 0 | 0 | 0 | 9.138 | 20.964 | 0 | 9.323 | 0 | 0 | 0 |
| BRHIP20254480 | 0 | 0 | 37.989 | 0 | 0 | 30.812 | 0 | 0 | 0 | 31.199 | 0 | 0 | 0 |
| BRHIP30004570 | 0 | 0 | 33.739 | 38.553 | 0 | 0 | 0 | 0 | 0 | 27.708 | 0 | 0 | 0 |
| CT0NG20028410 | 0 | 0 | 26.318 | 15.036 | 0 | 0 | 21.185 | 0 | 0 | 10.807 | 0 | 0 | 0 |
| CT0NG20091080 | 0 | 0 | 29.481 | 0 | 0 | 0 | 0 | 0 | 0 | 0 | 0 | 0 | 26.317 |
| CT0NG20103480 | 0 | 0 | 2.2 | 7.541 | 0 | 1.784 | 3.542 | 4.063 | 0 | 1.807 | 6.591 | 0 | 3.927 |
| CT0NG20126070 | 0 | 0 | 2.148 | 0 | 0 | 0 | 0 | 0 | 0 | 0 | 0 | 0 | 5.754 |
| CT0NG20139340 | 0 | 0 | 8.617 | 24.615 | 0 | 0 | 6.936 | 0 | 0 | 7.077 | 0 | 0 | 7.692 |
| DFNES20001530 | 0 | 0 | 3.977 | 0 | 0 | 0 | 0 | 0 | 0 | 0 | 0 | 0 | 3.551 |
| HCHON20008150 | 0 | 0 | 3.469 | 0 | 0 | 2.814 | 2.793 | 0 | 0 | 0 | 10.394 | 0 | 0 |
| HHDPC20001040 | 0 | 0 | 4.596 | 1.313 | 0 | 0 | 0 | 0 | 0 | 0 | 0 | 0 | 2.052 |
| HLUNG20016330 | 0 | 0 | 9.947 | 0 | 0 | 0 | 0 | 0 | 0 | 0 | 0 | 0 | 0 |
| HLUNG20017120 | 0 | 0 | 4.096 | 0 | 35.74 | 0 | 0 | 0 | 0 | 0 | 0 | 0 | 0 |
| IMR3220002430 | 0 | 0 | 2.132 | 1.218 | 0 | 1.729 | 0 | 0 | 0 | 2.626 | 0 | 0 | 0.951 |
| KIDNE20007210 | 0 | 0 | 26.272 | 0 | 0 | 0 | 0 | 0 | 0 | 0 | 0 | 0 | 0 |
| KIDNE20021910 | 0 | 0 | 17.71 | 15.177 | 0 | 0 | 0 | 0 | 0 | 0 | 0 | 0 | 7.905 |
| KIDNE20124400 | 0 | 0 | 2.199 | 2.513 | 0 | 0 | 0 | 0 | 0 | 3.612 | 6.588 | 0 | 3.926 |
| MESAN10001260 | 0 | 0 | 2.218 | 7.605 | 0 | 0 | 1.786 | 0 | 0 | 3.644 | 0 | 0 | 1.98 |
| MESAN20029400 | 0 | 0 | 3.951 | 0 | 0 | 0 | 3.18 | 0 | 0 | 0 | 0 | 0 | 0 |
| MESAN20121130 | 0 | 0 | 7.329 | 0 | 0 | 0 | 0 | 0 | 0 | 6.019 | 0 | 0 | 6.543 |
| MESAN20153910 | 0 | 0 | 25.095 | 0 | 0 | 0 | 0 | 0 | 0 | 0 | 0 | 0 | 0 |
| NT2NE20159740 | 0 | 0 | 18.979 | 21.687 | 0 | 7.697 | 0 | 0 | 0 | 0 | 0 | 0 | 8.471 |
| NT2NE20177520 | 0 | 0 | 29.166 | 0 | 0 | 0 | 0 | 0 | 0 | 0 | 0 | 0 | 0 |
| NT2RI20086220 | 0 | 0 | 3.92 | 0 | 0 | 0 | 0 | 0 | 0 | 0 | 0 | 0 | 6.999 |
| NT2RI20250750 | 0 | 0 | 21.061 | 12.033 | 0 | 0 | 0 | 0 | 0 | 17.297 | 0 | 0 | 18.801 |
| NT2RP60000850 | 0 | 0 | 5.745 | 3.283 | 0 | 4.66 | 4.625 | 0 | 0 | 0 | 0 | 0 | 5.129 |
| NT2RP70044280 | 0 | 0 | 12.569 | 7.181 | 0 | 6.796 | 16.862 | 0 | 0 | 6.881 | 0 | 0 | 0 |

[0454] TABLE 41

| | | | | | | | | | | | | | |
|---|---|---|---|---|---|---|---|---|---|---|---|---|---|
| NT2RP70056750 | 0 | 0 | 7.226 | 8.256 | 0 | 5.861 | 11.633 | 0 | 0 | 8.901 | 0 | 0 | 3.225 |
| NT2RP70081610 | 0 | 0 | 15.599 | 4.456 | 0 | 0 | 0 | 0 | 0 | 6.405 | 0 | 0 | 0 |
| NT0NG20009770 | 0 | 0 | 2.442 | 0 | 0 | 0 | 0 | 2.255 | 3.482 | 0 | 0 | 0 | 0 |
| OCBBF10000540 | 0 | 0 | 100 | 0 | 0 | 0 | 0 | 0 | 0 | 0 | 0 | 0 | 0 |
| OCBBF10001750 | 0 | 0 | 17.896 | 5.112 | 0 | 7.258 | 0 | 0 | 0 | 0 | 0 | 0 | 0 |
| OCBBF20006770 | 0 | 0 | 20.236 | 0 | 0 | 16.413 | 0 | 0 | 0 | 0 | 0 | 0 | 0 |
| OCBBF20013890 | 0 | 0 | 100 | 0 | 0 | 0 | 0 | 0 | 0 | 0 | 0 | 0 | 0 |
| OCBBF20019830 | 0 | 0 | 8.974 | 0 | 0 | 0 | 0 | 0 | 0 | 0 | 0 | 0 | 0 |
| OCBBF20020150 | 0 | 0 | 17.182 | 9.817 | 0 | 0 | 0 | 0 | 0 | 0 | 0 | 0 | 15.338 |
| OCBBF20020830 | 0 | 0 | 27.302 | 0 | 0 | 0 | 0 | 25.211 | 0 | 0 | 0 | 0 | 0 |
| OCBBF20023570 | 0 | 0 | 100 | 0 | 0 | 0 | 0 | 0 | 0 | 0 | 0 | 0 | 0 |
| OCBBF20028050 | 0 | 0 | 100 | 0 | 0 | 0 | 0 | 0 | 0 | 0 | 0 | 0 | 0 |
| OCBBF20028650 | 0 | 0 | 65.522 | 0 | 0 | 0 | 0 | 0 | 0 | 0 | 0 | 0 | 0 |
| OCBBF20029800 | 0 | 0 | 54.907 | 0 | 0 | 0 | 0 | 0 | 0 | 45.093 | 0 | 0 | 0 |
| OCBBF20030280 | 0 | 0 | 100 | 0 | 0 | 0 | 0 | 0 | 0 | 0 | 0 | 0 | 0 |
| OCBBF20030910 | 0 | 0 | 100 | 0 | 0 | 0 | 0 | 0 | 0 | 0 | 0 | 0 | 0 |
| OCBBF20035930 | 0 | 0 | 55.403 | 0 | 0 | 0 | 44.597 | 0 | 0 | 0 | 0 | 0 | 0 |
| OCBBF20037440 | 0 | 0 | 52.585 | 0 | 0 | 0 | 0 | 0 | 0 | 0 | 0 | 0 | 0 |
| OCBBF20041680 | 0 | 0 | 100 | 0 | 0 | 0 | 0 | 0 | 0 | 0 | 0 | 0 | 0 |
| OCBBF20045330 | 0 | 0 | 25.025 | 0 | 0 | 0 | 0 | 0 | 0 | 0 | 74.975 | 0 | 0 |
| OCBBF20046120 | 0 | 0 | 100 | 0 | 0 | 0 | 0 | 0 | 0 | 0 | 0 | 0 | 0 |
| OCBBF20046470 | 0 | 0 | 100 | 0 | 0 | 0 | 0 | 0 | 0 | 0 | 0 | 0 | 0 |
| OCBBF20046690 | 0 | 0 | 54.907 | 0 | 0 | 0 | 0 | 0 | 0 | 45.093 | 0 | 0 | 0 |
| OCBBF20048660 | 0 | 0 | 100 | 0 | 0 | 0 | 0 | 0 | 0 | 0 | 0 | 0 | 0 |
| OCBBF20050770 | 0 | 0 | 100 | 0 | 0 | 0 | 0 | 0 | 0 | 0 | 0 | 0 | 0 |
| OCBBF20051610 | 0 | 0 | 54.907 | 0 | 0 | 0 | 0 | 0 | 0 | 45.093 | 0 | 0 | 0 |
| OCBBF20053430 | 0 | 0 | 100 | 0 | 0 | 0 | 0 | 0 | 0 | 0 | 0 | 0 | 0 |
| OCBBF20053490 | 0 | 0 | 100 | 0 | 0 | 0 | 0 | 0 | 0 | 0 | 0 | 0 | 0 |
| OCBBF20053730 | 0 | 0 | 100 | 0 | 0 | 0 | 0 | 0 | 0 | 0 | 0 | 0 | 0 |
| OCBBF20054200 | 0 | 0 | 78.844 | 0 | 0 | 0 | 21.156 | 0 | 0 | 0 | 0 | 0 | 0 |
| OCBBF20054760 | 0 | 0 | 5.808 | 0 | 0 | 4.71 | 0 | 0 | 0 | 0 | 0 | 0 | 0 |
| OCBBF20060300 | 0 | 0 | 100 | 0 | 0 | 0 | 0 | 0 | 0 | 0 | 0 | 0 | 0 |
| OCBBF20062140 | 0 | 0 | 100 | 0 | 0 | 0 | 0 | 0 | 0 | 0 | 0 | 0 | 0 |
| OCBBF20062410 | 0 | 0 | 100 | 0 | 0 | 0 | 0 | 0 | 0 | 0 | 0 | 0 | 0 |
| OCBBF20066390 | 0 | 0 | 100 | 0 | 0 | 0 | 0 | 0 | 0 | 0 | 0 | 0 | 0 |
| OCBBF20071210 | 0 | 0 | 52.585 | 0 | 0 | 0 | 0 | 0 | 0 | 0 | 0 | 0 | 0 |
| OCBBF20071840 | 0 | 0 | 100 | 0 | 0 | 0 | 0 | 0 | 0 | 0 | 0 | 0 | 0 |

[0455] TABLE 42

| | | | | | | | | | | | | | |
|---|---|---|---|---|---|---|---|---|---|---|---|---|---|
| OCBBF20072240 | 0 | 0 | 11.73 | 6.702 | 0 | 0 | 9.442 | 0 | 0 | 0 | 0 | 0 | 0 |
| OCBBF20073540 | 0 | 0 | 1.248 | 0.713 | 0 | 1.012 | 3.014 | 2.305 | 0 | 0 | 0 | 0 | 1.114 |
| OCBBF20074140 | 0 | 0 | 59.836 | 0 | 0 | 0 | 0 | 0 | 0 | 0 | 0 | 0 | 0 |
| OCBBF20076220 | 0 | 0 | 4.561 | 2.606 | 0 | 0 | 0 | 0 | 0 | 0 | 0 | 0 | 0 |
| OCBBF20079310 | 0 | 0 | 100 | 0 | 0 | 0 | 0 | 0 | 0 | 0 | 0 | 0 | 0 |
| OCBBF20079460 | 0 | 0 | 100 | 0 | 0 | 0 | 0 | 0 | 0 | 0 | 0 | 0 | 0 |
| OCBBF20081380 | 0 | 0 | 100 | 0 | 0 | 0 | 0 | 0 | 0 | 0 | 0 | 0 | 0 |
| OCBBF20082830 | 0 | 0 | 100 | 0 | 0 | 0 | 0 | 0 | 0 | 0 | 0 | 0 | 0 |
| OCBBF20085200 | 0 | 0 | 100 | 0 | 0 | 0 | 0 | 0 | 0 | 0 | 0 | 0 | 0 |
| OCBBF20086400 | 0 | 0 | 100 | 0 | 0 | 0 | 0 | 0 | 0 | 0 | 0 | 0 | 0 |
| OCBBF20086910 | 0 | 0 | 100 | 0 | 0 | 0 | 0 | 0 | 0 | 0 | 0 | 0 | 0 |
| OCBBF20088140 | 0 | 0 | 100 | 0 | 0 | 0 | 0 | 0 | 0 | 0 | 0 | 0 | 0 |
| OCBBF20088220 | 0 | 0 | 2.961 | 0 | 0 | 0 | 0 | 0 | 0 | 0 | 0 | 0 | 0 |
| OCBBF20091150 | 0 | 0 | 100 | 0 | 0 | 0 | 0 | 0 | 0 | 0 | 0 | 0 | 0 |
| OCBBF20100400 | 0 | 0 | 100 | 0 | 0 | 0 | 0 | 0 | 0 | 0 | 0 | 0 | 0 |
| OCBBF20103130 | 0 | 0 | 34.079 | 0 | 49.562 | 0 | 0 | 0 | 0 | 0 | 0 | 0 | 0 |
| OCBBF20104040 | 0 | 0 | 100 | 0 | 0 | 0 | 0 | 0 | 0 | 0 | 0 | 0 | 0 |
| OCBBF20105570 | 0 | 0 | 22.763 | 13.005 | 0 | 0 | 0 | 0 | 0 | 0 | 0 | 0 | 0 |
| OCBBF20107090 | 0 | 0 | 100 | 0 | 0 | 0 | 0 | 0 | 0 | 0 | 0 | 0 | 0 |
| OCBBF20107920 | 0 | 0 | 100 | 0 | 0 | 0 | 0 | 0 | 0 | 0 | 0 | 0 | 0 |
| OCBBF20108580 | 0 | 0 | 33.1 | 4.728 | 0 | 0 | 13.322 | 0 | 0 | 20.388 | 0 | 0 | 0 |
| OCBBF20108630 | 0 | 0 | 55.216 | 0 | 0 | 44.784 | 0 | 0 | 0 | 0 | 0 | 0 | 0 |
| OCBBF20109310 | 0 | 0 | 100 | 0 | 0 | 0 | 0 | 0 | 0 | 0 | 0 | 0 | 0 |
| OCBBF20111770 | 0 | 0 | 100 | 0 | 0 | 0 | 0 | 0 | 0 | 0 | 0 | 0 | 0 |
| OCBBF20116850 | 0 | 0 | 100 | 0 | 0 | 0 | 0 | 0 | 0 | 0 | 0 | 0 | 0 |
| OCBBF20118970 | 0 | 0 | 21.447 | 0 | 0 | 17.395 | 0 | 0 | 61.158 | 0 | 0 | 0 | 0 |
| OCBBF20120390 | 0 | 0 | 9.527 | 3.266 | 0 | 7.727 | 26.074 | 0 | 0 | 31.296 | 0 | 0 | 22.111 |
| OCBBF20121390 | 0 | 0 | 100 | 0 | 0 | 0 | 0 | 0 | 0 | 0 | 0 | 0 | 0 |
| OCBBF20122620 | 0 | 0 | 36.036 | 0 | 0 | 0 | 29.008 | 0 | 0 | 0 | 0 | 0 | 0 |
| OCBBF20124360 | 0 | 0 | 59.836 | 0 | 0 | 0 | 0 | 0 | 0 | 0 | 0 | 0 | 0 |
| OCBBF20127040 | 0 | 0 | 25.938 | 14.819 | 0 | 0 | 0 | 0 | 0 | 21.301 | 0 | 0 | 0 |
| OCBBF20127140 | 0 | 0 | 7.211 | 4.12 | 0 | 0 | 0 | 0 | 0 | 0 | 0 | 0 | 0 |
| OCBBF20127550 | 0 | 0 | 100 | 0 | 0 | 0 | 0 | 0 | 0 | 0 | 0 | 0 | 0 |
| OCBBF20128120 | 0 | 0 | 25.584 | 0 | 74.416 | 0 | 0 | 0 | 0 | 0 | 0 | 0 | 0 |
| OCBBF20129360 | 0 | 0 | 55.403 | 0 | 0 | 0 | 44.597 | 0 | 0 | 0 | 0 | 0 | 0 |
| OCBBF20130910 | 0 | 0 | 100 | 0 | 0 | 0 | 0 | 0 | 0 | 0 | 0 | 0 | 0 |
| OCBBF20132850 | 0 | 0 | 63.64 | 36.36 | 0 | 0 | 0 | 0 | 0 | 0 | 0 | 0 | 0 |

[0456] TABLE 43

| | | | | | | | | | | | | | |
|---|---|---|---|---|---|---|---|---|---|---|---|---|---|
| OCBBF20140890 | 0 | 0 | 24.517 | 0 | 0 | 19.885 | 19.735 | 0 | 0 | 0 | 0 | 0 | 0 |
| OCBBF20145760 | 0 | 0 | 4.539 | 2.593 | 0 | 0 | 0 | 0 | 0 | 3.728 | 0 | 0 | 4.052 |
| OCBBF20148280 | 0 | 0 | 100 | 0 | 0 | 0 | 0 | 0 | 0 | 0 | 0 | 0 | 0 |
| OCBBF20151150 | 0 | 0 | 44.332 | 12.664 | 0 | 0 | 0 | 0 | 0 | 0 | 0 | 0 | 0 |
| OCBBF20153340 | 0 | 0 | 65.522 | 0 | 0 | 0 | 0 | 0 | 0 | 0 | 0 | 0 | 0 |
| OCBBF20153350 | 0 | 0 | 100 | 0 | 0 | 0 | 0 | 0 | 0 | 0 | 0 | 0 | 0 |
| OCBBF20155060 | 0 | 0 | 100 | 0 | 0 | 0 | 0 | 0 | 0 | 0 | 0 | 0 | 0 |
| OCBBF20164670 | 0 | 0 | 100 | 0 | 0 | 0 | 0 | 0 | 0 | 0 | 0 | 0 | 0 |
| OCBBF20170690 | 0 | 0 | 100 | 0 | 0 | 0 | 0 | 0 | 0 | 0 | 0 | 0 | 0 |
| OCBBF20173060 | 0 | 0 | 55.403 | 0 | 0 | 0 | 44.597 | 0 | 0 | 0 | 0 | 0 | 0 |
| OCBBF20173250 | 0 | 0 | 100 | 0 | 0 | 0 | 0 | 0 | 0 | 0 | 0 | 0 | 0 |
| OCBBF20178150 | 0 | 0 | 65.522 | 0 | 0 | 0 | 0 | 0 | 0 | 0 | 0 | 0 | 0 |
| OCBBF20180840 | 0 | 0 | 16.434 | 9.389 | 0 | 4.443 | 4.41 | 0 | 0 | 0 | 0 | 0 | 0 |
| OCBBF20186870 | 0 | 0 | 100 | 0 | 0 | 0 | 0 | 0 | 0 | 0 | 0 | 0 | 0 |
| OCBBF20189560 | 0 | 0 | 2.102 | 3.604 | 0 | 1.705 | 0 | 0 | 0 | 0 | 0 | 0 | 1.877 |
| PEBLM20044520 | 0 | 0 | 5.03 | 1.916 | 0 | 2.72 | 10.797 | 0 | 0 | 12.393 | 0 | 0 | 5.987 |
| PEBLM20071880 | 0 | 0 | 10.845 | 0 | 0 | 0 | 0 | 0 | 0 | 0 | 0 | 0 | 0 |
| PLACE60060420 | 0 | 0 | 6.763 | 0 | 0 | 0 | 0 | 0 | 0 | 0 | 0 | 0 | 0 |
| PROST20047390 | 0 | 0 | 27.713 | 10.556 | 0 | 0 | 0 | 0 | 0 | 7.587 | 0 | 0 | 0 |
| PUAEN2000374O | 0 | 0 | 1.59 | 0.909 | 1.156 | 0.322 | 2.24 | 0 | 0 | 0.653 | 0 | 0 | 1.775 |
| SMINT20029760 | 0 | 0 | 6.48 | 0 | 0 | 0 | 10.432 | 0 | 0 | 5.322 | 0 | 0 | 0 |
| SPLEN20008820 | 0 | 0 | 2.182 | 0 | 0 | 0 | 0 | 0 | 0 | 0 | 0 | 0 | 1.948 |
| SPLEN20084600 | 0 | 0 | 1.627 | 0 | 0 | 0 | 0 | 0 | 0 | 2.673 | 0 | 0 | 0 |
| SPLEN20095550 | 0 | 0 | 10.552 | 0 | 0 | 0 | 0 | 0 | 0 | 0 | 0 | 0 | 9.419 |
| SPLEN20099700 | 0 | 0 | 12.671 | 0 | 0 | 0 | 0 | 0 | 0 | 5.203 | 0 | 0 | 0 |
| SPLEN20140800 | 0 | 0 | 11.772 | 3.363 | 0 | 0 | 0 | 0 | 0 | 0 | 0 | 0 | 0 |
| SPLEN20173510 | 0 | 0 | 7.473 | 2.135 | 0 | 0 | 9.023 | 0 | 0 | 0 | 11.195 | 0 | 6.671 |
| SPLEN20211220 | 0 | 0 | 20.261 | 0 | 0 | 0 | 0 | 0 | 0 | 33.279 | 0 | 0 | 18.087 |
| SPLEN20250170 | 0 | 0 | 41.66 | 0 | 0 | 0 | 0 | 0 | 0 | 0 | 0 | 0 | 0 |
| STOMA20067800 | 0 | 0 | 10.791 | 0 | 0 | 0 | 0 | 0 | 0 | 0 | 0 | 0 | 0 |
| TESTI20031270 | 0 | 0 | 13.265 | 0 | 0 | 10.759 | 0 | 0 | 0 | 0 | 0 | 0 | 0 |
| TESTI20116830 | 0 | 0 | 40.221 | 0 | 0 | 0 | 0 | 0 | 0 | 0 | 0 | 0 | 0 |
| TESTI20121550 | 0 | 0 | 7.961 | 0 | 0 | 0 | 6.408 | 0 | 0 | 6.538 | 0 | 0 | 7.106 |
| TESTI20234140 | 0 | 0 | 5.057 | 2.889 | 0 | 0 | 0 | 0 | 0 | 0 | 0 | 0 | 0 |
| TESTI20442760 | 0 | 0 | 11.782 | 0 | 0 | 0 | 0 | 10.879 | 0 | 0 | 0 | 0 | 10.517 |
| THYMU20039810 | 0 | 0 | 0.649 | 0 | 0 | 0 | 0.522 | 0 | 1.85 | 2.664 | 0 | 0 | 0.579 |
| THYMU20070360 | 0 | 0 | 19.184 | 0 | 0 | 7.78 | 0 | 0 | 0 | 0 | 0 | 0 | 8.562 |

[0457] TABLE 44

| | | | | | | | | | | | | | |
|---|---|---|---|---|---|---|---|---|---|---|---|---|---|
| TRACH20033230 | 0 | 0 | 4.422 | 0 | 0 | 7.173 | 7.119 | 0 | 0 | 9.079 | 0 | 0 | 3.947 |
| TRACH20084720 | 0 | 0 | 3.898 | 1.114 | 0 | 0 | 0 | 0 | 5.558 | 0 | 0 | 0 | 8.7 |
| BRACE20067430 | 0 | 22.168 | 11.047 | 15.779 | 0 | 4.48 | 8.892 | 0 | 0 | 4.536 | 33.098 | 0 | 0 |
| BRAWH10000930 | 0 | 1.15 | 2.292 | 0.655 | 0 | 0 | 0.461 | 0 | 0 | 0 | 1.717 | 0 | 0.511 |
| BRHIP20003120 | 0 | 16.166 | 8.056 | 9.205 | 0 | 6.534 | 32.424 | 0 | 0 | 13.232 | 0 | 0 | 14.383 |
| BRSSN20152380 | 0 | 8.534 | 8.505 | 4.859 | 0 | 0 | 10.27 | 0 | 0 | 6.985 | 12.742 | 0 | 0 |
| FEBRA20024100 | 0 | 66.741 | 33.259 | 0 | 0 | 0 | 0 | 0 | 0 | 0 | 0 | 0 | 0 |
| FEBRA20027810 | 0 | 17.057 | 25.5 | 43.707 | 0 | 6.894 | 6.842 | 0 | 0 | 0 | 0 | 0 | 0 |
| FEBRA20037500 | 0 | 9.102 | 2.268 | 2.591 | 0 | 1.839 | 0 | 0 | 12.934 | 1.862 | 0 | 0 | 6.073 |
| FEBRA20082100 | 0 | 16.72 | 8.332 | 4.761 | 0 | 6.758 | 0 | 0 | 23.761 | 0 | 0 | 0 | 0 |
| FEBRA20098460 | 0 | 51.462 | 25.645 | 0 | 0 | 0 | 0 | 0 | 0 | 0 | 0 | 0 | 22.893 |
| FEBRA20144170 | 0 | 4.038 | 2.012 | 0.766 | 0 | 3.264 | 7.559 | 6.194 | 3.826 | 3.856 | 4.019 | 5.841 | 1.198 |
| FEBRA20145780 | 0 | 54.561 | 27.189 | 0 | 0 | 0 | 0 | 0 | 0 | 0 | 0 | 0 | 0 |
| FEBRA20233770 | 0 | 19.338 | 9.637 | 0 | 28.03 | 0 | 15.515 | 0 | 27.481 | 0 | 0 | 0 | 0 |
| HHDPC10000830 | 0 | 2.44 | 2.432 | 1.389 | 0 | 1.972 | 0 | 2.246 | 0 | 0 | 3.643 | 0 | 2.171 |
| MESAN20025190 | 0 | 11.561 | 5.761 | 0 | 0 | 4.673 | 0 | 0 | 0 | 4.732 | 0 | 0 | 5.143 |
| MESAN20089360 | 0 | 9.917 | 4.942 | 5.647 | 0 | 12.025 | 3.978 | 0 | 0 | 4.059 | 0 | 0 | 0 |
| NT2RI20048840 | 0 | 11.556 | 0.96 | 0 | 0 | 0 | 0 | 0 | 0 | 0.788 | 2.876 | 0 | 0 |
| NT2RP70043480 | 0 | 5.634 | 16.844 | 0 | 0 | 0 | 0 | 0 | 8.006 | 0 | 0 | 0 | 0 |
| OCBBF20032460 | 0 | 24.396 | 24.315 | 0 | 0 | 9.861 | 9.786 | 0 | 0 | 19.969 | 0 | 0 | 0 |
| OCBBF20039250 | 0 | 2.077 | 1.035 | 0 | 3.011 | 1.679 | 0 | 0 | 0 | 0 | 0 | 3.004 | 0 |
| OCBBF20049300 | 0 | 25.873 | 12.893 | 0 | 0 | 0 | 0 | 23.811 | 0 | 0 | 0 | 37.423 | 0 |
| OCBBF20061720 | 0 | 13.071 | 13.027 | 0 | 0 | 5.283 | 0 | 12.029 | 18.574 | 0 | 19.515 | 0 | 0 |
| OCBBF20078920 | 0 | 21.239 | 5.292 | 0 | 0 | 0 | 0 | 0 | 0 | 0 | 0 | 15.36 | 0 |
| OCBBF20084660 | 0 | 42.651 | 10.627 | 0 | 0 | 0 | 0 | 0 | 0 | 0 | 31.84 | 0 | 0 |
| OCBBF20087010 | 0 | 27.016 | 40.389 | 0 | 0 | 10.92 | 21.675 | 0 | 0 | 0 | 0 | 0 | 0 |
| PROST20087700 | 0 | 1.945 | 2.907 | 7.197 | 0 | 3.93 | 4.68 | 0 | 0 | 6.367 | 2.903 | 2.813 | 3.46 |
| PROST20153320 | 0 | 6.425 | 3.202 | 27.441 | 0 | 2.597 | 10.31 | 0 | 18.262 | 5.259 | 0 | 0 | 0 |
| TRACH20135520 | 0 | 25.898 | 12.906 | 7.374 | 0 | 0 | 10.389 | 0 | 0 | 31.797 | 0 | 0 | 0 |
| ADIPS20004250 | 1.434 | 0 | 0.964 | 0 | 0 | 0 | 1.553 | 0 | 0 | 1.584 | 0 | 0 | 0 |
| ASTRO10001650 | 4.095 | 0 | 11.014 | 0 | 0 | 0 | 0 | 0 | 0 | 0 | 0 | 0 | 0 |
| BRACE20056810 | 3.689 | 0 | 4.961 | 14.879 | 0 | 13.076 | 16.971 | 4.581 | 0 | 20.37 | 7.431 | 7.199 | 3.321 |
| BRACE20059370 | 22.318 | 0 | 7.504 | 8.574 | 0 | 0 | 0 | 0 | 0 | 0 | 0 | 0 | 0 |
| BRACE20106690 | 11.777 | 0 | 31.677 | 9.049 | 0 | 0 | 19.124 | 0 | 0 | 6.504 | 0 | 0 | 7.069 |
| BRACE20210140 | 10.945 | 0 | 14.719 | 4.205 | 0 | 0 | 17.772 | 0 | 0 | 18.132 | 0 | 0 | 0 |
| BRAWH20103290 | 13.868 | 0 | 6.217 | 21.311 | 0 | 10.085 | 20.017 | 0 | 0 | 15.317 | 0 | 0 | 11.099 |
| BRAWH20121640 | 38.493 | 0 | 25.884 | 14.788 | 0 | 0 | 20.835 | 0 | 0 | 0 | 0 | 0 | 0 |

[0458] TABLE 45

| | | | | | | | | | | | | | |
|---|---|---|---|---|---|---|---|---|---|---|---|---|---|
| BRHIP20005530 | 4.747 | 0 | 12.769 | 1.824 | 0 | 2.589 | 2.57 | 0 | 0 | 5.243 | 0 | 0 | 2.85 |
| BRHIP20217620 | 5.147 | 0 | 3.461 | 7.91 | 0 | 0 | 8.358 | 0 | 0 | 11.369 | 0 | 0 | 3.09 |
| BRHIP20218580 | 6.182 | 0 | 8.314 | 4.75 | 0 | 3.372 | 3.346 | 0 | 0 | 3.414 | 0 | 0 | 0 |
| BRHIP20238880 | 0.68 | 0 | 3.2 | 2.089 | 0 | 1.854 | 2.208 | 1.688 | 1.303 | 0.751 | 1.369 | 2.653 | 4.488 |
| CTONG20075860 | 11.104 | 0 | 14.933 | 0 | 0 | 0 | 0 | 0 | 21.292 | 0 | 0 | 0 | 0 |
| CTONG20129960 | 5.394 | 0 | 7.255 | 0 | 0 | 0 | 2.92 | 0 | 0 | 0 | 0 | 0 | 6.476 |
| FCBBF10000240 | 8.112 | 0 | 10.91 | 0 | 0 | 6.637 | 6.587 | 0 | 0 | 6.72 | 0 | 7.916 | 0 |
| FCBBF10000630 | 11.049 | 0 | 7.43 | 0 | 0 | 6.026 | 11.962 | 0 | 0 | 6.102 | 0 | 0 | 0 |
| FCBBF10001150 | 37.553 | 0 | 25.252 | 14.427 | 0 | 0 | 0 | 0 | 0 | 0 | 0 | 0 | 0 |
| FCBBF10004120 | 3.575 | 0 | 7.212 | 0 | 0 | 0 | 5.806 | 0 | 0 | 0 | 0 | 0 | 2.146 |
| FCBBF10005740 | 7.67 | 0 | 15.473 | 2.947 | 0 | 10.458 | 8.303 | 0 | 7.354 | 6.353 | 0 | 0 | 4.604 |
| FCBBF20075560 | 16.883 | 0 | 11.353 | 0 | 0 | 0 | 0 | 0 | 0 | 0 | 0 | 0 | 0 |
| FCBBF30018550 | 31.042 | 0 | 3.479 | 1.988 | 0 | 0 | 0 | 0 | 0 | 0 | 0 | 0 | 0 |
| FCBBF30025560 | 59.793 | 0 | 40.207 | 0 | 0 | 0 | 0 | 0 | 0 | 0 | 0 | 0 | 0 |
| FCBBF30086440 | 15.918 | 0 | 10.704 | 0 | 0 | 0 | 8.616 | 0 | 0 | 0 | 0 | 0 | 0 |
| FCBBF30090690 | 8.273 | 0 | 5.563 | 6.357 | 0 | 22.561 | 17.913 | 0 | 0 | 4.569 | 0 | 0 | 34.763 |
| FCBBF30189490 | 52.288 | 0 | 17.58 | 0 | 0 | 0 | 0 | 0 | 0 | 14.438 | 0 | 0 | 15.693 |
| FCBBF30233680 | 4.533 | 0 | 6.096 | 0 | 0 | 0 | 7.361 | 0 | 0 | 2.503 | 0 | 0 | 2.721 |
| FCBBF30240020 | 10.485 | 0 | 28.201 | 16.112 | 0 | 5.718 | 5.675 | 0 | 0 | 0 | 0 | 0 | 0 |
| HCHON20007510 | 6.596 | 0 | 4.435 | 0 | 0 | 0 | 3.57 | 0 | 0 | 0 | 0 | 0 | 3.959 |
| HCHON20016650 | 2.851 | 0 | 5.751 | 2.191 | 0 | 9.329 | 0 | 0 | 0 | 6.297 | 0 | 0 | 0 |
| HHDPC20095280 | 12.007 | 0 | 8.074 | 4.613 | 0 | 0 | 0 | 0 | 0 | 6.631 | 0 | 0 | 14.415 |
| KIDNE20002520 | 1.579 | 0 | 6.37 | 1.213 | 0 | 3.444 | 6.837 | 0 | 6.055 | 3.488 | 0 | 3.082 | 2.843 |
| KIDNE20009470 | 9.338 | 0 | 9.419 | 0 | 9.132 | 0 | 2.527 | 0 | 0 | 0 | 0 | 0 | 2.803 |
| NT2RI20003480 | 16.371 | 0 | 44.033 | 0 | 0 | 0 | 0 | 0 | 0 | 0 | 0 | 0 | 0 |
| NT2RI20055790 | 17.338 | 0 | 11.659 | 0 | 0 | 0 | 0 | 0 | 0 | 19.149 | 0 | 0 | 0 |
| NT2RP70027380 | 10.635 | 0 | 35.756 | 4.086 | 0 | 0 | 5.756 | 0 | 0 | 5.873 | 0 | 0 | 6.384 |
| NT2RP70032610 | 2.51 | 0 | 3.376 | 0 | 0 | 0 | 0 | 0 | 0 | 0 | 0 | 0 | 0 |
| NT2RP70062230 | 7.806 | 0 | 10.498 | 17.994 | 0 | 0 | 4.225 | 0 | 0 | 8.622 | 15.726 | 0 | 0 |
| OCBBF10001850 | 15.555 | 0 | 31.379 | 0 | 0 | 0 | 4.21 | 0 | 0 | 0 | 0 | 0 | 0 |
| OCBBF20022900 | 18.632 | 0 | 12.529 | 0 | 0 | 20.324 | 0 | 0 | 0 | 0 | 0 | 0 | 11.184 |
| OCBBF20026630 | 59.793 | 0 | 40.207 | 0 | 0 | 0 | 0 | 0 | 0 | 0 | 0 | 0 | 0 |
| OCBBF20049840 | 44.001 | 0 | 29.587 | 0 | 0 | 0 | 0 | 0 | 0 | 0 | 0 | 0 | 26.412 |
| OCBBF20059560 | 5.245 | 0 | 3.527 | 6.045 | 10.258 | 5.721 | 0 | 6.513 | 0 | 0 | 10.566 | 0 | 3.148 |
| OCBBF20068490 | 3.734 | 0 | 7.532 | 0 | 0 | 0 | 0 | 0 | 0 | 0 | 0 | 0 | 0 |
| OCBBF20071960 | 33.142 | 0 | 66.858 | 0 | 0 | 0 | 0 | 0 | 0 | 0 | 0 | 0 | 0 |
| OCBBF20080410 | 7.723 | 0 | 2.597 | 0 | 0 | 0 | 4.18 | 0 | 0 | 0 | 0 | 0 | 0 |

[0459] TABLE 46

| | | | | | | | | | | | | | |
|---|---|---|---|---|---|---|---|---|---|---|---|---|---|
| OCBBF20094240 | 13.407 | 0 | 9.015 | 0 | 0 | 0 | 0 | 0 | 0 | 0 | 0 | 0 | 0 |
| OCBBF20097720 | 4.351 | 0 | 5.851 | 6.686 | 0 | 7.119 | 9.42 | 2.702 | 4.172 | 12.014 | 0 | 4.246 | 1.306 |
| OCBBF20108190 | 23.173 | 0 | 15.583 | 8.903 | 0 | 0 | 0 | 0 | 0 | 0 | 0 | 0 | 13.91 |
| OCBBF20108430 | 27.517 | 0 | 18.503 | 0 | 0 | 0 | 0 | 0 | 0 | 0 | 0 | 0 | 0 |
| OCBBF20126780 | 25.486 | 0 | 25.707 | 29.374 | 0 | 0 | 6.898 | 0 | 0 | 0 | 0 | 0 | 0 |
| OCBBF20130110 | 13.949 | 0 | 9.38 | 0 | 0 | 22.823 | 0 | 0 | 0 | 7.703 | 0 | 0 | 0 |
| OCBBF20139260 | 22.924 | 0 | 77.076 | 0 | 0 | 0 | 0 | 0 | 0 | 0 | 0 | 0 | 0 |
| OCBBF20148730 | 26.202 | 0 | 17.619 | 0 | 0 | 0 | 28.366 | 0 | 0 | 0 | 0 | 0 | 0 |
| OCBBF20149280 | 59.793 | 0 | 40.207 | 0 | 0 | 0 | 0 | 0 | 0 | 0 | 0 | 0 | 0 |
| OCBBF20164050 | 71.253 | 0 | 28.747 | 0 | 0 | 0 | 0 | 0 | 0 | 0 | 0 | 0 | 0 |
| OCBBF20173980 | 2.376 | 0 | 9.588 | 1.826 | 0 | 3.888 | 9.005 | 0 | 4.557 | 6.562 | 4.788 | 0 | 4.28 |
| OCBBF20178880 | 31.476 | 0 | 21.165 | 0 | 0 | 0 | 17.037 | 0 | 0 | 0 | 0 | 0 | 0 |
| OCBBF20180120 | 5.185 | 0 | 3.487 | 0 | 0 | 2.828 | 0 | 0 | 0 | 0 | 0 | 0 | 0 |
| OCBBF20188730 | 5.12 | 0 | 5.164 | 0 | 0 | 0 | 1.386 | 0 | 0 | 2.828 | 0 | 0 | 4.61 |
| PROST20057930 | 7.245 | 0 | 4.872 | 0 | 0 | 0 | 0 | 0 | 0 | 0 | 0 | 0 | 4.349 |
| SPLEN20162680 | 3.991 | 0 | 2.147 | 0.307 | 0 | 0.435 | 0 | 0 | 0 | 0 | 0 | 1.558 | 0.479 |
| SPLEN20211940 | 12.464 | 0 | 4.191 | 0 | 0 | 0 | 3.373 | 0 | 0 | 0 | 0 | 0 | 0 |
| TESTI20184620 | 5.221 | 0 | 7.021 | 0 | 0 | 5.695 | 2.826 | 0 | 0 | 0 | 0 | 0 | 9.401 |
| TESTI20211240 | 10.559 | 0 | 7.1 | 0 | 0 | 5.759 | 17.146 | 0 | 0 | 11.662 | 0 | 0 | 0 |
| TESTI20369690 | 19.913 | 0 | 8.927 | 2.55 | 0 | 0 | 7.186 | 0 | 0 | 3.666 | 0 | 0 | 3.984 |
| THYMU20141670 | 10.152 | 0 | 20.48 | 0 | 0 | 0 | 0 | 0 | 0 | 0 | 0 | 19.814 | 6.094 |
| TRACH20028030 | 7.7 | 0 | 2.589 | 2.958 | 0 | 4.199 | 0 | 0 | 0 | 0 | 23.268 | 7.514 | 0 |
| UTERU20099720 | 13.09 | 0 | 39.61 | 0 | 0 | 0 | 3.543 | 0 | 0 | 3.614 | 0 | 0 | 0 |
| UTERU20135860 | 24.344 | 0 | 8.185 | 0 | 0 | 0 | 0 | 0 | 23.341 | 13.444 | 0 | 0 | 0 |
| BRACE20057190 | 5.487 | 14.807 | 0 | 6.324 | 32.194 | 5.985 | 0 | 6.814 | 0 | 3.03 | 11.054 | 0 | 0 |
| BRHIP20191860 | 7.292 | 9.84 | 0 | 0 | 0 | 3.977 | 0 | 0 | 0 | 4.027 | 0 | 0 | 0 |
| BRHIP20214950 | 11.849 | 15.989 | 0 | 4.552 | 46.351 | 0 | 0 | 14.715 | 0 | 6.544 | 0 | 0 | 0 |
| FCBBF10003670 | 5.613 | 3.787 | 0 | 0 | 0 | 1.531 | 0 | 0 | 0 | 1.55 | 0 | 0 | 0 |
| FCBBF10004370 | 23.626 | 31.88 | 0 | 0 | 0 | 0 | 0 | 0 | 0 | 0 | 0 | 0 | 0 |
| FCBBF30013770 | 19.023 | 25.669 | 0 | 0 | 0 | 0 | 10.297 | 0 | 0 | 0 | 0 | 0 | 0 |
| FCBBF30095260 | 21.826 | 29.451 | 0 | 0 | 0 | 23.808 | 11.814 | 0 | 0 | 0 | 0 | 0 | 13.101 |
| FCBBF30246230 | 41.402 | 13.966 | 0 | 0 | 0 | 0 | 0 | 0 | 0 | 0 | 0 | 0 | 12.426 |
| FEBRA20002100 | 1.306 | 3.524 | 0 | 0 | 0 | 0 | 0.707 | 0 | 0 | 0.721 | 0 | 0 | 0 |
| FEBRA20034360 | 10.27 | 13.858 | 0 | 0 | 0 | 5.601 | 0 | 0 | 39.387 | 0 | 0 | 0 | 0 |
| FEBRA20095140 | 12.239 | 24.772 | 0 | 0 | 0 | 3.338 | 0 | 0 | 0 | 3.379 | 0 | 0 | 0 |
| FEBRA20130190 | 42.565 | 57.435 | 0 | 0 | 0 | 0 | 0 | 0 | 0 | 0 | 0 | 0 | 0 |
| FEBRA20204060 | 42.565 | 57.435 | 0 | 0 | 0 | 0 | 0 | 0 | 0 | 0 | 0 | 0 | 0 |

[0460] TABLE 47

| | | | | | | | | | | | | | |
|---|---|---|---|---|---|---|---|---|---|---|---|---|---|
| HCHON20008320 | 6.536 | 8.819 | 0 | 0 | 0 | 0 | 0 | 0 | 0 | 0 | 0 | 0 | 0 |
| LIVER20028420 | 3.527 | 9.518 | 0 | 0 | 0 | 1.924 | 0 | 4.38 | 0 | 0 | 0 | 0 | 6.351 |
| TRACH20111130 | 8.722 | 23.539 | 0 | 3.351 | 0 | 0 | 0 | 0 | 0 | 4.817 | 0 | 0 | 5.236 |
| ASTRO20108190 | 6.215 | 3.355 | 6.687 | 6.686 | 0 | 3.39 | 4.037 | 0 | 2.384 | 4.119 | 0 | 0 | 0 |
| BRACE20003070 | 6.528 | 2.936 | 10.243 | 20.064 | 0 | 0 | 1.178 | 2.702 | 0 | 2.403 | 0 | 0 | 1.306 |
| BRACE20060550 | 7.391 | 4.987 | 2.485 | 4.259 | 0 | 2.016 | 4.001 | 0 | 0 | 0 | 0 | 0 | 2.218 |
| BRAWH20004600 | 2.255 | 1.521 | 1.516 | 9.097 | 0 | 1.23 | 1.831 | 1.4 | 2.162 | 1.245 | 4.543 | 0 | 4.061 |
| BRAWH20011710 | 3.423 | 4.619 | 15.345 | 9.644 | 0 | 9.334 | 6.176 | 1.417 | 0 | 1.89 | 2.299 | 0 | 4.794 |
| BRAWH20016620 | 8.494 | 34.385 | 5.712 | 3.263 | 0 | 0 | 4.598 | 0 | 16.288 | 0 | 0 | 0 | 5.099 |
| BRHIP10001740 | 9.366 | 25.278 | 6.298 | 3.598 | 0 | 5.108 | 0 | 0 | 17.961 | 5.173 | 0 | 18.281 | 5.622 |
| BRSTN10000830 | 4.718 | 1.592 | 4.759 | 1.36 | 0 | 1.93 | 0.638 | 0 | 2.262 | 1.303 | 0 | 2.302 | 0 |
| CTONG10000940 | 10.792 | 16.505 | 4.354 | 1.106 | 1.407 | 2.747 | 0 | 1.787 | 4.139 | 2.781 | 1.45 | 0 | 0.864 |
| CTONG20150910 | 3.001 | 2.024 | 2.018 | 0.576 | 0 | 0 | 0 | 0 | 0 | 0 | 0 | 0 | 1.801 |
| D3OST10002670 | 7.978 | 10.765 | 5.365 | 0 | 0 | 0 | 0 | 9.907 | 0 | 0 | 0 | 15.57 | 0 |
| FCBBF10000380 | 20.755 | 28.007 | 41.87 | 0 | 0 | 0 | 0 | 0 | 0 | 0 | 0 | 0 | 0 |
| FCBBF10000770 | 19.451 | 22.208 | 13.079 | 0 | 0 | 0.816 | 0 | 0 | 0 | 0 | 0 | 0 | 0.898 |
| FCBBF10003770 | 39.957 | 26.958 | 13.434 | 0 | 0 | 0 | 0 | 0 | 0 | 0 | 0 | 0 | 0 |
| FCBBF20059090 | 11.53 | 15.558 | 31.013 | 4.43 | 0 | 0 | 6.241 | 0 | 0 | 19.102 | 0 | 0 | 6.921 |
| FCBBF30016320 | 2.852 | 3.848 | 13.424 | 1.096 | 0 | 0 | 0 | 3.542 | 0 | 0 | 0 | 0 | 0 |
| FCBBF30016570 | 8.716 | 11.762 | 11.722 | 11.72 | 0 | 4.754 | 11.795 | 0 | 0 | 9.627 | 8.78 | 0 | 5.232 |
| FCBBF30049550 | 28.476 | 19.212 | 28.723 | 0 | 0 | 0 | 0 | 0 | 0 | 23.589 | 0 | 0 | 0 |
| FCBBF30083820 | 19.899 | 26.851 | 13.381 | 0 | 0 | 0 | 0 | 0 | 0 | 0 | 0 | 0 | 0 |
| FCBBF30238870 | 17.508 | 23.625 | 58.866 | 0 | 0 | 0 | 0 | 0 | 0 | 0 | 0 | 0 | 0 |
| FCBBF40001420 | 13.508 | 18.228 | 18.167 | 18.164 | 0 | 11.051 | 3.656 | 0 | 0 | 0 | 0 | 0 | 4.054 |
| FEBRA10001880 | 38.663 | 15.651 | 36.398 | 0 | 0 | 2.109 | 0 | 0 | 0 | 2.135 | 0 | 0 | 0 |
| FEBRA20004620 | 5.215 | 7.037 | 7.013 | 28.049 | 0 | 0 | 31.051 | 0 | 0 | 8.64 | 0 | 0 | 6.261 |
| FEBRA20080810 | 1.308 | 3.531 | 4.399 | 1.508 | 0 | 2.141 | 2.124 | 3.249 | 0 | 0.722 | 2.636 | 0 | 0 |
| FEBRA20086620 | 5.865 | 11.87 | 1.972 | 5.633 | 0 | 6.397 | 11.11 | 0 | 0 | 3.239 | 0 | 11.446 | 1.76 |
| FEBRA20095880 | 8.952 | 24.158 | 42.136 | 0 | 0 | 0 | 19.382 | 0 | 0 | 0 | 0 | 0 | 5.373 |
| HHDPC20034390 | 2.819 | 1.268 | 5.371 | 1.625 | 0 | 0.513 | 1.78 | 0 | 0 | 1.816 | 0.947 | 0 | 0.846 |
| HLUNG10000550 | 1 | 1.349 | 4.035 | 0 | 0 | 0 | 0 | 0 | 1.918 | 1.105 | 4.029 | 1.952 | 1.201 |
| NT2RI20023160 | 1.481 | 1.999 | 0.996 | 0.569 | 0 | 0 | 0 | 0 | 2.84 | 0.818 | 0 | 0 | 0.889 |
| NT2RI20023910 | 4.495 | 4.043 | 1.007 | 0 | 0 | 4.086 | 0 | 1.86 | 0 | 0 | 0 | 0 | 1.799 |
| NT2RI20025400 | 3.194 | 17.238 | 2.148 | 1.227 | 0 | 6.967 | 6.915 | 7.932 | 0 | 5.291 | 6.434 | 24.933 | 1.917 |
| NT2RI20028470 | 6.957 | 9.388 | 7.797 | 0 | 0 | 1.265 | 0 | 0 | 0 | 1.281 | 0 | 0 | 2.784 |
| NT2RI20054050 | 0.519 | 1.4 | 0.349 | 0.199 | 0 | 0 | 0.561 | 0 | 0 | 0.573 | 3.134 | 0 | 1.245 |
| NT2RI20076290 | 3.724 | 5.025 | 5.008 | 1.431 | 0 | 4.062 | 0 | 0 | 0 | 0 | 0 | 0 | 0 |

[0461] TABLE 48

| | | | | | | | | | | | | | |
|---|---|---|---|---|---|---|---|---|---|---|---|---|---|
| NT2RI20091730 | 2.061 | 5.561 | 1.386 | 0 | 0 | 1.124 | 0 | 0 | 0 | 1.138 | 0 | 0 | 1.237 |
| NT2RI20091940 | 1.816 | 9.799 | 9.767 | 0 | 0 | 0.99 | 1.965 | 0 | 0 | 1.003 | 0 | 0 | 0 |
| NT2RP70036880 | 2.728 | 1.841 | 8.256 | 4.193 | 0 | 6.696 | 3.692 | 0 | 0 | 0 | 0 | 0 | 4.913 |
| NT2RP70078420 | 3.543 | 4.781 | 2.383 | 4.084 | 6.93 | 0 | 0 | 0 | 0 | 1.957 | 7.139 | 0 | 2.127 |
| OCBBF20047570 | 18.314 | 30.89 | 12.315 | 3.518 | 8.955 | 2.497 | 0 | 5.686 | 0 | 0 | 0 | 0 | 0 |
| OCBBF20080050 | 11.733 | 7.916 | 21.697 | 6.762 | 0 | 6.399 | 0 | 0 | 0 | 1.62 | 0 | 0 | 0 |
| OCBBF20125530 | 4.333 | 11.695 | 4.371 | 0 | 4.238 | 1.182 | 0 | 2.691 | 0 | 2.393 | 4.365 | 4.229 | 0 |
| OCBBF20140640 | 2.523 | 10.215 | 3.394 | 0 | 0 | 1.376 | 0 | 0 | 0 | 4.18 | 10.167 | 4.925 | 0 |
| TRACH20032720 | 6.845 | 9.236 | 9.205 | 2.63 | 0 | 11.2 | 3.705 | 8.5 | 13.125 | 3.78 | 0 | 0 | 4.109 |
| TRACH20141240 | 3.814 | 5.146 | 2.565 | 1.465 | 0 | 4.16 | 2.064 | 0 | 3.657 | 0 | 0 | 0 | 3.434 |
| UTERU20004240 | 3.138 | 4.234 | 1.055 | 3.014 | 3.069 | 0.856 | 1.699 | 3.897 | 3.009 | 0 | 0 | 3.062 | 0 |

[0462] TABLE 49

| CloneID | FEHRT | HEART |
|---|---|---|
| FEHRT20003250 | 100 | 0 |
| OCBBF20189560 | 35.243 | 0 |
| BRAWH20029630 | 0 | 79.6 |
| CTONG20150910 | 0 | 5.418 |
| HCHON20007510 | 0 | 23.818 |
| HEART20003060 | 0 | 90.384 |
| HEART20005410 | 0 | 53.555 |
| HEART20021840 | 0 | 100 |
| HEART20025980 | 0 | 100 |
| HEART20034320 | 0 | 100 |
| HEART20037810 | 0 | 100 |
| HEART20049400 | 0 | 100 |
| HEART20049410 | 0 | 63.375 |
| HEART20049800 | 0 | 100 |
| HEART20061950 | 0 | 63.227 |
| HEART20063340 | 0 | 100 |
| HEART20067870 | 0 | 100 |
| HEART20067890 | 0 | 100 |
| HEART20072310 | 0 | 32.316 |
| HEART20074430 | 0 | 100 |
| HEART20077670 | 0 | 100 |
| HEART20089940 | 0 | 100 |
| HEART20090000 | 0 | 68.952 |
| HEART20095990 | 0 | 100 |
| HLUNG10000550 | 0 | 3.611 |
| HLUNG20017120 | 0 | 21.996 |
| KIDNE20028390 | 0 | 48.974 |
| KIDNE20028830 | 0 | 15.131 |
| NTONG20029480 | 0 | 44.44 |
| OCBBF10001750 | 0 | 48.053 |
| PROST20127800 | 0 | 48.531 |
| SKMUS20001980 | 0 | 21.074 |
| SKMUS20003610 | 0 | 7.134 |
| SMINT20026890 | 0 | 7.842 |
| SMINT20121220 | 0 | 23.322 |
| SMINT20122910 | 0 | 30.763 |
| SMINT20183530 | 0 | 65.405 |
| SPLEN20008740 | 0 | 3.252 |
| SPLEN20027440 | 0 | 14.879 |
| SPLEN20162680 | 0 | 2.882 |
| STOMA20062290 | 0 | 40.108 |
| TESTI20254220 | 0 | 16.559 |
| THYMU20271250 | 0 | 3.582 |
| TRACH20141240 | 0 | 6.886 |
| UTERU20004240 | 0 | 5.666 |

[0463] TABLE 50

| CloneID | FEKID | KIDNE |
|---|---|---|
| ASTRO10001650 | 0 | 7.727 |
| ASTRO20108190 | 0 | 2.346 |
| BGGI120006160 | 0 | 3.117 |
| BRACE20039040 | 0 | 9.038 |
| BRACE20060550 | 0 | 6.974 |
| BRAMY20102080 | 0 | 63.37 |
| BRAWH20004600 | 0 | 2.128 |
| BRAWH20125380 | 0 | 35.37 |
| BRAWH20162690 | 0 | 4.596 |
| BRHIP20115760 | 0 | 66.835 |
| BRHIP20205090 | 0 | 65.282 |
| BRHIP20238880 | 0 | 1.283 |
| CTONG20052650 | 0 | 65.178 |
| CTONG20108210 | 0 | 2.491 |
| CTONG20128470 | 0 | 6.004 |
| CTONG20133480 | 0 | 19.179 |
| CTONG20139070 | 0 | 7.516 |
| D9OST20000310 | 0 | 16.47 |
| DFNES20001530 | 0 | 11.162 |
| FCBBF10001820 | 0 | 59.128 |
| FEBRA20002100 | 0 | 4.929 |
| HCHON20008980 | 0 | 35.524 |
| HCHON20016650 | 0 | 5.38 |
| HLUNG20033780 | 0 | 32.277 |
| KIDNE20002520 | 0 | 2.979 |
| KIDNE20003940 | 0 | 100 |
| KIDNE20006780 | 0 | 100 |
| KIDNE20007210 | 0 | 73.728 |
| KIDNE20007770 | 0 | 19.958 |
| KIDNE20008010 | 0 | 100 |
| KIDNE20009470 | 0 | 8.811 |
| KIDNE20011170 | 0 | 77.71 |
| KIDNE20011400 | 0 | 100 |
| KIDNE20013730 | 0 | 24.839 |
| KIDNE20017130 | 0 | 54.019 |
| KIDNE20018730 | 0 | 100 |
| KIDNE20018970 | 0 | 100 |
| KIDNE20020150 | 0 | 100 |
| KIDNE20021680 | 0 | 100 |
| KIDNE20021910 | 0 | 24.85 |
| KIDNE20021980 | 0 | 100 |
| KIDNE20022620 | 0 | 100 |
| KIDNE20024830 | 0 | 100 |
| KIDNE20027250 | 0 | 35.87 |
| KIDNE20027950 | 0 | 100 |
| KIDNE20028390 | 0 | 25.593 |
| KIDNE20028830 | 0 | 7.907 |
| KIDNE20029800 | 0 | 10.988 |
| KIDNE20067330 | 0 | 100 |
| KIDNE20079440 | 0 | 35.045 |
| KIDNE20096280 | 0 | 100 |
| KIDNE20096470 | 0 | 100 |
| KIDNE20100070 | 0 | 100 |
| KIDNE20100840 | 0 | 100 |
| KIDNE20101370 | 0 | 100 |
| KIDNE20101510 | 0 | 100 |
| KIDNE20102650 | 0 | 8.237 |
| KIDNE20102710 | 0 | 100 |
| KIDNE20104300 | 0 | 33.246 |
| KIDNE20106740 | 0 | 100 |
| KIDNE20107390 | 0 | 100 |
| KIDNE20107500 | 0 | 74.264 |
| KIDNE20107620 | 0 | 100 |
| KIDNE20109730 | 0 | 100 |
| KIDNE20109890 | 0 | 100 |
| KIDNE20112000 | 0 | 100 |
| KIDNE20115080 | 0 | 65.178 |
| KIDNE20118580 | 0 | 100 |
| KIDNE20120090 | 0 | 33.186 |
| KIDNE20121880 | 0 | 62.256 |
| KIDNE20122910 | 0 | 83.085 |
| KIDNE20124400 | 0 | 6.171 |
| KIDNE20125630 | 0 | 100 |
| KIDNE20126010 | 0 | 100 |
| KIDNE20126130 | 0 | 100 |
| KIDNE20127100 | 0 | 33.012 |
| KIDNE20127450 | 0 | 100 |
| KIDNE20127750 | 0 | 100 |
| KIDNE20130450 | 0 | 100 |
| KIDNE20131580 | 0 | 63.24 |
| KIDNE20132180 | 0 | 100 |
| KIDNE20137340 | 0 | 100 |
| KIDNE20138010 | 0 | 100 |
| KIDNE20141190 | 0 | 49.697 |
| KIDNE20144890 | 0 | 100 |
| KIDNE20148900 | 0 | 100 |
| KIDNE20163880 | 0 | 100 |
| KIDNE20180710 | 0 | 49.105 |
| KIDNE20181660 | 0 | 100 |
| KIDNE20182690 | 0 | 100 |
| KIDNE20186780 | 0 | 100 |
| KIDNE20190740 | 0 | 100 |
| LIVER20035110 | 0 | 28.683 |
| MESAN20025190 | 0 | 16.169 |
| NOVAR20000380 | 0 | 2.166 |
| NT2RI20054050 | 0 | 2.936 |
| NT2RP70043480 | 0 | 7.879 |
| PROST20107820 | 0 | 1.696 |
| PROST20123530 | 0 | 32.771 |
| PROST20161950 | 0 | 20.387 |
| PUAEN20030180 | 0 | 46.744 |
| SKMUS20003610 | 0 | 3.728 |
| SMINT20033400 | 0 | 10.243 |
| TBAES20000590 | 0 | 5.253 |
| TESTI20044310 | 0 | 29.162 |
| TESTI20082330 | 0 | 45.847 |
| TRACH20032720 | 0 | 12.917 |
| UTERU20099720 | 0 | 12.351 |
| BRACE20003070 | 25.479 | 0 |
| BRCOC20031870 | 34.023 | 0 |
| CTONG20125640 | 85.462 | 0 |
| FCBBF30016320 | 33.393 | 0 |
| HCHON20002260 | 8.723 | 0 |
| HLUNG10000550 | 11.709 | 0 |
| PROST20130530 | 64.069 | 0 |
| SPLEN20169720 | 43.864 | 0 |
| SPLEN20194050 | 30.978 | 0 |
| KIDNE20028720 | 12.368 | 1.993 |

[0464] TABLE 51

| CloneID | FELNG | HLUNG |
|---|---|---|
| BRACE20096200 | 0 | 70.38 |
| BRAWH20004600 | 0 | 2.238 |
| BRAWH20030250 | 0 | 11.121 |
| BRCAN20006390 | 0 | 61.519 |
| BRCAN20280360 | 0 | 8.855 |
| BRHIP20238880 | 0 | 1.35 |
| CTONG10000940 | 0 | 1.428 |
| CTONG20103480 | 0 | 6.495 |
| CTONG20129960 | 0 | 10.709 |
| CTONG20155180 | 0 | 48.707 |
| FCBBF10001210 | 0 | 36.439 |
| FEBRA20144170 | 0 | 1.98 |
| FEBRA20197110 | 0 | 7.756 |
| HHDPC20034390 | 0 | 0.933 |
| HLUNG20016330 | 0 | 29.367 |
| HLUNG20016770 | 0 | 12.888 |
| HLUNG20017120 | 0 | 12.093 |
| HLUNG20023340 | 0 | 33.714 |
| HLUNG20033780 | 0 | 33.957 |
| HLUNG20084390 | 0 | 100 |
| IMR3220002430 | 0 | 3.147 |
| LIVER20028420 | 0 | 14.004 |
| NOVAR20000380 | 0 | 2.278 |
| NT2RI20054050 | 0 | 2.059 |
| NT2RI20091730 | 0 | 4.091 |
| NT2RP70044280 | 0 | 12.369 |
| OCBBF20020830 | 0 | 40.304 |
| OCBBF20125530 | 0 | 4.302 |
| PLACE60004630 | 0 | 28.618 |
| PROST20057930 | 0 | 14.383 |
| PROST20107820 | 0 | 0.892 |
| PROST20185830 | 0 | 33.898 |
| PUAEN20030180 | 0 | 12.294 |
| SMINT20121220 | 0 | 12.822 |
| SPLEN20002220 | 0 | 44.799 |
| SPLEN20054290 | 0 | 26.875 |
| SPLEN20128000 | 0 | 1.253 |
| SPLEN20157300 | 0 | 51.319 |
| SPLEN20176200 | 0 | 18.8 |
| SPLEN20179180 | 0 | 3.344 |
| SPLEN20211940 | 0 | 12.373 |
| STOMA20013890 | 0 | 21.183 |
| TBAES20000590 | 0 | 5.527 |
| TESTI20094230 | 0 | 59.311 |
| TESTI20184620 | 0 | 10.365 |
| TESTI20334410 | 0 | 8.049 |
| THYMU20000570 | 0 | 4.974 |
| THYMU20039810 | 0 | 1.915 |
| TRACH20007020 | 0 | 14.4 |
| TRACH20141240 | 0 | 3.786 |
| TRACH20183170 | 0 | 10.745 |
| D9OST20033970 | 61.464 | 0 |
| FELNG20002410 | 100 | 0 |
| HCHON20016650 | 33.188 | 0 |
| KIDNE20029800 | 67.783 | 0 |
| OCBBF20145760 | 78.585 | 0 |
| SPLEN20162680 | 9.292 | 0 |
| TESTI20214250 | 37.027 | 0 |
| TRACH20005400 | 30.64 | 0 |
| HCHON20002260 | 8.672 | 2.958 |
| HLUNG10000550 | 11.642 | 3.971 |
| NT2RI20023910 | 34.882 | 8.923 |
| SPLEN20008740 | 10.483 | 1.788 |

[0465] Table 52

[0466] Alteration of the expression level of each clone due to TNF-α stimulation to human monocyte cell line THP-1 and alteration of the expression level of each clone due to co-culture of gastric cancer cell line MKN45 with Helicobacter pylori. ctl, TNF_{—}1h, and TNF_{—}3h in the column of THP-1, respectively, indicate the relative mRNA expression levels in unstimulated THP-1, in the cell stimulated with 10 ng/mL TNF-α for 1 hour, and in the cell stimulated with 10 ng/mL TNF-α for 3 hours; ctl, Hp, and ΔcagE in the column of MKN45 indicate the relative mRNA expression levels in MKN45 cultured without Helicobacter pylori, in the cells co-cultured with cag PAI-positive Helicobacter pylori (TN2) (at a ratio of MKN45: TN2=1:100 cells (colonies)) for 3 hours, and in the cells co-cultured with the cagE mutant (TN2AcagE) (at a ratio of MKN45: TN2ΔcagE=1:100 cells (colonies)) for 3 hours, respectively.

| | THP-1 | | | | | |
|---|---|---|---|---|---|---|
| Clone | | TNF_{—} | TNF_{—} | MKN45 | | |
| Name | ct1 | 1h | 3h | ct1 | Hp | ΔcagE |
| 3NB6920014080 | 4 | 4 | 4.1 | | | |
| ADRGL20013010 | 0.1 | 0.1 | 0.1 | 0.04 | 0.04 | 0.04 |
| ADRGL20067670 | | | | 0 | 2.6 | 0 |
| ADRGL20083310 | 0.3 | 0.3 | 0.3 | | | |
| ASTRO20032120 | 1.4 | 1.7 | 0.6 | 1.2 | 0 | 1 |
| ASTRO20084250 | 1.2 | 1.1 | 0.4 | 0.1 | 0.04 | 0.1 |
| ASTRO20152140 | 0.1 | 0.9 | 0.4 | 1.6 | 1.8 | 1.6 |
| ASTRO20166810 | 0.7 | 0.7 | 0.2 | 4.3 | 3.5 | 4.4 |
| ASTRO20181690 | 1.5 | 1.9 | 0.2 | 1.8 | 2.2 | 0.2 |
| BLADE20004630 | 3.3 | 2.9 | 2.2 | 0.3 | 0.8 | 0 |
| BRACE20006400 | 3.6 | 3.5 | 3.6 | | | |
| BRACE20019540 | 0.7 | 0 | 0 | | | |
| BRACE20038480 | 0.5 | 0.6 | 0.3 | 0.2 | 0.2 | 0.2 |
| BRACE20039040 | 2.5 | 2.2 | 2.3 | 0.1 | 0.7 | 1.1 |
| BRACE20039440 | 0.3 | 0.3 | 0.2 | | | |
| BRACE20052160 | 2.7 | 2.3 | 1.9 | 1.3 | 0.8 | 1 |
| BRACE20053630 | 0.2 | 0.2 | 0 | 3.4 | 3 | 2.6 |
| BRACE20057620 | 0 | 3.7 | 0.5 | 0 | 0 | 0.3 |
| BRACE20058810 | 3.8 | 2 | 2.8 | 0.6 | 0 | 0.9 |
| BRACE20060720 | 0 | 1.3 | 0 | 0 | 0 | 0.04 |
| BRACE20060840 | 2.2 | 1.7 | 1.6 | 3.9 | 3.8 | 1.6 |
| BRACE20061740 | 1.9 | 2.1 | 2.7 | | | |
| BRACE20062640 | 1.9 | 0.2 | 2.4 | 2.3 | 1.2 | 1 |
| BRACE20063780 | 0 | 0.1 | 0 | 0.4 | 0.2 | 0.2 |
| BRACE20067430 | 2.4 | 0 | 1.7 | 0.04 | 0 | 0 |
| BRACE20090440 | 1.1 | 1.8 | 2.2 | 1 | 0.5 | 1.3 |
| BRACE20101700 | 3.1 | 1.8 | 1.7 | 0.5 | 0.4 | 1 |
| BRACE20114780 | 1 | 1.5 | 0.6 | 1.2 | 0.4 | 0.2 |
| BRACE20151320 | 0 | 0 | 0.1 | 0.1 | 0.2 | 0 |
| BRACE20152870 | 0.6 | 1.3 | 1.5 | 0.4 | 0.3 | 0.3 |
| BRACE20163150 | 1.5 | 1.7 | 0.9 | 1.4 | 1.4 | 1.7 |
| BRACE20165830 | 2.6 | 4.9 | 3.3 | | | |
| BRACE20201570 | 0 | 0 | 0 | 0 | 0 | 0 |
| BRACE20210140 | 1.7 | 1.4 | 1 | 1 | 0.6 | 0.5 |
| BRACE20223330 | 0.1 | 0 | 0 | 0 | 0.1 | 0 |
| BRACE20224500 | 0.2 | 0 | 0.2 | 0 | 0 | 0.1 |
| BRACE20229280 | 0.2 | 0.04 | 0.4 | 0 | 2.1 | 0 |
| BRACE20235400 | 1.8 | 0.6 | 1 | 0.3 | 0.6 | 0.1 |
| BRACE20266750 | 1.8 | 2.1 | 1 | 1.3 | 1.1 | 0.9 |
| BRACE20267250 | | | | 0.8 | 0.8 | 0 |
| BRACE20269710 | 0.9 | 0.9 | 0.7 | 0.4 | 0.2 | 0.1 |
| BRALZ20018340 | 1.1 | 1 | 0.5 | 0.3 | 0.4 | 0 |
| BRALZ20058880 | | | | 1 | 3.1 | 2.5 |
| BRALZ20059500 | 1.7 | 1.5 | 2.3 | | | |
| BRALZ20064740 | 1.9 | 2.8 | 1.2 | 8.9 | 0 | 0 |
| BRALZ20069760 | 1.3 | 0.4 | 0 | 0.04 | 0.04 | 0.04 |
| BRALZ20075450 | 1.3 | 0 | 0 | 0.04 | 0.04 | 0.04 |
| BRALZ20088690 | 1.8 | 1.4 | 1.5 | 0 | 0 | 1.6 |
| BRAMY20002770 | 0.8 | 2.4 | 0.3 | 1.2 | 0 | 0 |
| BRAMY20004110 | | | | 0.8 | 0 | 0 |
| BRAMY20060920 | | | | 0.3 | 11.8 | 12.2 |
| BRAMY20103570 | 0 | 0.1 | 0.1 | 0.6 | 0 | 0 |
| BRAMY20144620 | 0.7 | 0 | 0.9 | | | |
| BRAMY20152110 | 1.8 | 1.7 | 1.2 | 2.5 | 2.3 | 0.8 |
| BRAMY20162510 | 0.1 | 0 | 0 | 0.7 | 0.7 | 0 |
| BRAMY20163250 | 3.4 | 4.2 | 2.4 | 2.2 | 1.5 | 0.9 |
| BRAMY20163270 | 3.8 | 0.7 | 4.5 | | | |
| BRAMY20168920 | 2.4 | 2.5 | 2.2 | 0.2 | 0.04 | 0.1 |
| BRAMY20178640 | 1.7 | 1.6 | 1.9 | 0.9 | 1 | 0.5 |
| BRAMY20184670 | 0.4 | 0.3 | 0.2 | 0.04 | 0.2 | 0.6 |
| BRAMY20204450 | 3.6 | 3.6 | 1.6 | 0 | 0 | 0 |
| BRAMY20210400 | 0.5 | 0.5 | 0.5 | 1 | 0.2 | 0.9 |
| BRAMY20215230 | 1 | 0.7 | 1.1 | 1.9 | 0.8 | 1 |
| BRAMY20218670 | 1.6 | 0 | 1.5 | 0.2 | 2.6 | 0.1 |
| BRAMY20229800 | 5 | 3.9 | 0.5 | 1.4 | 4 | 1 |
| BRAMY20229840 | 0.04 | 0 | 0.04 | 0.3 | 0 | 0.2 |
| BRAMY20231720 | 1.1 | 1.3 | 1.6 | | | |
| BRAMY20247280 | 3.5 | 2.2 | 1.9 | 2 | 0.7 | 0.5 |
| BRAMY20261680 | 5.2 | 4 | 3 | 3.5 | 3.2 | 2.5 |
| BRAMY20266850 | 0.4 | 4.4 | 6.9 | 2.2 | 2.9 | 2.7 |
| BRAMY20267130 | | | | 13.7 | 0 | 0 |
| BRAMY20277140 | 3.3 | 2.5 | 3 | 0.7 | 0.8 | 0 |
| BRAMY20280720 | 0 | 9.8 | 1.1 | | | |
| BRAWH10000930 | 2.6 | 1.3 | 1.9 | 0 | 0 | 0 |
| BRAWH20015350 | | | | 0 | 0 | 0 |
| BRAWH20017010 | 0.9 | 0 | 0 | 0.6 | 0.2 | 0.9 |
| BRAWH20029630 | 1.9 | 2.4 | 1.8 | 1.4 | 0.2 | 0.04 |
| BRAWH20100690 | | | | 3.2 | 0.9 | 0.8 |
| BRAWH20106180 | 0 | 2.7 | 0.5 | | | |
| BRAWH20107540 | 2.1 | 1.3 | 0.8 | 1.1 | 1.1 | 0.6 |
| BRAWH20110660 | 1.7 | 2.1 | 2.4 | 1.4 | 1.4 | 0.9 |
| BRAWH20118230 | 0 | 0 | 0.04 | 2.3 | 0.9 | 1.9 |
| BRAWH20122770 | 0 | 0 | 0.8 | | | |
| BRAWH20126190 | 0 | 0 | 0 | 0 | 0 | 0 |
| BRAWH20132190 | 2.2 | 2.2 | 1 | 1.8 | 1.5 | 0.4 |
| BRAWH20138660 | 3.3 | 2.2 | 2.1 | | | |
| BRAWH20139410 | 0.9 | 1.7 | 0.2 | 2.1 | 1.9 | 0.7 |
| BRAWH20155950 | 1.5 | 1.8 | 1.5 | 0.9 | 0 | 0 |
| BRAWH20158530 | 58.9 | 19.3 | 41.1 | | | |
| BRCAN20060190 | | | | 0.2 | 0 | 0.2 |
| BRCAN20147880 | 0.3 | 0.3 | 0 | 0.5 | 1 | 1.3 |
| BRCAN20273340 | 2.8 | 3.5 | 0 | 0.3 | 0.3 | 0.3 |
| BRCAN20273640 | 0.3 | 0.4 | 0.2 | 0.7 | 0.8 | 0.3 |
| BRCAN20275130 | 3.9 | 3.6 | 2.3 | 0.2 | 0 | 0 |
| BRCAN20280210 | 0 | 0 | 0 | 0.8 | 0 | 0 |
| BRCAN20280400 | 3 | 3.6 | 2.6 | 1.8 | 1.7 | 1 |
| BRCOC20021550 | 0.7 | 0 | 0.2 | 0.3 | 0.3 | 0 |
| BRCOC20037400 | 1.5 | 1 | 1.2 | 0.1 | 0 | 0.2 |
| BRCOC20105100 | | | | 3.8 | 1 | 1.5 |
| BRHIP10001740 | 0.8 | 0.7 | 0.9 | 0.4 | 0 | 0 |
| BRHIP20001630 | 0.5 | 0 | 0 | | | |
| BRHIP20096170 | 0 | 0.4 | 0.3 | | | |
| BRHIP20103090 | 1 | 1 | 1.3 | 0.9 | 0 | 0.7 |
| BRHIP20105710 | 1.5 | 0 | 1.9 | 0.7 | 0.7 | 0.9 |
| BRHIP20110800 | 1.9 | 2.7 | 2.2 | 0.8 | 0 | 0 |
| BRHIP20111200 | 0.3 | 0.9 | 1.1 | | | |
| BRHIP20118910 | | | | 0 | 0 | 0 |
| BRHIP20129720 | 0 | 0.1 | 0 | 0 | 0 | 0 |
| BRHIP20143860 | 6.2 | 5.3 | 6.7 | 3.6 | 2.7 | 2.4 |
| BRHIP20173150 | 0 | 0.04 | 0 | 0.9 | 1.6 | 2.8 |
| BRHIP20175420 | 2.4 | 2.4 | 2.5 | 0.6 | 0 | 0 |
| BRHIP20186120 | 1.2 | 2.9 | 0 | | | |
| BRHIP20194940 | 0.04 | 0.7 | 0.3 | | | |
| BRHIP20196410 | 1.7 | 2.6 | 1.8 | 0.9 | 2 | 1 |
| BRHIP20207430 | 0 | 0 | 0.2 | 0 | 0 | 0.1 |
| BRHIP20218580 | 1.1 | 1.8 | 0.9 | 1.2 | 0.6 | 0.3 |
| BRHIP20233090 | 2.8 | 1.5 | 1.8 | 0.5 | 0 | 0.4 |
| BRHIP20284800 | 2.3 | 1.5 | 1.7 | | | |
| BRHIP30004880 | | | | 0.04 | 0.2 | 0.04 |
| BRSSN20046570 | 2.5 | 2 | 1.7 | 2.6 | 1 | 1.2 |
| BRSSN20142940 | 0 | 0 | 0.04 | 1.2 | 1.3 | 1.2 |
| BRSSN20152380 | 0.5 | 1 | 0.7 | 0.04 | 0.04 | 0.04 |
| BRSSN20176820 | 1.2 | 0.5 | 0.04 | 1.5 | 1 | 1.4 |
| BRSSN20187310 | | | | 2.5 | 9.6 | 27.6 |
| BRTHA20046390 | 2 | 2.1 | 2 | 3.2 | 3.2 | 2.4 |
| CD34C30004240 | 1 | 1.3 | 1.8 | 2 | 1.7 | 1.3 |
| CD34C30004940 | | | | 0 | 2.9 | 0 |
| COLON20043180 | | | | 7.2 | 6.6 | 7.2 |
| CTONG10000620 | 0.04 | 0.04 | 0.04 | | | |
| CTONG20014280 | 0.4 | 0.5 | 0 | | | |
| CTONG20095270 | 0 | 1.9 | 1.6 | 0 | 0 | 0 |
| CTONG20095290 | 1.5 | 0.5 | 0.8 | 0 | 0 | 0 |
| CTONG20096750 | 0 | 0.1 | 0 | 0 | 0 | 0 |
| CTONG20100240 | 0.2 | 0.8 | 0.04 | 0.2 | 0.04 | 0.04 |
| CTONG20103480 | 2.7 | 2.9 | 3.7 | 0 | 0.1 | 0 |
| CTONG20105660 | 7.2 | 4.3 | 3.7 | 3.1 | 2.8 | 3.1 |
| CTONG20121010 | 0 | 0 | 0 | 1.7 | 1.6 | 0 |
| CTONG20128470 | 0.8 | 1 | 1 | 0.2 | 0.3 | 0.2 |
| CTONG20138030 | 2.7 | 2.1 | 1.9 | 2.2 | 0.8 | 1.8 |
| CTONG20139070 | 2.4 | 2.3 | 2.2 | 0.9 | 0.4 | 1.1 |
| CTONG20146970 | 7 | 6.9 | 5.4 | 7.3 | 2.7 | 6.8 |
| CTONG20158150 | 0.2 | 3 | 0.4 | 1.6 | 0 | 1 |
| CTONG20186320 | 3.6 | 2.5 | 3.8 | 1.8 | 1.8 | 0.6 |
| CTONG20265130 | 1.2 | 2.2 | 6.3 | 0.8 | 6 | 20.3 |
| D3OST20006540 | 0.7 | 1.7 | 0.4 | 0.7 | 0.2 | 0.9 |
| D3OST20037970 | 2.7 | 2.7 | 1.7 | 1.9 | 0.6 | 1.3 |
| D9OST20031370 | 0.8 | 2.9 | 1.1 | 0.04 | 0.04 | 0.04 |
| DFNES10001850 | | | | 0 | 0 | 0 |
| DFNES20031920 | 2.1 | 2.2 | 0.8 | 1.2 | 2.9 | 0.8 |
| FCBBF10005060 | | | | 0.9 | 0 | 1 |
| FCBBF20032970 | 3.1 | 3.6 | 3.6 | 1.6 | 0.9 | 2 |
| FCBBF20035280 | | | | 0 | 0 | 0 |
| FCBBF20054280 | 2 | 2 | 2.4 | | | |
| FCBBF20071860 | 0.9 | 1.1 | 1.9 | 0 | 0 | 0.04 |
| FCBBF30001840 | 1 | 1.6 | 1.5 | 2.5 | 0 | 0 |
| FCBBF30016320 | 1 | 1.9 | 0.6 | 1.3 | 1.5 | 0.3 |
| FCBBF30016570 | 2.4 | 1.8 | 1.7 | 0.4 | 0.2 | 0.4 |
| FCBBF30033050 | 4.1 | 0 | 3.2 | 1 | 0 | 0.3 |
| FCBBF30071520 | 2 | 0 | 1.2 | | | |
| FCBBF30083820 | 2.9 | 3.5 | 1.4 | 2.2 | 1.6 | 0.5 |
| FCBBF30215060 | | | | 0.5 | 0.5 | 0.5 |
| FCBBF30251420 | 0 | 2.6 | 0 | 0.3 | 0.1 | 0.6 |
| FCBBF30252520 | 1 | 3.8 | 2.4 | 0.4 | 0 | 0 |
| FCBBF30262360 | | | | 0.0 | 0.04 | 0.04 |
| FCBBF30266920 | | | | 0.3 | 0.4 | 2 |
| FCBBF30278630 | | | | 1.3 | 3.6 | 0 |
| FCBBF30285280 | 0 | 0 | 0 | 0 | 0 | 0 |
| FCBBF40001420 | 0.3 | 0.7 | 0.3 | 0.1 | 0.7 | 0.1 |
| FEBRA10001880 | 0.5 | 0.4 | 0.4 | 0.4 | 0.4 | 0.5 |
| FEBRA20010120 | 4.2 | 6.4 | 3.5 | 0.7 | 0 | 0 |
| FEBRA20017050 | 0 | 0.8 | 0.8 | 0.04 | 0 | 0 |
| FEBRA20034360 | 0.8 | 0.9 | 0.7 | 0.1 | 0.1 | 0.1 |
| FEBRA20037260 | 1.2 | 1.4 | 0.9 | | | |
| FEBRA20037500 | 0.04 | 0 | 0.1 | 4.4 | 4 | 3.4 |
| FEBRA20082100 | 0.2 | 0.3 | 0.5 | 2.1 | 0.7 | 0.5 |
| FEBRA20095880 | 0.9 | 0 | 0.5 | 0.7 | 0.3 | 0.7 |
| FEBRA20167390 | 0.3 | 0 | 0 | 0.9 | 0.3 | 0.6 |
| FEBRA20176800 | 0.9 | 0 | 0 | 0.04 | 0 | 0 |
| FEBRA20226010 | 0.9 | 0.2 | 0.2 | 0 | 0 | 0 |
| HCASM10000500 | 2.7 | 2.7 | 3.1 | 0.9 | 0.8 | 0.4 |
| HCHON20002260 | 0.1 | 0 | 0 | 0.8 | 0.6 | 0.9 |
| HCHON20008980 | 1.8 | 2.4 | 0.2 | | | |
| HCHON20009350 | 0 | 0 | 0 | | | |
| HCHON20010990 | | | | 0.3 | 0.3 | 0.3 |
| HCHON20011160 | 0.04 | 0.2 | 0.04 | | | |
| HCHON20015230 | 2.6 | 2.3 | 2.4 | 1.2 | 1.7 | 0.6 |
| HCHON20022470 | 2 | 1.2 | 0.7 | 1.6 | 1.1 | 1.1 |
| HCHON20035130 | 1.9 | 2 | 2.4 | 1.3 | 0 | 2 |
| HCHON20043590 | 2.6 | 2.4 | 1.8 | 1.5 | 0.3 | 0.6 |
| HCHON20067220 | 1.5 | 2.1 | 2.3 | 2.1 | 0 | 0.9 |
| HCHON20076500 | 2.1 | 2.4 | 2.1 | 0 | 0.1 | 0 |
| HEART20021840 | 0.6 | 0.4 | 0 | | | |
| HEART20067870 | 0 | 0 | 0 | 0 | 0 | 0 |
| HEART20083640 | 0.8 | 0.2 | 0.2 | | | |
| HHDPC10000650 | 1.4 | 1.4 | 1.1 | 0.7 | 0.4 | 0.3 |
| HHDPC20034390 | 1.1 | 0.5 | 1.2 | 0.3 | 0.04 | 0.04 |
| HHDPC20095280 | 0.8 | 0.7 | 0.5 | 0 | 0.5 | 0 |
| HLUNG10000550 | 7.6 | 7 | 6.9 | 2.1 | 1.4 | 1 |
| KIDNE20018970 | 1.5 | 1.2 | 0.9 | 1.4 | 0.9 | 0.9 |
| KIDNE20028720 | 1.5 | 1.2 | 0 | | | |
| KIDNE20079440 | 1.4 | 1.8 | 0 | | | |
| KIDNE20096470 | 2.1 | 2.6 | 2.3 | 1.3 | 1 | 0.7 |
| KIDNE20106740 | 0.2 | 0.1 | 0 | 0 | 0 | 0 |
| KIDNE20120090 | 0.2 | 0 | 0 | | | |
| KIDNE20127750 | 1.9 | 0.6 | 0.4 | | | |
| KIDNE20130450 | 0.9 | 0.9 | 1.3 | 0.1 | 0.8 | 0.4 |
| KIDNE20132180 | | | | 0.7 | 0 | 0 |
| KIDNE20141190 | 0.1 | 0.2 | 0 | 0.4 | 0.3 | 0 |
| KIDNE20148900 | 4.6 | 0 | 4.7 | | | |
| KIDNE20163880 | 0.6 | 1.5 | 0 | 2.2 | 1.8 | 1.2 |
| KIDNE20182690 | 0.5 | 0.4 | 3.9 | 2.5 | 3.1 | 3.1 |
| LIVER10004790 | 1.5 | 3.3 | 1.6 | 0 | 0 | 0 |
| LIVER20011130 | 2.4 | 0.8 | 0 | 0.2 | 1.9 | 0.2 |
| LIVER20038540 | 0 | 5.1 | 0 | 1.2 | 4.9 | 0 |
| LIVER20055440 | 0.5 | 0.5 | 0.4 | 0.3 | 0.1 | 0.1 |
| LIVER20062510 | 1 | 1.1 | 1.2 | 0 | 0 | 0.9 |
| LIVER20085800 | 0 | 0.8 | 0.5 | | | |
| MAMGL10000830 | 5.4 | 4.3 | 0.1 | 0.6 | 0.6 | 0.7 |
| MESAN20031900 | 0.7 | 0.3 | 0.4 | 0.1 | 0.1 | 0.1 |
| MESAN20121130 | 2.6 | 2.8 | 2.2 | 0.1 | 0.04 | 0.04 |
| MESAN20127350 | 1.6 | 0.7 | 0.3 | | | |
| MESAN20130220 | 0.9 | 2.3 | 2.2 | | | |
| MESAN20154010 | 2.6 | 2.2 | 2 | 2.9 | 2.4 | 2.5 |
| MESAN20174170 | 0 | 0 | 0.7 | 0 | 0 | 0 |
| NOVAR10001020 | | | | 0.3 | 0.04 | 0.04 |
| NT2NE20053580 | | | | 0.8 | 0 | 0 |
| NT2NE20089610 | 0.9 | 1.3 | 1.5 | 0.1 | 0.04 | 0.04 |
| NT2NE20089970 | 0.7 | 0 | 0 | 0 | 0 | 0 |
| NT2NE20146810 | | | | 2.8 | 2.3 | 1.9 |
| NT2NE20155110 | 2.5 | 2.6 | 2.9 | | | |
| NT2NE20156260 | 1.3 | 1.3 | 1.7 | 0.3 | 0.1 | 1 |
| NT2NE20158600 | 0.8 | 3.4 | 3 | | | |
| NT2NE20172590 | | | | 0 | 0.8 | 0 |
| NT2NE20174920 | 1.8 | 1 | 1.1 | 1.4 | 0 | 0 |
| NT2NE20181650 | 1 | 1.1 | 0.5 | 0.2 | 0.1 | 0.04 |
| NT2RI20005750 | 0 | 0.4 | 0 | 0.6 | 0.04 | 0.8 |
| NT2RI20009870 | 3 | 2.3 | 2.3 | 7.3 | 2.1 | 3.4 |
| NT2RI20023160 | 3.5 | 1.1 | 2.8 | 1.7 | 0.4 | 1.8 |
| NT2RI20040930 | 0.7 | 0.6 | 0.5 | 0.3 | 0.1 | 0.1 |
| NT2RI20046080 | 1.8 | 1.8 | 1.5 | 1.2 | 0.8 | 0.9 |
| NT2RI20055790 | 0.9 | 0.9 | 0.9 | 0.8 | 0.6 | 1 |
| NT2RI20069730 | 2.4 | 2.1 | 1.7 | 2.1 | 1.4 | 1.4 |
| NT2RI20203900 | 0 | 0 | 0 | 0 | 0 | 0 |
| NT2RP70062230 | | | | 1.8 | 0 | 1.5 |
| NT2RP70102350 | 1.7 | 0.04 | 0.04 | | | |
| NT2RP70110860 | 0 | 0 | 0.6 | 0 | 0 | 0 |
| NT2RP70111320 | | | | 3.2 | 4.4 | 2.8 |
| NT2RP70130020 | 0 | 0 | 0 | 1 | 0 | 0.1 |
| NT2RP70143480 | 1.2 | 2 | 1.7 | 0.8 | 1.1 | 0.6 |
| NT2RP70150800 | | | | 0.8 | 0.3 | 0.3 |
| NT2RP70157890 | 4.6 | 1.1 | 0.3 | 2.2 | 1.8 | 0 |
| NT2RP70169110 | 0.5 | 1.3 | 1.7 | 1 | 3.3 | 2.5 |
| NT2RP70175670 | 0.3 | 0.1 | 1.4 | 4.3 | 3.3 | 3.3 |
| NT2RP70188020 | 2.5 | 2.8 | 2.6 | 0 | 0 | 0 |
| NT2RP70188710 | 0 | 0.1 | 0.2 | 4.3 | 2.8 | 2.9 |
| NT2RP70190640 | | | | 0.4 | 0.4 | 0.9 |
| NTONG20029480 | 3.1 | 0.7 | 2.2 | | | |
| NTONG20064840 | | | | 1.5 | 1 | 1 |
| NTONG20067090 | 2.5 | 2.1 | 2.3 | 0.4 | 0.1 | 0.2 |
| NTONG20070340 | 0.1 | 0 | 0 | 6.3 | 1.3 | 0.7 |
| NTONG20077560 | | | | 0.5 | 0.5 | 0.5 |
| NTONG20083650 | 2.9 | 2.9 | 2.7 | 2.5 | 2.5 | 1.9 |
| NTONG20090680 | 2.1 | 2 | 2.4 | 2 | 1.3 | 1.6 |
| OCBBF20005230 | 1.7 | 1.3 | 2.3 | 0.9 | 0.7 | 0.7 |
| OCBBF20019380 | 0.6 | 0.6 | 0.5 | 0 | 0 | 0 |
| OCBBF20020150 | 4.2 | 3.2 | 3 | 1 | 0 | 0.6 |
| OCBBF20020830 | 2.7 | 2.7 | 1.3 | 4.4 | 2.3 | 2.1 |
| OCBBF20039250 | 1 | 1.2 | 0.9 | 0.4 | 0.1 | 0.5 |
| OCBBF20041680 | 1.4 | 0 | 0 | | | |
| OCBBF20047570 | 0.04 | 0 | 0 | 0.3 | 0.2 | 0.6 |
| OCBBF20051610 | 0 | 0.04 | 0.04 | 0 | 0 | 0 |
| OCBBF20054200 | 0.4 | 0.3 | 0 | 0.04 | 0.04 | 0.04 |
| OCBBF20061720 | 1.3 | 2 | 0.2 | 0.7 | 1.2 | 0 |
| OCBBF20062140 | 3.3 | 3.1 | 5 | | | |
| OCBBF20071960 | | | | 0.1 | 0 | 0 |
| OCBBF20072320 | 0.04 | 0 | 0.04 | 0.04 | 0.04 | 0.04 |
| OCBBF20079310 | 0.04 | 0 | 0 | 0 | 0.04 | 1 |
| OCBBF20081380 | 6.3 | 6.1 | 5.1 | 0.8 | 0.4 | 0.6 |
| OCBBF20085200 | | | | 0.1 | 0.5 | 1.3 |
| OCBBF20094240 | 0.9 | 1.5 | 1.6 | 1.1 | 0.3 | 0 |
| OCBBF20107920 | 2.9 | 2.9 | 2.6 | 2.6 | 0.7 | 0.3 |
| OCBBF20127040 | 1.4 | 1.3 | 0.5 | 0.2 | 0.04 | 0 |
| OCBBF20130110 | | | | 3.2 | 2.4 | 1.8 |
| OCBBF20139260 | 2.1 | 0.7 | 0.2 | | | |
| OCBBF20164050 | 0.3 | 0.3 | 0.2 | 0.2 | 0 | 0.04 |
| OCBBF20178990 | 2.1 | 0.7 | 0.2 | 0.9 | 0 | 0 |
| OCBBF20180840 | 3.7 | 2.7 | 3.1 | 0.1 | 0.3 | 0.3 |
| PEBLM10000240 | 2.1 | 2.2 | 1.6 | 0 | 0.3 | 0 |
| PEBLM20013120 | 3.3 | 0.5 | 3 | | | |
| PEBLM20024550 | 0.1 | 0 | 0 | 3 | 2.2 | 0.7 |
| PEBLM20052820 | 1.9 | 2.1 | 2.2 | 1 | 0.6 | 0.8 |
| PEBLM20074370 | 0.9 | 0.9 | 1.7 | 3.7 | 3.1 | 3 |
| PERIC20002140 | 0.04 | 0.9 | 0.4 | 0.7 | 0.3 | 0.8 |
| PERIC20004780 | 0 | 0.04 | 0.1 | 0.04 | 0 | 0.04 |
| PLACE60003480 | 4.1 | 1.5 | 4.8 | 0.6 | 1.6 | 5.1 |
| PLACE60136720 | 0.5 | 0.7 | 0.7 | 0.6 | 0.7 | 0.2 |
| PLACE60155130 | 0.7 | 2.3 | 0 | | | |
| PLACE60169420 | 1.2 | 1.4 | 1.6 | 0.6 | 0 | 0.8 |
| PLACE60181070 | 42.3 | 10 | 28.2 | | | |
| PROST10004800 | 3.1 | 3.2 | 1.8 | | | |
| PROST20120160 | 0 | 0.6 | 0 | 0 | 0.3 | 0.9 |
| PROST20144220 | 2.5 | 2.8 | 2.4 | 1.6 | 0.5 | 0.2 |
| PROST20149160 | 0.7 | 0 | 0.4 | 1.6 | 0.6 | 0.6 |
| PROST20149250 | 0 | 0.9 | 0.4 | 0 | 0 | 0 |
| PROST20151240 | 1.3 | 0.7 | 0 | 0 | 1.2 | 0 |
| PROST20153320 | 1.4 | 1.2 | 1.8 | 1.4 | 0.3 | 1.2 |
| PROST20161950 | 0 | 0 | 0.6 | 2.2 | 1.4 | 1.2 |
| PROST20189770 | 1.1 | 1.4 | 0.8 | 2.8 | 2.8 | 2.1 |
| PUAEN20003740 | 3.1 | 0.5 | 2.8 | 1.4 | 0.5 | 2.4 |
| PUAEN20011880 | 1.3 | 2.4 | 0.4 | 0.1 | 0.3 | 0 |
| PUAEN20015260 | 0.04 | 0.04 | 7.4 | | | |
| PUAEN20025680 | 1.9 | 1 | 2.3 | 3.1 | 0.9 | 1.1 |
| PUAEN20040670 | 0.3 | 0.5 | 0.2 | 1.3 | 0.5 | 1 |
| PUAEN20045250 | 1.8 | 1.6 | 1.6 | 1.9 | 1.6 | 1.1 |
| PUAEN20078980 | 1.1 | 0.3 | 0.7 | 0.5 | 0 | 0.1 |
| PUAEN20085150 | 2 | 1 | 2.3 | 1.6 | 1.1 | 0.2 |
| SKMUS20018230 | 1.9 | 2.2 | 1.8 | 0.8 | 0.5 | 0.6 |
| SKMUS20028210 | 1.6 | 2.7 | 2.2 | 0 | 0 | 1.3 |
| SKMUS20031680 | 0.9 | 0 | 0 | 1.2 | 2.4 | 0.3 |
| SKMUS20046670 | 0.3 | 0.3 | 0.3 | | | |
| SKNSH20062340 | | | | 0.6 | 0.5 | 0 |
| SKNSH20080430 | 1.1 | 2.6 | 0.5 | 0 | 1.3 | 0 |
| SMINT20001760 | 1.8 | 1.5 | 0.7 | 0.3 | 0.1 | 0.3 |
| SMINT20013480 | 1.3 | 2.1 | 0.9 | | | |
| SMINT20014580 | 2.7 | 2.1 | 1.4 | 1.2 | 0 | 0.6 |
| SMINT20033400 | 2.6 | 1.7 | 1.4 | | | |
| SMINT20047810 | 2.2 | 0.7 | 0.5 | | | |
| SMINT20051610 | 0.1 | 0.1 | 0.3 | 0.4 | 0.1 | 0.5 |
| SMINT20056210 | | | | 0.9 | 1.8 | 0 |
| SMINT20060780 | 0.2 | 0.6 | 0.5 | 0.04 | 0.04 | 0.04 |
| SMINT20080540 | | | | 0 | 0 | 0 |
| SMINT20105000 | | | | 0 | 1.1 | 0.3 |
| SMINT20108530 | 1.3 | 1.5 | 0 | 0.04 | 0.04 | 0.04 |
| SMINT20122850 | 0.04 | 0.04 | 0.04 | 0.04 | 0.04 | 0.04 |
| SMINT20122910 | | | | 0.3 | 0.3 | 0.3 |
| SMINT20153530 | 4.8 | 4.6 | 5.6 | 2.7 | 1.5 | 1.8 |
| SMINT20161220 | 8.5 | 6.2 | 19.5 | 2 | 1.1 | 1 |
| SMINT20163960 | 0.6 | 0.5 | 1.4 | 0 | 0 | 0 |
| SMINT20164770 | 2.4 | 2.1 | 1.6 | 1.8 | 1.2 | 1 |
| SMINT20168570 | 0 | 0 | 0 | | | |
| SPLEN20008820 | 2.5 | 2.3 | 2.7 | 1.6 | 1.3 | 0.8 |
| SPLEN20011410 | 0.4 | 0.4 | 0.1 | | | |
| SPLEN20013540 | 1.6 | 0.9 | 1.1 | 2.4 | 1.4 | 1.8 |
| SPLEN20019450 | 1 | 1.8 | 1.2 | 0.2 | 0.6 | 0.4 |
| SPLEN20022230 | 4.5 | 6.2 | 3.9 | 1.4 | 1.1 | 1.6 |
| SPLEN20040600 | 3.2 | 4.5 | 3.6 | 0 | 0 | 0 |
| SPLEN20076530 | 0.04 | 0.04 | 0.04 | 0 | 0 | 0 |
| SPLEN20101190 | 0.3 | 0.2 | 0.6 | 1.6 | 0 | 0 |
| SPLEN20126190 | 2.5 | 3.4 | 2.8 | 5.2 | 3.5 | 3.1 |
| SPLEN20152760 | 4.2 | 3 | 3.2 | 1.2 | 0.8 | 1.6 |
| SPLEN20157300 | 0.4 | 0.5 | 2.5 | | | |
| SPLEN20158990 | 1.9 | 0.9 | 2.6 | 1.1 | 1.1 | 1.3 |
| SPLEN20163560 | 0.3 | 0.6 | 0.3 | 0 | 0 | 0 |
| SPLEN20174260 | 0.4 | 0 | 0 | 0.3 | 0.1 | 0.1 |
| SPLEN20211570 | 2.3 | 2.3 | 2.2 | 1 | 2.1 | 1.4 |
| SPLEN20214580 | 0.04 | 0.6 | 0.9 | 1.4 | 1.3 | 2.6 |
| SPLEN20245300 | 3.1 | 2.6 | 1.9 | 0.6 | 0 | 0.2 |
| SPLEN20279950 | 0.8 | 2.1 | 0.3 | | | |
| SPLEN20280660 | 0.6 | 0.5 | 1 | 0 | 0 | 0 |
| SPLEN20283650 | 1.8 | 1 | 0.8 | 0.8 | 0 | 0 |
| SPLEN20329240 | | | | 0.2 | 0 | 0 |
| STOMA20010250 | 2 | 0.9 | 1 | 0 | 0 | 0.7 |
| STOMA20032890 | 0.9 | 1.5 | 0.4 | | | |
| STOMA20048520 | 0.04 | 2 | 0.4 | 0 | 0.9 | 0 |
| STOMA20057820 | 1.3 | 1 | 0 | 4.3 | 4.1 | 0 |
| STOMA20062290 | 0.4 | 0.6 | 0.4 | 0.3 | 0.3 | 0.2 |
| STOMA20076800 | 1.1 | 0.7 | 0.6 | 1.2 | 0.6 | 0.3 |
| TESTI20001170 | 0 | 0 | 0 | 0.8 | 0.6 | 0.7 |
| TESTI20002780 | | | | 0 | 0 | 0 |
| TESTI20004890 | 1.1 | 0.7 | 0.6 | 0 | 0.2 | 0.4 |
| TESTI20011200 | 6.3 | 3.7 | 5.9 | 0.5 | 0.04 | 0.2 |
| TESTI20018230 | 0 | 0 | 0 | 0.04 | 0.04 | 0.04 |
| TESTI20035960 | 0.1 | 0 | 0 | 0.04 | 0.04 | 0.04 |
| TESTI20038270 | | | | 0 | 0 | 0 |
| TESTI20044230 | 0 | 0 | 0 | 0.6 | 0.2 | 0.2 |
| TESTI20046750 | 0.4 | 0.04 | 0.04 | 1 | 0.8 | 0 |
| TESTI20060400 | 1.2 | 2 | 0.2 | 0.7 | 0.5 | 0.04 |
| TESTI20066770 | 0 | 0 | 0 | 0.04 | 0.04 | 0.04 |
| TESTI20076850 | 0 | 0.6 | 0 | 0.04 | 0.04 | 0.04 |
| TESTI20083940 | 0.9 | 1.5 | 1.4 | 0 | 1.2 | 1.3 |
| TESTI20087620 | 0.8 | 2.3 | 0.8 | 1.1 | 0.04 | 0.1 |
| TESTI20098530 | | | | 5.3 | 1.2 | 0 |
| TESTI20105720 | 2.7 | 3.5 | 2.5 | 0.04 | 0.1 | 0.04 |
| TESTI20108720 | 0.04 | 1.5 | 1.1 | 2.5 | 2.1 | 1.8 |
| TESTI20123080 | | | | 6 | 0 | 0 |
| TESTI20128350 | | | | 1.4 | 1.6 | 0 |
| TESTI20136100 | 3.1 | 1.9 | 2.1 | | | |
| TESTI20137670 | | | | 0.4 | 0.4 | 0.4 |
| TESTI20143240 | 0.2 | 0.1 | 0.1 | 0.3 | 0.04 | 0.3 |
| TESTI20143620 | 0.04 | 0 | 0 | | | |
| TESTI20156100 | 0.1 | 0.04 | 0.1 | | | |
| TESTI20161970 | 1.2 | 0.7 | 0 | 1.1 | 0.4 | 1 |
| TESTI20168480 | | | | 0.5 | 5.7 | 0.5 |
| TESTI20168960 | | | | 0.5 | 0.5 | 0.5 |
| TESTI20178160 | 0.04 | 0.04 | 0.04 | 0.04 | 0.04 | 0.04 |
| TESTI20185810 | | | | 0.9 | 0 | 0 |
| TESTI20199170 | 0.7 | 0 | 0 | 0.9 | 0.8 | 0 |
| TESTI20200260 | | | | 0.3 | 0 | 0 |
| TESTI20200710 | 3.9 | 2.6 | 2.4 | 2.5 | 3.5 | 2.9 |
| TESTI20202650 | 0.04 | 0.04 | 0.04 | 1 | 1.2 | 0.3 |
| TESTI20220100 | 0 | 5.7 | 0 | | | |
| TESTI20224620 | | | | 0 | 0 | 1.5 |
| TESTI20229600 | 0 | 0 | 0 | | | |
| TESTI20230850 | 0.04 | 0.04 | 0 | 0.04 | 0.04 | 0.04 |
| TESTI20231920 | | | | 0.5 | 0.5 | 0.5 |
| TESTI20234140 | | | | 1.8 | 0.3 | 0.3 |
| TESTI20234270 | 2.6 | 2.8 | 2.9 | 0.5 | 0.04 | 0.3 |
| TESTI20238000 | 0.2 | 0 | 0.04 | 0.04 | 0.04 | 0.04 |
| TESTI20238610 | | | | 0.04 | 0.04 | 0.04 |
| TESTI20239510 | 0 | 0.2 | 0 | 0.04 | 0.2 | 1 |
| TESTI20242990 | 1.8 | 2.1 | 1.8 | 0 | 0 | 0 |
| TESTI20265250 | 2.1 | 1.6 | 1.9 | 1.5 | 0.8 | 0.4 |
| TESTI20265370 | 0.04 | 0.04 | 0.04 | 0.04 | 0.04 | 0.04 |
| TESTI20266740 | 0.2 | 0 | 0.7 | 0.04 | 0.04 | 0.04 |
| TESTI20272390 | 1.3 | 1.2 | 0.8 | 0.2 | 0.2 | 0.4 |
| TESTI20275030 | 0 | 0 | 0 | 0 | 0 | 0.3 |
| TESTI20275620 | 1.3 | 0.04 | 0.7 | | | |
| TESTI20277360 | 0 | 0 | 0 | | | |
| TESTI20282540 | 0.04 | 0 | 0.1 | 0.2 | 0.04 | 0.3 |
| TESTI20284880 | 0.4 | 0.2 | 0.1 | 0.04 | 0 | 0.1 |
| TESTI20285830 | 0.04 | 0.04 | 0.04 | | | |
| TESTI20288110 | | | | 1.2 | 0 | 0 |
| TESTI20289850 | 0.04 | 0 | 0 | 0.04 | 0.04 | 0.04 |
| TESTI20307540 | | | | 0.6 | 0.8 | 0 |
| TESTI20308600 | | | | 0.5 | 1.2 | 0.5 |
| TESTI20311290 | 0 | 0 | 0 | 0 | 0 | 0.7 |
| TESTI20317600 | 0 | 0 | 0 | 0.04 | 0.04 | 0.04 |
| TESTI20319190 | 0.2 | 0 | 0 | 0.04 | 0.04 | 0.3 |
| TESTI20332420 | 0.6 | 0.1 | 0.9 | | | |
| TESTI20335200 | | | | 0.9 | 1.4 | 0.9 |
| TESTI20342430 | 0 | 2.8 | 0 | 0.6 | 0.6 | 0.5 |
| TESTI20345060 | | | | 0.1 | 0 | 0.04 |
| TESTI20347300 | 0.9 | 0.6 | 1.4 | 0.04 | 0 | 0 |
| TESTI20357960 | 1 | 1 | 1.7 | 2.7 | 1.3 | 1.7 |
| TESTI20361140 | 0.04 | 0.04 | 0.04 | 0.2 | 0 | 0 |
| TESTI20369220 | 0.04 | 0.04 | 0.04 | | | |
| TESTI20369690 | 1.5 | 0 | 1.3 | 1.3 | 1.4 | 1 |
| TESTI20370020 | 0.4 | 1.7 | 0.1 | | | |
| TESTI20371030 | 1.3 | 1.3 | 1 | 0.8 | 0.5 | 0.5 |
| TESTI20386230 | 2 | 0.2 | 0.3 | | | |
| TESTI20391210 | 0.6 | 2.3 | 4.9 | 3.1 | 0 | 2.4 |
| TESTI20392090 | 0 | 0 | 0.04 | 0.04 | 0.04 | 0.7 |
| TESTI20392250 | 9.3 | 7.8 | 3.8 | | | |
| TESTI20392270 | 1.8 | 1.4 | 1.6 | 1.1 | 1.6 | 1.1 |
| TESTI20401020 | 0.2 | 0.5 | 0.8 | 0 | 0 | 0 |
| TESTI20401430 | 4.3 | 4.8 | 4.3 | | | |
| TESTI20409440 | 1.4 | 0.5 | 0.3 | 0.5 | 0 | 0.3 |
| TESTI20415640 | 0.8 | 2.5 | 1 | 0 | 0 | 0 |
| TESTI20424000 | 0.2 | 0.04 | 0.04 | 0 | 0 | 0 |
| TESTI20424730 | 1.8 | 0.7 | 2.9 | 3.8 | 0 | 3.3 |
| TESTI20425070 | 2.3 | 2.4 | 2.6 | 1.9 | 1.4 | 1.2 |
| TESTI20433130 | | | | 0 | 0 | 0 |
| TESTI20438570 | 0.8 | 0.6 | 0.6 | 0.8 | 0.6 | 1.2 |
| TESTI20443090 | 0.1 | 0.1 | 0.1 | 0.3 | 0.5 | 0.6 |
| TESTI20463520 | | | | 0 | 0 | 0 |
| TESTI20465520 | 0.6 | 0.6 | 0.5 | 0.2 | 0 | 0.1 |
| TESTI20478010 | 0.9 | 1.7 | 0.7 | 0 | 0.3 | 0 |
| TESTI20478180 | 0.04 | 0.04 | 0.04 | 0.04 | 0 | 0 |
| THYMU20029100 | 1.9 | 1.2 | 2.3 | 2 | 2.9 | 2.5 |
| THYMU20061700 | 0 | 0 | 0 | 0.7 | 0.2 | 0.2 |
| THYMU20095960 | 2.9 | 2.4 | 0.5 | | | |
| THYMU20111180 | 1.1 | 0.6 | 0.5 | 0 | 0 | 0 |
| THYMU20118060 | 0.2 | 0 | 0.2 | 0.04 | 0.04 | 0.04 |
| THYMU20130890 | 0.6 | 1.3 | 3.3 | | | |
| THYMU20142040 | 1 | 1.1 | 0.7 | 1.3 | 1.1 | 1 |
| THYMU20142970 | 4 | 3.5 | 3.8 | 1.6 | 2 | 0.6 |
| THYMU20153160 | 1 | 0.7 | 1 | 0.1 | 0.1 | 0.04 |
| THYMU20158250 | 10.4 | 7 | 5.5 | 1.1 | 0 | 0 |
| THYMU20187720 | 3.2 | 3.2 | 2.8 | 2.4 | 2.2 | 2.3 |
| THYMU20194360 | 1.8 | 2.1 | 1.7 | 0.4 | 0.3 | 1.3 |
| THYMU20208300 | 1.9 | 1.9 | 1.6 | 0.3 | 0.2 | 0.3 |
| THYMU20226600 | 3 | 0 | 1.4 | 1.1 | 0.3 | 2.6 |
| THYMU20239000 | 2.1 | 2.3 | 2.8 | 1.4 | 0.8 | 1.1 |
| THYMU20253250 | 1.1 | 0.3 | 0.3 | | | |
| THYMU20272490 | 2.7 | 1.4 | 0.6 | 0.04 | 0.04 | 0.04 |
| THYMU20284120 | 3.8 | 4.1 | 4 | 0.4 | 0.04 | 0.5 |
| THYMU20286290 | 0 | 2.1 | 0.4 | 3.1 | 2.5 | 1.7 |
| TKIDN10000010 | 2.2 | 2.2 | 2.5 | 1.2 | 1 | 1.1 |
| TRACH20005020 | 0 | 0 | 0 | 2.8 | 0.9 | 0.5 |
| TRACH20032720 | 0.1 | 0 | 0 | 0.6 | 0.04 | 0.1 |
| TRACH20041830 | | | | 0.8 | 0.2 | 0.9 |
| TRACH20060150 | 0.2 | 0.9 | 2 | | | |
| TRACH20076760 | 5.1 | 4.9 | 4.5 | 0.6 | 0.5 | 0.4 |
| TRACH20082780 | | | | 0 | 0 | 0 |
| TRACH20091230 | 0.4 | 0 | 0.2 | 2.1 | 1.1 | 1.2 |
| TRACH20099340 | 1.8 | 3.8 | 4.9 | 1.9 | 2.5 | 0.9 |
| TRACH20109650 | 3.5 | 3.3 | 3.5 | 3.7 | 3.7 | 3.4 |
| TRACH20115740 | 0.04 | 0.04 | 0.04 | | | |
| TRACH20134950 | 5.6 | 5 | 4 | 3.5 | 1.2 | 1.9 |
| TRACH20135520 | 1 | 0.9 | 0.6 | 0.9 | 0.9 | 0.5 |
| TRACH20153810 | 2.1 | 0 | 0 | | | |
| TRACH20184490 | 2.2 | 3.2 | 2.8 | 1.6 | 0 | 0 |
| TSTOM20001390 | 1.5 | 2.1 | 1.8 | 2.5 | 0.4 | 2.5 |
| TSTOM20005690 | 1.3 | 0.8 | 1.1 | 0.3 | 0 | 0.1 |
| UMVEN10001560 | 2.4 | 2.6 | 3.3 | 0.6 | 0 | 0.04 |
| UMVEN20003540 | 5.2 | 3.9 | 4.9 | 3.1 | 2.4 | 2.8 |
| UTERU20004240 | 0.04 | 0.2 | 0.1 | 0.04 | 0 | 0.04 |
| UTERU20046980 | | | | 0 | 0 | 0 |
| UTERU20055930 | 2.5 | 3.6 | 2.9 | 2.3 | 1.6 | 2.5 |
| UTERU20068990 | 0.04 | 1.3 | 0.04 | 0.1 | 0 | 0 |
| UTERU20070810 | 2.7 | 1.9 | 2.4 | 1.9 | 1.3 | 1.1 |
| UTERU20115740 | 3.1 | 3.2 | 5 | 2.3 | 1.9 | 0 |
| UTERU20119060 | 0.8 | 1.9 | 0 | 1.9 | 0.3 | 1.6 |
| UTERU20124070 | 2 | 2.7 | 1.8 | 2.8 | 2.1 | 1.8 |
| UTERU20126880 | | | | 0 | 2.2 | 0.1 |
| UTERU20134910 | 2.5 | 2.7 | 2.3 | 2.9 | 1.4 | 1.3 |
| UTERU20146680 | 0 | 0.1 | 0 | 0.5 | 0 | 0.04 |
| UTERU20176130 | 2.9 | 1.3 | 1.6 | 1.9 | 0.6 | 0.8 |
| UTERU20185230 | 3.1 | 3.2 | 1.8 | 1.6 | 1.1 | 0.6 |
| UTERU20186740 | 1.9 | 1.4 | 0.7 | 0.04 | 0 | 0 |

[0467] Homology Search Result Data

[0468] Data obtained by the homology search for full-length nucleotide sequences and deduced amino acid sequences.

[0469] In the result of the search shown below, both units, aa and bp, are used as length units for the sequences to be compared.

[0470] Each data includes Clone name, Definition in hit data, P value, Length of sequence to be compared, Homology, and Accession number (No.) of hit data. These items are shown in this order and separated by a double-slash mark, //. 3NB6910001910//ALANYL-TRNA SYNTHETASE (EC 6.1.1.7) (ALANINE--TRNA LIGASE) (ALARS). //3. 1OE-20//392aa//24%//067323 3NB6920014080 3NB6920014590//HOMEOBOX PROTEIN DLX-6.//l.OOE-91//226aa//78%//Q98877 ADIPS10000640//Homo sapiens synaptic glycoprotein SC2 (SC2) mRNA, complete cds.//1.60E-169//303aa//100%//AF222742 ADIPS20004250//ZINC FINGER PROTEIN OZF.//6.60E-27//223aa//32%//Q15072 ADRGL10001470//CYTOCHROME P450 llBl PRECURSOR (EC 1.14.15.4) (CYPXIB1) (P450C11) (STEROID 11-BETA-HYDROXYLASE).//1.60E-38//84aa//98%//P15538 ADRGL20000640 ADRGL20011190//spectrin, beta, non-erythrocytic 1 [Homo sapiens].//l.OOE- 36//250aa//38%//NP_003119 ADRGL20012870 ADRGL20013010 ADRGL20013520 ADRGL20018300//KINESIN LIGHT CHAIN (KLC).//1.20E-207//566aa//70%//Q07866 ADRGL20018540 ADRGL20028570//Rattus norvegicus MG87 mRNA, complete cds.//2.90E- 69//250aa//53%//AF095741 ADRGL20035850//CYTOCHROME P450 17 (EC 1.14.99.9) (CYPXVII) (P450-C17) (STEROID 17-ALPHA-HYDROXYLASE/17,20 LYASE).//7.30E-52//99aa//100%//P05093 ADRGL20044590 ADRGL20048330//Mus musculus mRNA for granuphilin-a, complete cds.//O//673aa//89%//AB025258 ADRGL20061930//transposon-derived Busterl transposase-like protein//6.OOE- 65//500aa//33%//NP_067034 ADRGL20067670 ADRGL20068170 ADRGL20068460 ADRGL20073570 ADRGL20076360 ADRGL20078100//NADPH:ADRENODOXIN OXIDOREDUCTASE PRECURSOR (EC 1.18.1.2) (ADRENODOXIN REDUCTASE) (FERREDOXIN-NADP(+) REDUCTASE).//3.10E- 147//276aa//99%//P22570 ADRGL20083310 ASTRO1OOO1650//DREBRIN E.//4.80E-293//540aa//99%//Q16643 ASTRO20001410 ASTR020005330 ASTRO20008010//ZINC FINGER PROTEIN 85 (ZINC FINGER PROTEIN HPF4) (HTFl).//6.OOE-57//143aa//70%//Q03923 ASTRO20012490 ASTR020027430//RAS SUPPRESSOR PROTEIN 1 (RSU-1) (RSP-1 PROTEIN) (RSP- 1).//2.20E-18//178aa//34%//Q15404 ASTRO20032120 5 ASTR020033160//BRAIN MITOCHONDRIAL CARRIER PROTEIN-1.//2.70E- 125//291aa//80%//095258 ASTRO20055750//Human elastin gene, exon 1.//2.70E-293//654aa//88%//M17282 ASTR020058630 ASTR020064750//Homo sapiens BM-003 mRNA, complete cds.//6.10E- 10 69//214aa//64%//AF208845 ASTR020072210//PERIAXIN.//2.1OE-25//87aa//56%//Q63425 ASTRO20084250//Ciona savignyi mRNA for PEM-3, complete cds.//3.50E- 56//154aa//64%//ABOO1769 ASTRO20100720 15 ASTRO20105820//ACTIN INTERACTING PROTEIN 2.//2.60E-111//392aa//56%//P46681 ASTRO20106150//H.sapiens mRNA for calpain-like protease.//1.80E- 291//473aa//98%//Y10552 ASTRO20108190//TUBERIN (TUBEROUS SCLEROSIS 2 PROTEIN).//5.30E- 278//513aa//100%//P49815 20 ASTRO20111490

[0471] ASTR020114370//Mus musculus SMAR1 iRNA, complete cds.//1.30E- 213//461aa//89%//AF235503 ASTRO20114610 ASTRO20125520//dnaj protein [Schizosaccharomyces pombe]//7.80E- 25- 37//260aa//38%//CAB59885 ASTRO20130500//UBIQUITIN-ACTIVATING ENZYME El. //2. 70E-157//815aa//42%//Q29504 ASTRO20136710 ASTRO20138020 ASTRO20141350//Mus musculus mRNA for granuphilin-b, complete cds.//7.40E- 30 12//169aa//30%//AB025259 ASTRO20143630 - ASTRO20145760//TUBULIN--TYROSINE LIGASE (EC 6.3.2.25) (TTL).//1.60E- 14//233aa//27%//P38584 ASTRO20152140 35 ASTRO20155290

[0472] ASTRO20166810 ASTRO20168470//ZINC FINGER PROTEIN 135.//4.80E-103//289aa//59%//P52742 ASTRO20173480 ASTRO20181690//oocyte-specific protein P100//1.60E-70//554aa//36%//S23468 ASTRO20190390 BEAST20004540 BGGI110000240 BGGI110001930 BGGI120006160//isomerase-like protein [Arabidopsis thaliana].//l.OOE- 52//187aa//47%//BABOO076 BLADE20003400//ZINC FINGER PROTEIN 177.//2.50E-33//205aa//38%//Q13360 BLADE20003890//ZINC FINGER PROTEIN 135.//1.50E-264//471aa//95%//P52742 BLADE20004630 BNGH420088500 BRACE20003070//Rattus norvegicus neurabin mRNA, complete cds.//2.30E- 40//172aa//46%//U72994 BRACE20006400 BRACE20011070//Mus musculus F-box protein FBX15 mRNA, partial cds.//9.60E- 142//471aa//56%//AF176530 BRACE20019540 BRACE20027620//CYTOSOLIC ACYL COENZYME A THIOESTER HYDROLASE, INDUCIBLE (EC 3.1.2.2)X (LONG CHAIN ACYL-COA THIOESTER HYDROLASE) (LONG CHAIN ACYL-COA HYDROLASE) (CTE-I) (LACH2) (ACH2).//2.70E-148//423aa//65%//088267 BRACE20037660 BRACE20038000//MAP kinase phosphatase [Drosophila melanogaster].//3.80E 83//426aa//42%//BAA89534 BRACE20038470//Rattus norvegicus neurexophilin 4 (Nph4) mRNA, complete cds.//i.70E-57//109aa//98%//AF042714 BRACE20038480//Human SEC14L mRNA, complete cds.//2.60E-93//179aa//99%//D67029 BRACE20038850 BRACE20039040 BRACE20039440//Drosophila melanogaster CHARYBDE (charybde) .mRNA, complete cds.//6.50E-17//142aa//35%//AF221109 BRACE20039540//MHC class I chain-related gene A protein [Homo sapiens]//2.OOE-116//246aa//90%//NP_000238 BRACE20050900 BRACE20051380 BRACE20051690 BRACE20052160//Xenopus laevis bicaudal-C (Bic-C) mRNA, complete cds.//2.10E- 13//208aa//30%//AF224746 BRACE20053280//Mus musculus Pdz-containing protein (Pdzx) mRNA, complete cds.//5.20E-63//223aa//64%//AF229645 BRACE20053480//Mus musculus erythroblast macrophage protein EMP mRNA, complete cds.//1.70E-133//145aa//97%//AF263247 BRACE20053630//BRITTLE-1 PROTEIN PRECURSOR.//1.20E-24//208aa//31%//P29518 BRACE20054500 BRACE20055180 BRACE20056810 BRACE20057190//NUCLEOPLASMIN.//5.20E-42//215aa//45%//P05221 BRACE20057420 BRACE20057620//EUKARYOTIC TRANSLATION INITIATION FACTOR 4E (EIF-4E) (EIF4E) (MRNA CAP-BINDING PROTEIN) (EIF-4F 25 KDA SUBUNIT).//1.OOE- 22//60aa//73%//P48597 BRACE20057730//toxin sensitivity protein KTI12 homolog//l.lOE- 10//173aa//26%//A64492 BRACE20058580//Homo sapiens HCMOGT-1 mRNA for sperm antigen, complete cds.//2.10E-178//358aa//96%//AB041533 BRACE20058810 BRACE20059370//PROTEIN 4.1 (BAND 4.1) (P4.1).//6.70E-52//400aa//32%//P1171 BRACE20060550//ANKYRIN HOMOLOG PRECURSOR.//1.30E-14//139aa//44%//Q06527 BRACE20060720 BRACE20060840 BRACE20060890//ZINC FINGER PROTEIN ZIC4 (ZINC FINGER PROTEIN OF THE CEREBELLUM 4).//4.OOE-131//264aa//87%//Q61467 BRACE20061050 BRACE20061740 BRACE20062400 BRACE20062640//HYPOTHETICAL 93.7 KDA PROTEIN F48E8.6 IN CHROMOSOME III.//9.1OE-90//343aa//45%//Q09568 BRACE20062740 BRACE20063630 BRACE20063780 BRACE20063800 BRACE20063930 BRACE20064880//POLY(RC) BINDING PROTEIN 2 (PUTATIVE HETEROGENEOUS NUCLEAR RIBONUCLEOPROTEIN X) (HNRNP X) (CTBP) (CBP).//1.80E-129//207aa//81%//Q61990 BRACE20067430 BRACE20068590//HYPOTHETICAL ZINC FINGER PROTEIN KIAA0961.//2.70E- 155//504aa//56%//Q9Y2G7 BRACE20069090 BRACE20081720 BRACE20082950 BRACE20090440 BRACE20096200//Homo sapiens sir2-related protein type 7 (SIRT7) mRNA, complete cds.//i.OOE-162//305aa//99%//AF233395 BRACE20096540 BRACE20097320 BRACE20099570 BRACE20101700 BRACE20101710 BRACE20106690 BRACE20106840//Rattus norvegicus partial mRNA for CRM1 protein.//9.OOE- 59//120aa//100%//AJ238278 BRACE20107530//Rattus norvegicus putative peroxisomal 2,4-dienoyl-CoA reductase (DCR-AKL) mRNA, complete cds.//1.70E-48//108aa//91%//AF044574 BRACE20108130//Homo sapiens RAB-like protein 2B (RABL2B) mRNA, complete cds.//1.60E-43//92aa//100%//AF095352 BRACE20108880//MALEYLACETOACETATE ISOMERASE (EC 5.2.1.2) (MAAI) (GLUTATHIONE TRANSFERASE ZETA 1) (EC 2.5.1.18).//5.90E-ll//27aa//100%//043708 BRACE20109370 BRACE20109830 BRACE20111830 BRACE20114780 BRACE20115450 BRACE20115920//RHO-GTPASE-ACTIVATING PROTEIN 4 (RHO-GAP HEMATOPOIETIC PROTEIN Cl) (P115) (KIAA0131).//9.70E-73//291aa//52%//P98171 BRACE20116110 BRACE20116460//ATP SYNTHASE DELTA CHAIN, MITOCHONDRIAL PRECURSOR (EC 3.6.1.34). //i. OOE-20//48aa//1OO%o//P30049 BRACE20118380 BRACE20121850 BRACE20136240 BRACE20141080 BRACE20142320 BRACE20142570 BRACE20147800 BRACE20148210 BRACE20148240//Gsplp [Saccharomyces cerevisiae].//l.OOE- 05//75aa//35%//NP_013396 BRACE20150310 BRACE20151320//Drosophila melanogaster Oregon R cytoplasmic basic protein (deltex) mRNA, complete cds.//6.10E-35//202aa//41%//U09789 BRACE20152870 BRACE20153680//Rattus norvegicus putative four repeat ion channel mRNA, complete cds.//4.1OE-107//209aa//99%//AF078779 BRACE20154120//Shb=Src homology 2 protein//2.60E-23//79aa//48%//AAB29780 BRACE20163150 BRACE20163350//MYELIN P0 PROTEIN PRECURSOR.//8.20E-08//92aa//33%//P20938 BRACE20165830 BRACE20171240 BRACE20172980//translation initiation factor eIF3 [Schizosaccharomyces pombe]//5.60E-06//136aa//30%//CAB11250 BRACE20175870 BRACE20177200//RAN-SPECIFIC GTPASE-ACTIVATING PROTEIN (RAN BINDING PROTEIN 1) (RANBP1).//9.90E-32//63aa//100%//P34022 BRACE20179340 BRACE20185680//ACETYL-COENZYME A SYNTHETASE (EC 6.2.1.1) (ACETATE--COA LIGASE) (ACYL- ACTIVATING ENZYME).//1.40E-16//94aa//40%//Q01576 BRACE20188470//ATP-binding cassette, sub-family A member 8//1.70E- 115//457aa//50%//NP_009099 BRACE20190040 BRACE20190440 BRACE20192440//TRANSLATION INITIATION FACTOR IF-3.//1.20E- 09//16laa//26%//P47438 BRACE20195100 BRACE20201570 BRACE20210140 BRACE20220300 BRACE20223280 BRACE20223330 BRACE20224480 BRACE20224500 BRACE20228480 BRACE20229280 BRACE20230700 BRACE20232840//ATP-binding cassette, sub-family E, member 1//0//560aa//75%//NP_00293 1 BRACE20235400 BRACE20237270//Human WW domain binding protein-2 mRNA, complete cds.//6.10E- 21//50aa//88%//U79458 BRACE20238000 BRACE20240740 BRACE20248260//H.sapiens PR264 mRNA.//1.50E-13//78aa//48%//X62447 BRACE20253160//putative trna-splicing endonuclease subunit [Schizosaccharomyces pombe]//1.1OE-11//148aa//32%//CAA21061 BRACE20253330//Homo sapiens Na+/H+exchange regulatory co-factor (NHERF) mRNA, complete cds.//5.50E-88//157aa//99%//AF036241 BRACE20257100//transcription factor (SMIF gene)//2.OOE- 37//llOaa//94%//NP_060873 BRACE20262930 BRACE20262940 BRACE20266750 BRACE20267250 BRACE20269200 BRACE20269710 BRACE20273890//Human phosphotyrosine independent ligand p62B B-cell isoform for the Lck SH2 domain mRNA, partial cds.//5.70E-25//lOOaa//65%//U46752 BRACE20274080 BRACE20276430//Homo sapiens retinoblastoma-associated protein RAP140 mRNA, complete cds.//4.70E-106//203aa//100%//AF180425 BRACE20283920 BRACE20284100//Homo sapiens beta-dystrobrevin (BDTN) mRNA, complete cds.//7.20E-121//237aa//100%//AF022728 BRACE20286360 BRACE20287410 BRALZ20013500//Homo sapiens prostate stem cell antigen (PSCA) mRNA, complete cds.//3.30E-06//122aa//32%//AF043498 BRALZ20014450 BRALZ20017430//H.sapiens mRNA for protein phosphatase 5.//1.70E- 41//99aa//87%//X89416 BRALZ20018340//H.sapiens mRNA for glutamine transaminase K.//4.70E- 93//1 14aa//98%//X82224 BRALZ20019660 BRALZ20054710//Mus musculus mRNA for cysteine and histidine-rich protein (Chrp gene).//1.70E-163//280aa//99%//AJ251516 BRALZ20058880 BRALZ20059500 BRALZ20064740 BRALZ20065600 BRALZ20069760 BRALZ20073760//MONOCYTE TO MACROPHAGE DIFFERENTIATION PROTEIN.//8.40E- 41//76aa//69%//Q15546 BRALZ20075450 BRALZ20075760 BRALZ20077900//anaphase-promoting complex 1; meiotic checkpoint regulator//3.OOE-91//19Oaa//92%//NP_073153 BRALZ20077930//Xenopus laevis 4g2 mRNA, complete cds.//1.20E- 191//501aa//71%//AF182319 BRALZ20080310 BRALZ20088690 BRAMY10001300//Homo sapiens MAGE-Elb mRNA, complete cds.//5.40E- 78//140aa//97%//AB040528 BRAMY10001570 BRAMY20000520//HETEROGENEOUS NUCLEAR RIBONUCLEOPROTEINS C1/C2 (HNRNP Cl AND HNRNP C2). //7. 1OE-70//293aa//53%//P07910 BRAMY20000860 BRAMY20002770 BRAMY20004110 BRAMY20011140 BRAMY20025840//H.sapiens mRNA from TYL gene.//7.10E-103//198aa//98%//X99688 BRAMY20039260 BRAMY20045240 BRAMY20054880//Rattus norvegicus KPL2 (Kpl2) mRNA, complete cds.//1.40E- 43//155aa//59%//AF102129 BRAMY20060920//reduced in osteosclerosis transporter//1.50E- 09//60aa//53%//NP_112471 BRAMY20063970 BRAMY20071850 BRAMY20102080 BRAMY20103570 BRAMY20104640//Mus musculus mRNA for serine/threonine protein kinase.//1.80E- 140//345aa//75%//AJ250840 BRAMY20110640 BRAMY20111960 BRAMY20112800 BRAMY20116790 BRAMY20120910//GRG PROTEIN,(ESPI PROTEIN) (AMINO ENHANCER OF SPLIT) (AES- 1/AES-2).//1.60E-97//188aa//100%//QO8117 BRAMY20121190 BRAMY20121620//Mus musculus kinesin light chain 2 (Klc2) mRNA, complete cds.//1.80E-256//500aa//85%//AF055666 BRAMY20124260//Rattus norvegicus transmembrane receptor Unc5H2 mRNA, complete cds.//2.80E-286//554aa//92%//U87306 BRAMY20134140//ATPase, H+transporting, lysosomal (vacuolar proton pump) 9kD//4.60E-29//52aa//59%//NP_003936 BRAMY20135900//CELLULAR APOPTOSIS SUSCEPTIBILITY PROTEIN.//2.OOE- 07//146aa//23%//P55060 BRAMY20136210 BRAMY20137560 BRAMY20144620 BRAMY20147540 BRAMY20148130 BRAMY20152110 BRAMY20153110//TRYPTOPHAN 5-MONOOXYGENASE (EC 1.14.16.4) (TRYPTOPHAN 5- HYDROXYLASE).//8.50E-58//201aa//58%//Q92142 BRAMY20157820//PUTATIVE KINESIN-LIKE PROTEIN C2F12.13.//1.10E- 90//341aa//50%//014343 BRAMY20160700 BRAMY20162510//MELANOMA-ASSOCIATED ANTIGEN B2 (MAGE-B2 ANTIGEN) (DAM6).//1.30E-33//209aa//35%//015479 BRAMY20163250 BRAMY20163270 BRAMY20167060 BRAMY20167710 BRAMY20168920 BRAMY20170140 -BRAMY20174550//Homo sapiens ATP-binding cassette protein M-ABC1 mRNA, nuclear gene encoding mitochondrial protein, complete cds.//O//648aa//98%//AF047690 BRAMY20178640 BRAMY20181220 BRAMY20182730 BRAMY20183080 BRAMY20184670//Homo sapiens mRNA for ALEX1, complete cds.//6.40E- 14//139aa//27%//AB039670 BRAMY20195090 BRAMY20196000 BRAMY20204450 BRAMY20205740 BRAMY20210400//Homo sapiens thyroid hormone receptor-associated protein complex component TRAP150 mRNA, complete cds.//2.80E-16//14laa//39%//AF117756 BRAMY20211390//seven in absentia (Drosophila) homolog 1 [Homo sapiens]//3.70E-156//282aa//99%//NP_003022 BRAMY20211420//Homo sapiens mRNA for LAK-4p, complete cds.//3.OOE- 31//224aa//33%//AB002405 BRAMY20213100//Xenopus laevis Mi-2 histone deacetylase complex protein 66 mRNA, complete cds.//2.1OE-66//394aa//44%//AF171099 BRAMY20215230 BRAiMY20217460//Homo sapiens cardiac voltage gated potassium channel modulatory subunit mRNA, complete cds, alternatively spliced.//3.70E- 81//158aa//98%//AF295530 BRAMY20218250//putative four repeat ion channel [Rattus norvegicus]//0//588aa//99%//AF078779 BRAMY20218670 BRAMY20229800 BRAMY20229840 BRAMY20230600 BRAMY20231720 BRAMY20240040//Homo sapiens suppressor of white apricot homolog 2 (SWAP2) mRNA, complete cds.//3.20E-301//642aa//90%//AF042800 BRAMY20242470//CORONIN-LIKE PROTEIN P57 (CORONIN lA).//1.60E- 70//21Oaa//66%//P31146 BRAMY20245300//Homo sapiens putative prostate cancer susceptibility protein HPC2/ELAC2 mRNA, complete cds.//O//737aa//99%//AF304370 BRAMY20247110//Mus musculus semaphorin cytoplasmic domain-associated protein 3A (Semcap3) mRNA, complete cds.//6.OOE-117//366aa//63%//AF127084 BRAMY20247280 BRAMY20248490 BRAMY20250240 BRAMY20250320 BRAMY20252180 BRAMY20252720//Homo sapiens mRNA for thioredoxin reductase II alpha, partial cds.//i.60E-84//16laa//99%//AB019694 BRAMY20260910//Homo sapiens zinc finger DNA binding protein 99 (ZNF281) mRNA, complete cds.//O//811aa//99%//AF125158 BRAMY20261680 BRAMY20266850//Homo sapiens oxidation protection protein (OXR1) mRNA, complete cds.//4.50E-57//193aa//56%//AF309387 BRAMY20267130 BRAMY20268990 BRAMY20270730//Fugu rubripes zinc finger protein, isotocin, fatty acid binding protein, sepiapterin reductase and vasotocin genes, complete cds.//7.80E-155//398aa//66%//U90880 BRAMY20271400//RHO-GUANINE NUCLEOTIDE EXCHANGE FACTOR (RHOGEF) (RIP2).//O//946aa//80%//P97433 BRAMY20273960 BRAMY20277140 BRAMY20277170//VOLTAGE-GATED POTASSIUM CHANNEL PROTEIN KV3.2 (KSHIIIA).//l.OOE-290//538aa//97%//P22462 BRAMY20280720 BRAMY20284910 BRAMY20285160//COMPLEMENT C3 PRECURSOR [CONTAINS: C3A ANAPHYLATOXIN].//1.90E- 79//148aa//100%//P01024 BRAMY20285930 BRAMY20286820 BRAWH10000930 BRAWH20002320//Manduca sexta death-associated small cytoplasmic leucine-rich protein SCLP mRNA, complete cds.//3.50E-18//167aa//31%//AF250910 BRAWH20004600//Mus musculus mRNA for NAKAP95, complete cds.//8.40E- 1 84//336aa//84%//AB02892 1 BRAWH20011710//cytoplasmic linker 2//1.60E-96//316aa//59%//NP_034120 BRAWH20012390//Trichomonas vaginalis mRNA for centrin (cel gene).//4.70E- 14//153aa//28%//AJ249457 BRAWH20012410 BRAWH20014920 BRAWH20015350 BRAWH20015890 BRAWH20016620//Homo sapiens mRNA for MOK protein kinase, complete cds.//3.40E-82//160aa//99%//AB022694 BRAWH20016660 BRAWH20016860 BRAWH2OO17O1O//Homo sapiens testes development-related NYD-SP22 mRNA, complete cds.//l.OOE-23//56aa//92%//AF367474 BRAWH20018730//HYPOTHETICAL 56.4 KDA PROTEIN IN SRS2-SIP4 INTERGENIC REGION.//1.90E-46//503aa//31%//P47026 BRAWH20028110//Homo sapiens actin-binding double-zinc-finger protein (abLIM) mRNA, complete cds.//9.40E-168//416aa//61%//AF005654 BRAWH20029630//Homo sapiens bet3 (BET3) mRNA, complete cds.//2.40E- 47//96aa//100%//AF041432 BRAWH20030250 BRAWH20064050//FIBULIN-1, ISOFORM C PRECURSOR.//6.30E-42//337aa//33%//P23144 BRAWH20075700//ZINC FINGER PROTEIN ZFP-1 (MKR1 PROTEIN).//1.60E- 159//332aa//84%//P08042 BRAWH20096780//ZINC FINGER PROTEIN 184 (FRAGMENT).//5.OOE- 140//514aa//52%//Q99676 BRAWH20100690 BRAWH20101360 BRAWH20103180 BRAWH20103290//GUANINE NUCLEOTIDE EXCHANGE FACTOR DBS (DBLS BIG SISTER) (MCF2 TRANSFORMING SEQUENCE-LIKE PROTEIN) (KIAA0362) (FRAGMENT).//O//756aa//99%//015068 BRAWH20105840//HYPOTHETICAL 27.0 KDA PROTEIN IN SPOOA-MMGA INTERGENIC REGION.//1.70E-21//156aa//32%//P54527 BRAWH20106180 BRAWH20107540 BRAWH20110660 BRAWH20110790 BRAWH20110960//Homo sapiens mRNA for 26S proteasome subunit p40.5, complete cds.//i.50E-175//378aa//90%//AB009398 BRAWH20111550 BRAWH20112940//POLYPEPTIDE N-ACETYLGALACTOSAMINYLTRANSFERASE (EC 2.4.1.41) (PROTEIN- UDP ACETYLGALACTOSAMINYLTRANSFERASE) (UDP-GALNAC:POLYPEPTIDE, N- ACETYLGALACTOSAMINYLTRANSFERASE) (GALNAC-Tl).//1.1OE-59//369aa//36%//Q07537 BRAWH20113430//COLD-INDUCIBLE RNA-BINDING PROTEIN (GLYCINE-RICH RNA-BINDING PROTEIN CIRP) (A18 HNRNP).//9.30E-52//104aa//96%//Q14011 BRAWH20114000//GLUTAMATE DEHYDROGENASE 1 PRECURSOR (EC 1.4.1.3) (GDH).//5.90E-233//426aa//98%//P00367 BRAWH20117950//LIVER CARBOXYLESTERASE PRECURSOR (EC 3.1.1.1) (PROLINE-BETA- NAPHTHYLAMIDASE).//1.80E-78//364aa//42%//Q29550 BRAWH20118230//BONE MORPHOGENETIC PROTEIN 7 PRECURSOR (BMP-7) (OSTEOGENIC PROTEIN 1) (OP-1).//7.60E-74//85aa//98%//P18075 BRAWH20121640//transporter protein; system Ni Na+and H+-coupled glutamine transporter//i.OOE-106//450aa//61%//NP_006832 BRAWH20122580 BRAWH20122770 BRAWH20125380//DIHYDRODIPICOLINATE SYNTHASE (EC 4.2.1.52) (DHDPS).//6.40E- 15//12laa//35%//Q57695 BRAWH2O126190 BRAWH20126980 BRAWH20128270//BH3 INTERACTING DOMAIN DEATH AGONIST (BID).//2.70E- 100//195aa//99%//P55957 BRAWH20132190//Homo sapiens putative N-acetyltransferase Camello 2 (CML2) mRNA, complete cds.//1.80E-17//llOaa//44%//AF185571 BRAWH20137480//actin binding LIM protein 1//2.80E-70//18laa//55%//NP_006710 BRAWH20138660//Homo sapiens stonin 2 mRNA, complete cds.//1.50E- 171//322aa//99%//AF255309 BRAWH20139410 BRAWH20142340 BRAWH20147290 BRAWH20149340//GUANINE NUCLEOTIDE RELEASING PROTEIN (GNRP) (P140 RAS- GRF).//4.1OE-129//290aa//83%//P28818 BRAWH20155950 BRAWH20158530 BRAWH20160280 BRAWH20162690 BRAWH20164460//TAT-BINDING HOMOLOG 7.//1.60E-95//366aa//54%//P54816 BRAWH2O166790 BRAWH20171030//Homo sapiens putative helicase RUVBL mRNA, complete cds.//2.80E-209//324aa//100%//AF218313 BRAWH20173050 BRAWH20182060 BRAWH2Ol85060 BRCAN10001490//chromobox homolog 6//2.10E-40//82aa//100%//NP_055107 BRCAN20003460//outer arm dynein intermediate chain 1//5.60E- 57//159aa//49%//T02761 BRCAN20006200 BRCAN20006390 BRCAN20054490//Sus scrofa mRNA for 54 kDa vacuolar H(+)-ATPase subunit, beta isoform.//l.OOE-117//229aa//96%//AJ223758 BRCAN20060190 BRCAN20064010 BRCAN20071190//FAF1 PROTEIN (FAS-ASSOCIATED FACTOR 1).//4.OOE- 225//433aa//96%//P54731 BRCAN20091560//Xenopus laevis mRNA for Nfrl, complete cds.//1.20E- 256//605aa//77%//D86491 BRCAN20103740//P2X PURINOCEPTOR 7 (ATP RECEPTOR) (P2X7) (PURINERGIC RECEPTOR) (P2Z RECEPTOR).//2.20E-18//60aa//78%//Q99572 BRCAN20124080 BRCAN20126130 BRCAN20143700 BRCAN20147880 BRCAN20216690 BRCAN20224720//PROTOPORPHYRINOGEN OXIDASE (EC 1.3.3.4) (PPO).//4.40E- 132//254aa//100%//P50336 BRCAN20237240 BRCAN20263400 BRCAN20273100 BRCAN20273340 BRCAN20273550 BRCAN20273640//lymphocyte specific formin related protein//3.OOE- 80//350aa//56%//NP_062653 BRCAN20275130 BRCAN20279700//Homo sapiens copine I mRNA, complete cds.//2.10E- 32//82aa//68%//U83246 BRCAN20280210//H.sapiens HZF1O mRNA for zinc finger protein.//3.30E- 54//219aa//49%//X78933 BRCAN20280360//Homo sapiens phosphatidic acid phosphohydrolase type-2c mRNA, complete cds.//8.20E-22//213aa//28%//AF047760 BRCAN20280400 BRCAN20283190//CHROMODOMAIN-HELICASE-DNA-BINDING PROTEIN 1 (CHD-1).//1.20E- 131//235aa//99%//014646 BRCAN20283380//Mus musculus mRNA for serine hydrolase protein, isoform 2 (serhl gene).//6.50E-45//103aa//80%//AJ245737 BRCAN20284600 BRCAN20285450 BRCOC10000870 BRCOC20001860//Homo sapiens endoplasmic reticulum alpha-mannosidase-I mRNA, complete cds.//6.30E-154//282aa//99%//AF145732 BRCOC20004040//Rattus norvegicus sphingosine I-phosphate receptor Edg-8 (Edg- 8) mRNA, complete cds.//4.80E-108//265aa//81%//AF233649 BRCOC20004870 BRCOC20006370//PUTATIVE SURFACE GLYCOPROTEIN C21ORF1 PRECURSOR (C21ORF3).//4.OOE-67//144aa//88%//P53801 BRCOC20008160//Homo sapiens mRNA for actin binding protein ABP620, complete cds.//4.20E-155//777aa//40%//AB029290 BRCOC20008500//Human ras inhibitor mRNA, 3 end.//4.60E- 229//428aa//100%//M37190 BRCOC20020850 BRCOC20021550//Rattus norvegicus mRNA for Nadrin, complete cds.//1.90E- 56//?47aa//55%//AB042827 BRCOC20023230 BRCOC20026640 BRCOC20027510//RAS SUPPRESSOR PROTEIN 1 (RSU-1) (RSP-1 PROTEIN) (RSP- 1).//2.20E-18//178aa//34%//Q15404 BRCOC20031000 BRCOC20031250//TRIOSEPHOSPHATE ISOMERASE (EC 5.3.1.1) (TIM).//7.10E- 38//92aa//82%//P48500 BRCOC20031870 BRCOC20035130//14-3-3 PROTEIN EPSILON (MITOCHONDRIAL IMPORT STIMULATION FACTOR L SUBUNIT) (PROTEIN KINASE C INHIBITOR PROTEIN-1) (KCIP-1) (14-3- 3E).//1.OOE-29//71aa//88%//P42655 BRCOC20037320//PUTATIVE IMPORTIN BETA-4 SUBUNIT (KARYOPHERIN BETA-4 SUBUNIT).//5.OOE-75//937aa//26%//060100 BRCOC20037400 BRCOC20041750 BRCOC20055420//GLYCYLPEPTIDE N-TETRADECANOYLTRANSFERASE 2 (EC 2.3.1.97) (PEPTIDE N- MYRISTOYLTRANSFERASE 2) (MYRISTOYL-COA:PROTEIN N- MYRISTOYLTRANSFERASE 2) (NMT 2).//7.90E-229//421aa//99%//060551 BRCOC20059510//B.taurus myosin IB mRNA, complete CDS.//1.40E- 29//1 17aa//53%//Z22852 BRCOC20074760//CDC4-LIKE PROTEIN (FRAGMENT).//4.50E-90//366aa//48%//P50851 BRCOC20077690 BRCOC20078640 BRCOC20090520 BRCOC20091960//CDC42-binding protein kinase beta (DMPK-like) [Homo sapiens]//1.50E-71//140aa//100%//NP_006026 BRCOC20093800 BRCOC20099370//Homo sapiens SPG protein (SPG) mRNA, complete -cds. //0//576aa//97%//AF302154 BRCOC20101230////7.40E-32//227aa//35%// BRCOC20105100 BRCOC20107300//Homo sapiens GTT1 mRNA, complete cds.//3.60E- 44//9Oaa//98%//AF27064⁷ BRCOC20110100 BRCOC20114180 BRCOC20117690 BRCOC20119960 BRCOC20121720 BRCOC20122290 BRCOC20128130 BRCOC20134480 BRCOC20135730 BRCOC20136750 BRCOC20144000//DNA REPAIR PROTEIN RAD8.//5.50E-14//lllaa//36%//P36607 BRCOC20147480 BRCOC20148330 BRCOC20155970 BRCOC20158240 BRCOC20176520//Rattus norvegicus mRNA for type II brain 4.1, complete cds.//2.30E-127//269aa//79%//AB032827 BRCOC20178270//ZINC FINGER PROTEIN 83 (ZINC FINGER PROTEIN HPF1).//4.90E- 101//272aa//64%//P51522 BRCOC20178560//PINCH PROTEIN (PARTICULARY INTERESTING NEW CYS-HIS PROTEIN).//9.50E-130//247aa//85%//P48059 BRHIP10001290//Homo sapiens GalNAc-T9 mRNA for UDP-GalNAc:polypeptide N- acetylgalactosaminyltransferase, complete cds.//l.lOE- 108//299aa//63%//ABO40672 BRHIP10001740 BRHIP20000870 BRHIP20001630 BRHIP20003120//Homo sapiens reticulon gene family protein (RTN3) mRNA, complete cds.//2.20E-92//19Oaa//98%//AF059524 5 BRHIP20005340//GAMMA-INTERFERON-INDUCIBLE PROTEIN IFI-16 (INTERFERON- INDUCIBLE MYELOID DIFFERENTIATION TRANSCRIPTIONAL ACTIVATOR).//2.10E- 157//407aa//77%//Q16666 BRHIP20005530//UBIQUITIN-ACTIVATING ENZYME El 1.//1.OOE- 59//318aa//41%//QO2053 10 BRHIP20096170//Homo sapiens cellular repressor of ElA-stimulated genes CREG mRNA, complete cds.//9.70E-35//174aa//39%//AF084523 BRHIP20096850//ALANINE AMINOTRANSFERASE (EC 2.6.1.2) (GLUTAMIC-PYRUVIC

[0473] TRANSAMINASE) (GPT) (GLUTAMIC--ALANINE TRANSAMINASE).//1.60E- 166//423aa//69%//P25409 15 BRHIP20103090//VACUOLAR ATP SYNTHASE SUBUNIT AC45 PRECURSOR (EC 3.6.1.34) (V-

[0474] ATPASE AC45 SUBUNIT).//2.OOE-12//82aa//47%//P40682 BRHIP20104440 BRHIP20105710 | BRHIP20106100//GAR2 PROTEIN.//1.50E-19//199aa//31%//P41891 O2 0 BRHIP20107440

[0475] BRHIP20110800 BRHIP20111200 BRHIP20115080//DYNAMIN 2 (DYNAMIN UDNM).//4.80E-63//123aa//95%//P39054 BRHIP20115760 25 BRHIP20118380

[0476] BRHIP20118910 BRHIP20119330//ZINC FINGER PROTEIN 91 (ZINC FINGER PROTEIN HTF10) (HPF7).//6.80E-207//651aa//54%//Q05481 BRHIP20121410 30 BRHIP20123140

[0477] BRHIP20129720 BRHIP20132860//Homo sapiens rhophilin-like protein mRNA, complete cds.//5.40E-144//298aa//93%//AF268032 BRHIP20135100 35 BRHIP20137230//Homo sapiens mRNA for paralemin. //l. 70E-37//352aa//35%//Y16278 BRHIP20139720 BRHIP20140630 BRHIP20142850 BRHIP20143730 BRHIP20143860 BRHIP20149540 BRHIP20153560 BRHIP20153600//Xenopus laevis RRM-containing protein SEB-4 mRNA, complete cds.//1.50E-72//148aa//93%//AF223427 BRHIP20167880//Mus musculus left-right dynein (Lrd) mRNA, complete cds.//8.10E-22//119aa//54%//AF183144 BRHIP20169680 BRHIP20169900 BRHIP20170100- BRHIP20173150 BRHIP20174040//CGMP-DEPENDENT 3,5′-CYCLIC PHOSPHODIESTERASE (EC 3.1.4.17) (CYCLIC GMP STIMULATED PHOSPHODIESTERASE) (CGS-PDE).//O//857aa//99%//000408 BRHIP20175420//Mus musculus partial mRNA for stretch responsive protein 278 (sr278 gene).//6.60E-36//170aa//50%//AJ250191 BRHIP20176420//HETEROGENEOUS NUCLEAR RIBONUCLEOPROTEINS C1/C2 (HNRNP Cl AND HNRNP C2).//9.30E-68//292aa//52%//P07910 BRHIP20179200 BRHIP20180140 BRHIP20183690 BRHIP20186120 BRHIP20186500 BRHIP20189980//FLAGELLAR WD-REPEAT PROTEIN PF20.//2.90E- 41//21Oaa//46%//P93107 BRHIP20190070 BRHIP20191490//interferon, alpha-inducible protein 27//2.60E- 36//92aa//95%//NP_0055²³ BRHIP20191770 BRHIP20191860//TRANSCRIPTJON FACTOR 4 (IMMUNOGLOBULIN TRANSCRIPTION FACTOR 2) (ITF-2) (SL3-3 ENHANCER FACTOR 2) (SEF-2).//O//569aa//99%//P15884 BRHIP20194940//Homo sapiens A-kinase anchoring protein 220 mRNA, complete cds.//1.30E-23//19Oaa//37%//AF176555 BRHIP20195890//FORKHEAD BOX PROTEIN D2 (FORKHEAD-RELATED PROTEIN FKHL17) (FORKHEAD- RELATED TRANSCRIPTION FACTOR 9) (FREAC-9).//9.lOE- 07//104aa//31%//060548 BRHIP20196410 BRHIP20198190 BRHIP20205090 BRHIP20207430 BRHIP20207990 BRHIP20208270 BRHIP20208420 BRHIP20208590 BRHIP20214950 BRHIP20217620 BRHIP20218580//Mus musculus betaPix-b mRNA, complete cds.//5.10E- 100//196aa//94%//AF247654 BRHIP20222280//ZINC FINGER PROTEIN 85 (ZINC FINGER PROTEIN HPF4) (HTFl).//1.70E-217//505aa//75%//Q03923 BRHIP20227080 BRHIP20230710 BRHIP20232290 BRHIP20233090 BRHIP20234380 BRHIP20236950 BRHIP20238600//WD-REPEAT PROTEIN SAZD.//3.30E-95//182aa//99%//Ql2788 BRHIP20238690 BRHIP20238880 BRHIP20240460 BRHIP20243470//GALECTIN-3 (GALACTOSE-SPECIFIC LECTIN 3) (MAC-2 ANTIGEN) (IGE- BINDING PROTEIN) (35 KDA LECTIN) (CARBOHYDRATE BINDING PROTEIN 35) (CBP 35) (LAMININ-BINDING PROTEIN) (LECTIN L-29).//1.1OE-16//114aa//42%//P38486 BRHIP20249110//hexokinase 1//O//912aa//71%//NP_000179 BRHIP20252450//Mus musculus Syne-IB mRNA, partial cds.//1.40E- 159//980aa//33%//AF281870 BRHIP20253660//Rattus norvegicus mRNA for Proline Rich Synapse Associated Protein 1A (ProSAPlA gene).//1.90E-120//239aa//92%//AJ249562 BRHIP20254480 BRHIP20277620 BRHIP20283030//CADHERIN-RELATED TUMOR SUPPRESSOR PRECURSOR (FAT PROTEIN).//1.40E-88//881aa//29%//P33450 BRHIP20284800 BRHIP20285830//TYPE III INTERMEDIATE FILAMENT.//8.20E-10//88aa//35%//P23729 BRHIP20285930//Homo sapiens IL-1 receptor accessory protein mRNA, complete cds.//3.30E-08//104aa//32%//AF029213 BRHIP30001110 BRHIP30004570//P-SELECTIN PRECURSOR (GRANULE MEMBRANE PROTEIN 140) (GMP-140) (PADGEM) (CD62P) (LEUKOCYTE-ENDOTHELIAL CELL ADHESION MOLECULE 3) (LECAM3).//3.60E-32//281aa//31%//Q01102 BRHIP30004880//H.sapiens mRNA for titin protein (clone hhl-hh54).//9.60E- 85//81 2aa//26%//X90568 BRSSN10000920 BRSSN20003120//METABOTROPIC GLUTAMATE RECEPTOR PRECURSOR.//7.OOE- 08//257aa//22%//P91685 BRSSN20006340 BRSSN20013420//histone deacetylase 6 [Homo sapiens] //0//81laa//99%//NP_006035 BRSSN20014260//RIBONUCLEASE INHIBITOR.//1.70E-10//195aa//29%//P29315 BRSSN20015030 BRSSN20015790//ORNITHINE DECARBOXYLASE (EC 4.1.1.17) (ODC).//9.OOE- 102//352aa//53%//P00860 BRSSN20018690//Homo sapiens NY-REN-25 antigen mRNA, partial cds.//9.30E- 41//88aa//100%//AF1⁵510³ BRSSN20021600//RING CANAL PROTEIN (KELCH PROTEIN).//3.60E- 59//51Oaa//31%//Q04652 BRSSN20028570 BRSSN20038200//RAL GUANINE NUCLEOTIDE DISSOCIATION STIMULATOR-LIKE 2 (RALGDS- LIKE FACTOR) (RAS-ASSOCIATED PROTEIN RAB2L).//3.90E-18//458aa//25%//015211 BRSSN20038410 BRSSN20039370//ZINC FINGER PROTEIN 7 (ZINC FINGER PROTEIN KOX4) (ZINC FINGER PROTEIN HF.16).//2.50E-38//94aa//52%//P17097 BRSSN20043040 BRSSN20046570 BRSSN20046790//ZINC FINGER PROTEIN 135.//8.60E-81//231aa//60%//P52742 BRSSN20046860 BRSSN20066110//Homo sapiens mRNA for mucolipidin, short form (ML4 gene).//1.70E-26//12laa//49%//AJ293659 BRSSN20097020 BRSSN20101100//GRG PROTEIN (ESP1 PROTEIN) (AMINO ENHANCER OF SPLIT) (AES- 1/AES-2).//2.50E-10//70aa//51%//Q08117 BRSSN20105870 BRSSN20105960 BRSSN20108300 BRSSN20117990 BRSSN20120810//SERINE PROTEASE HEPSIN (EC 3.4.21.-) (TRANSMEMBRANE PROTEASE, SERINE 1).//9.80E-144//254aa//100%//P05981 BRSSN20121030 BRSSN20137020 BRSSN20142940 BRSSN20146100//ADENYLATE CYCLASE, OLFACTIVE TYPE (EC 4.6.1.1) (ADENYLATE CYCLASE TYPE III) (ATP PYROPHOSPHATE-LYASE) (ADENYLYL CYCLASE).//O//389aa//90%//P21932 BRS5SN20151990 BRSSN20152380 BRSSN20159070 BRSSN20159820 BRSSN20169050 BRSSN20176820//Mus musculus p300 transcriptional cofactor JMY mRNA, complete cds.//8.50E-297//640aa//89%//AF201390 BRSSN20177570 BRSSN20187310//ANKYRIN 1 (ERYTHROCYTE ANKYRIN) (ANKYRIN R) (ANKYRINS 2.1 AND 2.2).//3.20E-26//306aa//30%//P16157 BRSTN10000830 BRSTN20000580 BRSTN20002200 BRSTN20005360//TRANSLATION INITIATION FACTOR IF-2.//1.20E- 07//205aa//26%//06084 1 BRTHA20000570 BRTHA20004740//HYPOTHETICAL 41.6 KDA PROTEIN IN IMP1-HLJl INTERGENIC REGION (RF1095).//1.60E-16//310aa//27%//P28625 BRTHA20046290//NOVEL ANTIGEN 2 (NAG-2) (TSPAN-4).//7.30E- 84//153aa//100%//014817 BRTHA20046390 BRTHA20046420 CD34C30001250 CD34C30003140 CD34C30004240//H.sapiens graf gene.//1.10E-140//270aa//100%//Y10388 CD34C30004940 COLON10001350//IG ALPHA-1 CHAIN C REGION.//1.70E-196//353aa//99%//P01876 COLON20043180 COLON20093370 CTONG10000100//GUFA PROTEIN.//2.1OE-31//156aa//45%//Q06916 CTONG10000220//Mus musculus cerebellar postnatal development protein-l (Cpdl) mRNA, partial cds.//1.80E-101//220aa//90%//U89345 CTONG10000620 CTONG10000930 CTONG10000940//CYCLIN-DEPENDENT KINASE 6 INHIBITOR (P18-INK6) (CYCLIN- DEPENDENT KINASE 4 INHIBITOR C) (Pi8-INK4C).//7.20E-13//131aa//35%//Q60772 CTONG10001650 CTONG10002770//PLECTIN.//2.OOE-49//284aa//28%//P30427 CTONG20002180 CTONG20004690//CYTOCHROME B561 (CYTOCHROME B-561).//2.80E- 50//10laa//100%//P49447 CTONG20009770//26S PROTEASOME REGULATORY SUBUNIT S2 (P97) (TUMOR NECROSIS FACTOR TYPE 1 RECEPTOR ASSOCIATED PROTEIN 2) (55.11 PROTEIN).//O//908aa//99%//Q13200 CTONG20014280//Xenopus laevis fizzyl mRNA, complete cds.//2.00E- 82//479aa//38%//AF034578 CTONG20027090 CTONG20028410 CTONG20038890 CTONG20049410 CTONG20050280//ZINC FINGER PROTEIN ZFP-36 (FRAGMENT).//8.OOE- 149//490aa//55%//P16415 CTONG20052650//BYSTIN.//5.10E-60//120aa//99%//Q13895 CTONG20052900//FASCIN (ACTIN BUNDLING PROTEIN).//7.30E- 257//437aa//98%//Q16658 CTONG20075860//Homo sapiens mRNA for SPIN protein.//3.90E- 1 23//204aa//69%//Y14946 CTONG20076130//ZINC FINGER PROTEIN 185 (LIM-DOMAIN PROTEIN ZNF185) (P1- A).//l.lOE-158//327aa//89%//015231 CTONG20077790 CTONG20082690 CTONG20085950//ZINC FINGER PROTEIN 191.//5.80E-91//346aa//53%//014754 CTONG20091080//HOMEOBOX PROTEIN DLX-1.//1.OOE-54//134aa//84%//Q64317 CTONG20091320 CTONG20092570//Rattus norvegicus neural membrane protein 35 mRNA, complete cds.//1.OOE-55//300aa//49%//AF044201 CTONG20092580 CTONG20092680//Rattus norvegicus protein associating with small stress protein PASS1 (Passl) mRNA, complete cds.//1.40E-11//98aa//40%//AF168362 CTONG20092700//Mus musculus transcriptional repressor RP58 (rp58) mRNA, complete cds.//6.60E-18//162aa//35%//AF140224 CTONG20093950//Mus musculus zfh-4 mRNA for zinc-finger homeodomain protein 4, complete cds.//0//473aa//90%//ABO24499 CTONG20095270 CTONG20095290 CTONG20095340//PROBABLE CATION-TRANSPORTING ATPASE W08D2.5 IN CHROMOSOME IV (EC 3.6.1.-).//3.90E-134//500aa//37%//Q27533 CTONG20096430 CTONG20096750 CTONG20097660 CTONG20098440 CTONG20099380 CTONG20099550//TRICHOHYALIN.//4.20E-16//534aa//25%//Q07283 CTONG20099630 CTONG20100240//Mus musculus radial spokehead-L protein (Rshll) mRNA, complete cds.//1.60E-185//520aa//63%//AF329192 CTONG20101480 CTONG20103480 CTONG20105080 CTONG20105660 CTONG20106230 CTONG20106520//THREONINE SYNTHASE (EC 4.2.99.2).//6.70E- 77//347aa//40%//Q42598 CTONG20108210 CTONG20114290//PUTATIVE IMPORTIN BETA-4 SUBUNIT (KARYOPHERIN BETA-4 SUBUNIT).//i.30E-75//937aa//27%//060100 CTONG20114740//Homo sapiens NY-REN-57 antigen mRNA, partial cds.//1.70E- 37//72aa//100%//AF155114 CTONG20118150//HYPOTHETICAL 100.6 KDA TRP-ASP REPEATS CONTAINING PROTEIN C1672.07 IN CHROMOSOME III.//2.10E-150//9lOaa//36%//014053 CTONG20118250//CARBONIC ANHYDRASE (EC 4.2.1.1) (CARBONATE DEHYDRATASE).//3.30E-88//257aa//62%//Q92051 CTONG20119200//Homo sapiens NY-REN-57 antigen mRNA, partial cds.//l.OOE- 18//41aa//100%//AF155114 CTONG20120770 CTONG20121010//ZINC FINGER PROTEIN 29 (ZFP-29).//7.80E- 131//380aa//58%//Q07230 CTONG20121580//KINESIN-LIKE PROTEIN KIFlA.//3.50E-148//395aa//59%//P33173 CTONG20124010 CTONG20124220//STEROL REGULATORY ELEMENT BINDING PROTEIN-1 (SREBP-1) (STEROL REGULATORY ELEMENT-BINDING TRANSCRIPTION FACTOR 1).//O//691aa//98%//P36956 CTONG20124470 CTONG20124730 CTONG20125540//PTB-ASSOCIATED SPLICING FACTOR (PSF).//6.90E- 07//144aa//29%//P23246 CTONG20125640//60S ACIDIC RIBOSOMAL PROTEIN PO (L1OE).//7.50E- 137//306aa//89%//P05388 CTONG20126070 CTONG20127450//H.sapiens mRNA for Ndr protein kinase.//4.50E- 1 1//37aa//89%//Z35102 CTONG20128430//Human non-lens beta gamma-crystallin like protein (AIM1) mRNA, partial cds.//8.40E-127//616aa//40%//U83115 CTONG20128470 CTONG20129960//Mus musculus F-box protein FBX18 mRNA, partial cds.//O//905aa//92%//AF184275 CTONG20131490 CTONG20131560//NEUROBLAST DIFFERENTIATION ASSOCIATED PROTEIN AHNAK (DESMOYOKIN) (FRAGMENTS).//O//632aa//99%//Q09666 CTONG20132220 CTONG20133390//ZINC FINGER PROTEIN 135.//l.OOE-139//416aa//57%//P52742 CTONG20133480 CTONG20133520//ZINC FINGER PROTEIN 228.//1.50E-163//670aa//50%//Q9UJU3 CTONG20136300 CTONG20138030 CTONG20139070 CTONG20139340 CTONG20139860//Homo sapiens nasopharyngeal carcinoma susceptibility protein LZ16 mRNA, complete cds.//3.50E-17//162aa//36%//AF121775 CTONG20140320 CTONG20140580//HepA-related protein//8.80E-61//345aa//42%//NP_054859 CTONG20141650 CTONG20143690 CTONG20146300 CTONG20146970 CTONG20147050 CTONG20149460//RING CANAL PROTEIN (KELCH PROTEIN).//1.20E- 56//556aa//27%//Q04652 CTONG20149950 CTONG20150910 CTONG20153300//H.sapiens mRNA for tre oncogene (clone 210).//4.80E- 214//259aa//78%//X63546 CTONG20153580//Homo sapiens leucine-rich repeats containing F-box protein FBL3 mRNA, complete cds.//4.80E-37//326aa//28%//AF186273 CTONG20155180 CTONG20155400 CTONG20156780//Rattus norvegicus PGCl mRNA for PPAR gamma coactivator, complete cds.//1.80E-72//176aa//46%//AB025784 CTONG20158040//UDP-N-ACETYLGLUCOSAMINE PYROPHOSPHORYLASE (EC 2.7.7.23) (ANTIGEN X) (AGX) (AGX-1) (SPERM-ASSOCIATED ANTIGEN 2).//4.9OE- 126//376aa//61%//Q16222 CTONG20158150 CTONG20158660//Rattus norvegicus mRNA for seven transmembrane receptor, complete cds.//5.90E-99//632aa//36%//AB019120 CTONG20159530//GLYPICAN-1 PRECURSOR.//3.40E-118//222aa//100%//P35052 CTONG20160560 CTONG20161850 CTONG20162170 CTONG20163550 CTONG20164990 CTONG20165050 CTONG20186320//RING CANAL PROTEIN (KELCH PROTEIN).//3.70E- 1 9//290aa//26%//Q04652 CTONG20200310//mitotic control protein dis3 homolog //1.20E- 11 3//655aa//36%//JEO110 CTONG20265130 CTONG20267700 CTONG20273610 D30ST10001090 D30ST10002670 D30ST10002700 D30ST20006180//Drosophila melanogaster slingshot mRNA, complete cds.//9.20E- 1 14//358aa//56%//AB036834 D30ST20006540 D30ST20007340 D30ST20013280//ARP2/3 COMPLEX 16 KDA SUBUNIT (P16-ARC).//l.lOE- 48//103aa//99%//015511 D30ST20024170 D30ST20024360//Homo sapiens neuroendocrine differentiation factor mRNA, complete cds.//4.70E-35//80aa//100%//AF219226 D30ST20024520 D30ST20036070 D30ST20037970 D30ST20038560 D30ST30002580 D30ST30002910 D60ST20003580//H.sapiens mRNA for aminopeptidase P-like.//7.40E- 70//103aa//99%//X95762 D60ST20004450 D60ST20005070 D9OST20000310 D90ST20002780 D90ST20015470//Mus musculus MPS1 gene and mRNA, 3end.//4.60E- 147//329aa//79%//L20315 D90ST20023970//CARTILAGE GLYCOPROTEIN-39 PRECURSOR (GP-39) (39 KDA SYNOVIAL PROTEIN) (YKL-40) (CHITINASE-3 LIKE 1).//1.30E-17//44aa//90%//P36222 D90ST20026730//Homo sapiens caspase recruitment domain protein 7 mRNA, complete cds.//2.40E-141//524aa//40%//AF298548 D9OST20031370//Homo sapiens mRNA for partial putative TCPTP-interacting protein (ptpip5 gene).//3.40E-39//176aa//48%//AJ242719 D90ST20033970//ZINC FINGER PROTEIN 91 (ZINC FINGER PROTEIN HTF10) (HPF7).//2.50E-152//541aa//52%//Q05481 D90ST20035800 D90ST20035940//BRAIN MITOCHONDRIAL CARRIER PROTEIN-i.//9.lOE- 93//216aa//80%//095258 D90ST20040180//OLFACTORY RECEPTOR-LIKE PROTEIN OLF4.//1.20E- 106//301aa//64%//Q95157 DFNES10000030 DFNES10001850 DFNES20001530//ATAXIN 7 (SPINOCEREBELLAR ATAXIA TYPE 7 PROTEIN).//2.30E- 25//98aa//57%//015265 DFNES20010910 DFNES20014040//TRICHOHYALIN.//1.70E-17//380aa//26%//P37709 DFNES20025880 DFNES20031920//Drosophila melanogaster mRNA for fucosyltransferase homologue (FucTB gene).//8.40E-18//133aa//36%//AJ302046 DFNES20037420//G1 TO S PHASE TRANSITION PROTEIN 1 HOMOLOG (GTP-BINDING PROTEIN GST1-HS).//i.OOE-274//499aa//99%//P15170 DFNES20055270 DFNES20071130//PHOSPHOTRIESTERASE RELATED PROTEIN (PARATHION HYDROLASE- RELATED PROTEIN).//4.40E-141//233aa//86%//Q60866 DFNES20082800 FCBBF10000240 FCBBF10000380 FCBBF10000630//Homo sapiens huntingtin interacting protein HYPB mRNA, partial cds.//3.70E-16//36aa//100%//AF049610 FCBBF10000770//Homo sapiens REC8 mRNA, partial cds.//6.10E- 266//528aa//96%//AF132734 FCBBF10001150//Homo sapiens protocadherin beta 14 (PCDH-betal4) mRNA, complete cds.//4.1OE-308//717aa//79%//AF152493 FCBBF10001210//Homo sapiens mRNA for SHPS-1, complete cds.//6.90E- 22//135aa//43%//D86043 FCBBF10001550 FCBBF10001710//ZINC FINGER PROTEIN 83 (ZINC FINGER PROTEIN HPF1).//1.90E- 131//397aa//59%//P51522 FCBBF10001820//CITRATE LYASE BETA CHAIN (EC 4.1.3.6) (CITRASE) (CITRYL-COA LYASE SUBUNIT) (EC 4.1.3.34).//3.70E-32//294aa//27%//053078 FCBBF10002430 FCBBF10002700 FCBBF10002800 FCBBF10003220 FCBBF10003670//QUEUINE TRNA-RIBOSYLTRANSFERASE (EC 2.4.2.29) (TRNA-GUANINE TRANSGLYCOSYLASE) (GUANINE INSERTION ENZYME). //2. 60E-195//308aa//100%//P54578 FCBBF10003740 FCBBF10003760 FCBBF10003770//Homo sapiens mRNA for GRIP1 protein.//O//572aa//99%//AJ133439 FCBBF10004120 FCBBF10004370//ZINC FINGER PROTEIN 33A (ZINC FINGER PROTEIN KOX31) (KIAA0065) (HA0946) (FRAGMENT).//3.30E-96//292aa//52%//Q06730 FCBBF10005060//CELLULAR RETINALDEHYDE-BINDING PROTEIN (CRALBP).//8.40E- 51//260aa//41%//P10123 FCBBF10005460//Mus musculus putative neuronal cell adhesion molecule (Punc) mRNA, complete cds.//9.20E-275//484aa//94%//AF026465 FCBBF10005500 FCBBF10005740//MITOCHONDRIAL CARRIER PROTEIN YMC2 PRECURSOR.//1.10E- 27//194aa//38%//P38087 FCBBF20006780 FCBBF20014270//ACYL-COA-BINDING PROTEIN (ACBP) (DIAZEPAM BINDING INHIBITOR) (DBI) (ENDOZEPINE) (EP).//1.40E-34//85aa//81%//P45882 FCBBF20023700 FCBBF20032970 FCBBF26035280 FCBBF20042170//Homo sapiens NIBAN mRNA, complete cds.//1.90E- 177//345aa//100%//AB050477 FCBBF20042560 FCBBF20049300//NEURONAL OLFACTOMEDIN-RELATED ER LOCALIZED PROTEIN PRECURSOR (NOEL) (lB426B).//7.70E-64//187aa//63%//Q62609 FCBBF20051220 FCBBF20054280 FCBBF20056370 FCBBF20059090//ZINC FINGER PROTEIN 44 (ZINC FINGER PROTEIN KOX7) (FRAGMENT).//2.OOE-08//96aa//34%//P15621 FCBBF20064520//HETEROGENEOUS NUCLEAR RIBONUCLEOPROTEINS C1/C2 (HNRNP Cl AND HNRNP C2).//5.50E-70//293aa//53%//P07910 FCBBF20067810//SPOOB-ASSOCIATED GTP-BINDING PROTEIN.//1.30E- 51//275aa//42%//P20964 FCBBF20068820//ZINC FINGER PROTEIN 83 (ZINC FINGER PROTEIN HPF1).//1.50E- 74//216aa//62%//P51522 FCBBF20071860 FCBBF20072650 FCBBF20075560 FCBBF20076330 FCBBF30001840 FCBBF30007680//Homo sapiens general transcription factor 2-I (GTF2I) mRNA, alternatively spliced product, complete cds.//4.80E-56//14laa//72%//AF038968 FCBBF30008470 FCBBF30010810//ZINC FINGER PROTEIN 85 (ZINC FINGER PROTEIN HPF4) (HTFl).//7.10E-173//436aa//70%//Q03923 FCBBF30012350//CALCIUM/CALMODULIN-DEPENDENT PROTEIN KINASE TYPE II GAMMA CHAIN (CAM- KINASE II GAMMA CHAIN) (EC 2.7.1.123) (CAMK-II, GAMMA SUBUNIT).//8.80E-143//291aa//92%//P11730 FCBBF30012810//Homo sapiens ubiquitin-specific processing protease mRNA, complete cds.//i.1OE-123//450aa//49%//AF229438 FCBBF30013770//Rattus norvegicus dnchc2 mRNA for cytoplasmic dynein heavy chain, complete cds.//O//806aa//93%//AB041881 FCBBF30015940//Chlamydomonas reinhardtii dhcl gene for 1-alpha dynein heavy chain.//4.90E-228//831aa//52%//AJ243806 FCBBF30016320 FCBBF30016570 FCBBF30018550//Homo sapiens putative zinc finger protein mRNA, complete cds.//9.40E-90//560aa//35%//AF251039 FCBBF30019120 FCBBF30024750//SEMAPHORIN 4F PRECURSOR (SEMAPHORIN W) (SEMA W).//2.OOE- 73//129aa//100%//095754 FCBBF30025560//NERVOUS-SYSTEM SPECIFIC OCTAMER-BINDING TRANSCRIPTION FACTOR N-OCT 3 (BRAIN-SPECIFIC HOMEOBOX/POU DOMAIN PROTEIN 2) (BRN-2 PROTEIN) [CONTAINS: N-OCT 5A; N-OCT 5B].//4.30E-171//203aa//100%//P20265 FCBBF30028180 FCBBF30033050 FCBBF30039020//GROWTH-ARREST-SPECIFIC PROTEIN 2.//1.80E- 68//194aa//64%//043903 FCBBF30049550//ANKYRIN 2 (BRAIN ANKYRIN) (ANKYRIN B) (ANKYRIN, NONERYTHROID).//O//1016aa//99%//Q01484 FCBBF30052180 FCBBF30054440 FCBBF30057290//Homo sapiens GIOT-4 mRNA for gonadotropin inducible transcription repressor-4, complete cds.//8.90E-258//642aa//68%//AB0216⁴4 FCBBF30062880 FCBBF30070770 FCBBF30071520 FCBBF30078290 FCBBF30083620//PLEXIN 4 PRECURSOR (TRANSMEMBRANE PROTEIN SEX).//5.80E- 146//344aa//77%//P51805, FCBBF30083820//Homo sapiens C2H2 (Kruppel-type) zinc finger protein mRNA, complete cds.//1.50E-14//142aa//38%//AF159567 FCBBF30086440 FCBBF30090690//Homo sapiens HT017 mRNA, complete cds.//8.60E- 54//311aa//38%//AF225421 FCBBF30095260 FCBBF30123470 FCBBF30129630//ZINC FINGER PROTEIN 85 (ZINC FINGER PROTEIN HPF4) (HTF1).//9.50E-98//228aa//73%//Q03923 FCBBF30170590 FCBBF30172550 FCBBF30175310//ETHANOLAMINEPHOSPHOTRANSFERASE (EC 2.7.8.1) (ETHPT).//2.10E- 38//401aa//28%//P22140 FCBBF30178730 FCBBF30189490 FCBBF30190850//E-SELECTIN PRECURSOR (ENDOTHELIAL LEUKOCYTE ADHESION MOLECULE 1) (ELAM-1) (LEUKOCYTE-ENDOTHELIAL CELL ADHESION MOLECULE 2) (LECAM2) (CD62E).//6.10E-30//275aa//31%//P16581 FCBBF30195640//Homo sapiens ALR-like protein mRNA, complete cds.//9.10E- 188//331aa//99%//AF264750 FCBBF30199610 FCBBF30215060 FCBBF30225660 FCBBF30233680 FCBBF30238870//PROTEIN KINASE C-BINDING PROTEIN NELL2 PRECURSOR (NEL-LIKE PROTEIN 2).//O//641aa//99%//Q99435 FCBBF30240020 FCBBF30240960//ZINC FINGER PROTEIN 136.//8.30E-131//338aa//65%//P52737 FCBBF30242250 FCBBF30243640//PROTEIN ARGININE N-METHYLTRANSFERASE 2 (EC 2.1.1.-).//6.40E- 53//102aa//100%//P55345 FCBBF30246230//Homo sapiens C2H2 (Kruppel-type) zinc finger protein mRNA, complete cds.//7.10E-17//14laa//40%//AF159567 FCBBF30246630//H.sapiens mRNA for ZYG homologue.//4.80E- 60//562aa//29%//X99802 FCBBF30247930//Rattus norvegicus clone C42 CDK5 activator-binding protein mRNA, complete cds.//2.70E-73//162aa//87%//AF177477 FCBBF30250730//TRICHOHYALIN.//1.30E-10//240aa//27%//P22793 FCBBF30251420 FCBBF30252520//Homo sapiens bicaudal-D (BICD) mRNA, alternatively spliced, partial cds.//2.50E-47//103aa//98%//U90030 FCBBF30252800//NDRG1 PROTEIN (DIFFERENTIATION-RELATED GENE 1 PROTEIN) (DRG1) (REDUCING AGENTS AND TUNICAMYCIN-RESPONSIVE PROTEIN) (RTP) (NICKEL- SPECIFIC INDUCTION PROTEIN CAP43).//1.30E-134//260aa//97%//Q92597 FCBBF30252850//Mus musculus peripherial benzodiazepine receptor associated protein (Pap7) mRNA, complete cds.//2.90E-46//185aa//50%//AF022770 FCBBF30262360 FCBBF30262510 FCBBF30266780 FCBBF30266920 FCBBF30278630 FCBBF30279030//Homo sapiens BNPI mRNA for brain-specific Na-dependent inorganic phosphate cotransporter, complete cds.//2.40E- 120//222aa//100%//AB032436 FCBBF30281880//regulator of G-protein signalling 7 [Homo sapiens].//2.OOE- 05//lOOaa//33%//NP_002915 FCBBF30284720 FCBBF30285280 FCBBF40001420 FCBBF40001730//GUANINE NUCLEOTIDE-BINDING PROTEIN BETA SUBUNIT-LIKE PROTEIN 12.3 (P205) (RECEPTOR OF ACTIVATED PROTEIN KINASE C 1) (RACK1).//4.20E- 120//265aa//84%//P25388 FCBBF40005480 FEBRA10001880//Homo sapiens serine/threonine kinase mRNA, complete cds.//4.60E-106//344aa//53%//AF005046 FEBRA10001900 FEBRA20002100//D-XYLOSE-PROTON SYMPORTER (D-XYLOSE TRANSPORTER).//2.OOE- 13//159aa//27%//052733 FEBRA20003210 FEBRA20004620//RAP1 GTPASE ACTIVATING PROTEIN 1 (RAPlGAP).//1.50E- 46//208aa//43%//P47736 FEBRA20007620//PUTATIVE PRE-MRNA SPLICING FACTOR ATP-DEPENDENT RNA HELICASE SPBC16H5.10C.//2.30E-126//692aa//39%//042945 FEBRA20009090 FEBRA20010120//CLEAVAGE STIMULATION FACTOR, 64 KDA SUBUNIT (CSTF 64 KDA SUBUNIT) (CF-1 64 KDA SUBUNIT).//1.1OE-73//137aa//97%//P33240 FEBRA20017050 FEBRA20018280 FEBRA20018690//ZINC FINGER PROTEIN 44 (ZINC FINGER PROTEIN KOX7) (FRAGMENT).//2.OOE-08//96aa//34%//P15621 FEBRA20024100//Rattus norvegicus myosin heavy chain Myr 8 mRNA, complete cds.//O//863aa//78%//AF209114 FEBRA20025270 FEBRA20025520 FEBRA20026110//ZINC FINGER PROTEIN 91 (ZINC FINGER PROTEIN HTF10) (HPF7).//i.1OE-217//810aa//48%//Q05481 FEBRA20026280 FEBRA20027810 FEBRA20029860 FEBRA20034360 FEBRA20034680//ZINC FINGER PROTEIN 84 (ZINC FINGER PROTEIN HPF2).//5.60E- 93//481aa//35%//P51523 FEBRA20037260 FEBRA20037500 FEBRA20040530//ZINC FINGER PROTEIN 84 (ZINC FINGER PROTEIN HPF2).//3.30E- 115//335aa//54%//P51523 FEBRA20042190 FEBRA20052910 FEBRA20060610 FEBRA20072120 FEBRA20079310 FEBRA20080810//Rattus norvegicus mRNA for peptide/histidine transporter, complete cds.//i.30E-107//239aa//87%//AB000280 FEBRA20082010//ZINC FINGER PROTEIN 195.//O//482aa//99%//014628 FEBRA20082100 FEBRA20086620//NEURONAL OLFACTOMEDIN-RELATED ER LOCALIZED PROTEIN PRECURSOR (NOEL) (lB426B).//3.80E-165//453aa//65%//Q62609 FEBRA20088360//ALPHA-ADAPTIN C (CLATHRIN ASSEMBLY PROTEIN COMPLEX 2 ALPHA-C LARGE CHAIN) (100 KDA COATED VESICLE PROTEIN C) (PLASMA MEMBRANE ADAPTOR HA2/AP2 ADAPTIN ALPHA C SUBUNIT).//5.60E-05//58aa//53%//P17427 FEBRA20090290 FEBRA20092890//Rattus norvegicus neural cell adhesion protein BIG-2 precursor (BIG-2) mRNA, complete cds.//O//697aa//93%//U35371 FEBRA20093520 FEBRA20095140 FEBRA20095880 FEBRA20097310//Human Hsp27 ERE-TATA-binding protein (HET) mRNA, complete cds.//0//597aa//97%//U72355 FEBRA20098460 FEBRA20111460 FEBRA20113560//R.norvegicus mRNA for DRM protein.//5.10E- 65//157aa//80%//Y10019 FEBRA20125070 FEBRA20130190//UDP-GlcNAc:betaGal beta-1,3-N-acetylglucosaminyltransferase 3//8.20E-65//345aa//42%//NP_055071 FEBRA20132740//Homo sapiens mRNA for CDEP, complete cds.//3.70E- 16//40aa//92%//AB0084³⁰ FEBRA20140100//RER1 PROTEIN.//3.20E-106//196aa//99%//015258 FEBRA20144170//RIBOSOMAL PROTEIN S6 KINASE II ALPHA 2 (EC 2.7.1.-) (S6KII- ALPHA 2) (P90-RSK 2) (RIBOSOMAL S6 KINASE 3) (RSK3) (PP9ORSK3).//1.30E- 269//495aa//99%//Q15349 FEBRA20145780 FEBRA20161120 FEBRA20166540 FEBRA20167390//Mus musculus ST6GalNAc V mRNA for GD1 alpha synthase, complete cds.//9.40E-64//134aa//91%//AB030836 FEBRA20171380//ZINC FINGER PROTEIN 33A (ZINC FINGER PROTEIN KOX31) (KIAA0065) (HA0946) (FRAGMENT).//6.30E-127//415aa//48%//Q06730 FEBRA20174410//Mus musculus mRNA for nuclear protein ZAP, complete cds.//2.30E-193//543aa//69%//AB033168 FEBRA20176800 FEBRA20184330//Rattus norvegicus glutamate receptor interacting protein 2 (GRIP2) mRNA, complete cds.//8.10E-72//16laa//88%//AF072509 FEBRA20192420 FEBRA20195820//ZINC FINGER PROTEIN 132.//2.60E-47//134aa//63%//P52740 FEBRA20196370 FEBRA20196630//RNA helicase-related protein//0//317aa//100%//NP_031³⁹8 FEBRA20197110 FEBRA20204000 FEBRA20204060 FEBRA20211710 FEBRA20214970 FEBRA20215500//Mus musculus Nulpl (nulpl) mRNA, complete cds.//1.80E- 38//146aa//64%//U94988 FEBRA20216360 FEBRA20222040 FEBRA20223220//Homo sapiens mRNA for fibulin-4.//9.20E- 110//202aa//100%//AJ132819 FEBRA20225040//high-glucose-regulated protein 8//I.40E- 110//514aa//51%//NP_057342 FEBRA20226010 FEBRA20229560 FEBRA20229630 FEBRA20232850 FEBRA20233770//NEURONAL PAS DOMAIN PROTEIN 2 (NEURONAL PAS2) (MEMBER OF PAS PROTEIN 4) (MOP4).//6.30E-62//164aa//81%//Q99743 FEBRA20235500//P3 PROTEIN.//5.20E-74//391aa//39%//P09131 FEBRA20237640//Rattus norvegicus neurabin mRNA, complete cds.//9.10E- 29//172aa//46%//U72994 FEHRT20003250//PHOSPHATIDYLINOSITOL 4-KINASE ALPHA (EC 2.7.1.67) (PI4-KINASE) (PTDINS-4-KINASE) (PI4K-ALPHA).//2.20E-146//269aa//100%//P42356 FELNG20002410 HCASM10000500//TOPOISOMERASE 1-RELATED PROTEIN TRF5.//3.70E- 09//193aa//22%//P48561 HCHON10001760//histone deacetylase 5//i.OOE-133//320aa//67%//NP_005465 HCHON20000380 HCHON20001560//TRANSCRIPTION FACTOR-LIKE PROTEIN MORF4.//7.20E- 1 16//235aa//93%//Q9Y690 HCHON20002260 HCHON20003220//10-FORMYLTETRAHYDROFOLATE DEHYDROGENASE (EC 1.5.1.6) (10- FTHFDH) (FBP-CI).//2.30E-302//731aa//72%//P28037 HCHON20003440//Homo sapiens cyclin-D binding Myb-like protein mRNA, complete cds.//1.30E-64//155aa//87%//AF084530 HCHON20007380//Homo sapiens mRNA for HELG protein.//3.90E- 129//331aa//76%//AJ277291 HCHON20007510//rab6 GTPase activating protein (GAP and centrosome- associated)//O//765aa//62%//NP_036329 HCHON20008150 HCHON20008180 HCHON20008320//ZINC FINGER PROTEIN 135.//2.20E-130//345aa//62%//P52742 HCHON20008980 HCHON20009350 HCHON20009560//ZINC FINGER PROTEIN 74.//1.50E-22//113aa//46%//Q16587 HCHON20010990 HCHON20011160 HCHON20014970 HCHON20015230//Homo sapiens nuclear pore-associated protein (NPAP60L) mRNA, complete cds.//1.40E-78//158aa//97%//AF107840 HCHON20015350//PUTATIVE RRNA METHYLTRANSFERASE SPB1 (EC 2.1.1.-).//1.90E- 117//771aa//36%//P25582 HCHON20015980//Homo sapiens integrin alpha 11 subunit precursor (ITGA11) mRNA, complete cds.//1.OOE-227//419aa//99%//AF137378 HCHON20016040//INSULIN-LIKE GROWTH FACTOR BINDING PROTEIN 3 PRECURSOR (IGFBP- 3) (IBP-3) (IGF-BINDING PROTEIN 3).//2.OOE-21//45aa//97%//P17936 HCHON20016650//Mus musculus seven-pass transmembrane receptor precursor (Celsrl) mRNA, complete cds.//6.20E-27//343aa//27%//AF031572 HCHON20022470 HCHON20035130//ZINC FINGER PROTEIN 22 (ZINC FINGER PROTEIN KOX15) (FRAGMENT).//1.10E-18//64aa//56%//P17026 HCHON20036420//Homo sapiens mRNA for PED phosphoprotein.//1.30E- 64//130aa//100%//Y13736 HCHON20036760 HCHON20040020//TNF-α INDUCIBLE PROTEIN CG12_1.//8.80E-40//302aa//36%//095236 HCHON20043590 HCHON20059870//Hypothetical protein.//4.20E-204//667aa//56%//AL163279 HCHON20064590//ALPHA-2-MACROGLOBULIN PRECURSOR (ALPHA-2-M).//5.OOE- 38//654aa//27%//PO1023 HCHON20067220 HCHON20067700//Homo sapiens gremlin mRNA, complete cds.//5.70E- 76//106aa//99%//AF045800 HCHON20068410//Drosophila melanogaster microtubule associated protein (asp) mRNA,complete cds.//8.1OE-47//803aa//27%//U95171 HCHON20068710 HCHON20074820 HCHON20076500 HCHON20086720//INSULIN-LIKE GROWTH FACTOR BINDING PROTEIN 3 PRECURSOR (IGFBP- 3) (IBP-3) (IGF-BINDING PROTEIN 3).//4.10E-113//205aa//100%//P17936 HCHON20097490//dedicator of cyto-kinesis 1//l.OOE-l54//860aa//37%//NP_001371 HCHON20100740//LACTADHERIN PRECURSOR (MILK FAT GLOBULE-EGF FACTOR 8) (MFG-E8) (HMFG) (BREAST EPITHELIAL ANTIGEN BA46) (MFGM) [CONTAINS: MEDIN].//1.60E- 205//363aa//99%//Q08431 HEART20003060//BASIGIN PRECURSOR (LEUKOCYTE ACTIVATION ANTIGEN M6) (COLLAGENASE STIMULATORY FACTOR) (EXTRACELLULAR MATRIX METALLOPROTEINASE INDUCER) (EMMPRIN) (5F7) (CD147 ANTIGEN).//1.30E-132//248aa//100%//P35613 HEART20005410 HEART20017730//ANKYRIN 2 (BRAIN ANKYRIN) (ANKYRIN B) (ANKYRIN, NONERYTHROID).//2.40E-25//368aa//30%//Q01484 HEART20021840 HEART20025980//Homo sapiens smoothelin large isoform L2 (SMTN) mRNA, complete cds.//9.OOE-152//223aa//97%//AF064238 HEART20034320//ENDOGLUCANASE Z PRECURSOR (EC 3.2.1.4) (ENDO-1,4-BETA- GLUCANASE) (THERMOACTIVE CELLULASE) (AVICELASE I).//1.20E- 64//480aa//32%//P23659 HEART20037810 HEART20049400 HEART20049410//Homo sapiens cerberus-related protein (CER1) gene, complete cds.//l.1OE-12//144aa//29%//AF090189 HEART20049800 HEART20061950//Homo sapiens mRNA for myopodin.//1.30E- 28//327aa//35%//AJ010482 HEART20063340 HEART20067870 HEART20067890 HEART20072310 HEART20074430 HEART20077670//Mus musculus mRNA for E-MAP-115 protein.//1.70E- 50//363aa//41%//Y15197 HEART20083640//Mus musculus Xin mRNA, complete cds.//3.10E- 63//272aa//58%//AF051945 HEART20089940 HEART20090000//Rattus norvegicus PIPP mRNA for proline-rich inositol polyphosphate 5-phosphatase, complete cds.//O//639aa//91%//ABO32551 HEART20095990 HHDPC10000650 HHDPC10000830//HYPOTHETICAL 24.9 KDA PROTEIN C16C1O.7 IN CHROMOSOME III.//1.50E-23//56aa//60%//Q09463 HHDPC20001040 HHDPC20006920 HHDPC20014320//ADAM 12 PRECURSOR (EC 3.4.24.-) (A DISINTEGRIN AND METALLOPROTEINASE DOMAIN 12) (MELTRIN ALPHA).//1.20E-14//139aa//38%//043184 HHDPC20030490//LIPOPOLYSACCHARIDE-INDUCED TUMOR NECROSIS FACTOR-ALPHA FACTOR (LPS-INDUCED TNF-α ALPHA FACTOR) (P53-INDUCED PROTEIN 7).//1.90E- 69//134aa//95%//Q99732 HHDPC20031130//Kruppel-type zinc finger (C2H2) [Homo sapiens]//3.30E- 196//607aa//57%//NP_005806 HHDPC20034390 HHDPC20034720//CHLORIDE INTRACELLULAR CHANNEL PROTEIN 4 (INTRACELLULAR CHLORIDE ION CHANNEL PROTEIN P64H1).//1.50E-121//213aa//99%//Q9Y696 HHDPC20057420//Mus musculus proline-rich protein (Bprp) mRNA, complete cds.//5.40E-45//143aa//69%//AF085348 HHDPC20057940 HHDPC20064600//SUPPRESSOR PROTEIN SRP40.//8.OOE-05//175aa//24%//P32583 HHDPC20068620//Ig kappa chain precursor V region (0-81VL) - human (fragment)//8.10E-06//132aa//31%//S22658 HHDPC20084140//Homo sapiens polyadenylate binding protein-interacting protein-1 (PAIP1) mRNA, complete cds.//8.IOE-12//230aa//23%//AF013758 HHDPC20091140//Homo sapiens gremlin mRNA, complete cds.//2.20E- 60//105aa//100%//AF045800 HHDPC20091780//coagulation factor V (proaccelerin, labile factor)//2.OOE- 26//170aa//40%//NP_000121 HHDPC20092080//INSULIN-LIKE GROWTH FACTOR BINDING PROTEIN 3 PRECURSOR (IGFBP- 3) (IBP-3) (IGF-BINDING PROTEIN 3).//3.30E-100//185aa//94%//P17936 HHDPC20095280 HLUNG10000550 HLUNG20016330//Homo sapiens actin filament associated protein (AFAP) mRNA, complete cds.//6.70E-130//531aa//49%//AF188700 HLUNG20016770 HLUNG20017120//PEPTIDE CHAIN RELEASE FACTOR 2 (RF-2).//8.40E- 1 1//82aa//40%//Q53915 HLUNG20023340//Mus musculus SLM-1 (Slml) mRNA, complete cds.//8.80E- 141//270aa//95%//AF098796 HLUNG20033780//Rho guanine nucleotide exchange factor 5//6.OOE- 60//440aa//38%//NP_005426 HLUNG20084390 IMR3220002430//CHROMATIN ASSEMBLY FACTOR 1 P48 SUBUNIT (CAF-1 P48 SUBUNIT) (RETINOBLASTOMA BINDING PROTEIN P48) (RETINOBLASTOMA-BINDING PROTEIN 4) (MSIl PROTEIN HOMOLOG).//7.10E-09//303aa//24%//Q09028 KIDNE20002520//glutamyl tRNA synthetase homolog//9.90E- 156//290aa//100%//T00743 KIDNE20003940//RENAL SODIUM-DEPENDENT PHOSPHATE TRANSPORT PROTEIN 2 (SODIUM/PHOSPHATE COTRANSPORTER 2) (NA(+)/PI COTRANSPORTER 2) (RENAL SODIUM- PHOSPHATE TRANSPORT PROTEIN 2) (RENAL NA+-DEPENDENT PHOSPHATE COTRANSPORTER 2).//1.80E-151//582aa//51%//Q06496 KIDNE20006780 KIDNE20007210//Xenopus laevis mRNA for RPA interacting protein alpha (ripalpha gene).//8.30E-17//104aa//47%//AJ243177 KIDNE20007770//CARCINOEMBRYONIC ANTIGEN CGM6 PRECURSOR (NONSPECIFIC CROSS- REACTING ANTIGEN NCA-95) (ANTIGEN CD67) (CD66B ANTIGEN).//1.20E- 17//326aa//27%//P31997 KIDNE20008010//Homo sapiens mRNA for putative protein kinase (WNK1 gene).//2.50E-25//460aa//29%//AJ296290 KIDNE20009470 KIDNE20011170 KIDNE20011400 KIDNE20013730 KIDNE20017130//Oreochromis niloticus sex-determining protein DMO mRNA, complete cds.//5.10E-43//252aa//43%//AF203490 KIDNE20018730 KIDNE20018970 KIDNE20020150//HEAT SHOCK 70 KDA PROTEIN 1 (HSP70.1) (HSP70-1/HSP70- 2).//9.90E-251//458aa//98%//P08107 KIDNE20021680//SHORT CHAIN 3-HYDROXYACYL-COA DEHYDROGENASE PRECURSOR (EC 1.1.1.35) (HCDH).//7.10E-141//273aa//98%//Q16836 KIDNE20021910//Homo sapiens MRS1 mRNA, complete cds.//2.30E- 30//339aa//27%//AF093239 KIDNE20021980 KIDNE20022620//like-glycosyltransferase//8.50E-253//633aa//70%//NP_004728 KIDNE20024830//Homo sapiens copine I mRNA, complete cds.//1.30E- 46//1 34aa//47%//U83246 KIDNE20027250//ZINC FINGER PROTEIN 41 (ZFP-41) (CTFIN92) (FRAGMENT).//3.80E- 55//105aa//91%//Q02526 KIDNE20027950//ZINC FINGER PROTEIN 7 (ZINC FINGER PROTEIN KOX4) (ZINC FINGER PROTEIN HF.16).//2.40E-40//82aa//100%//P17097 KIDNE20028390//GALACTOSE-1-PHOSPHATE URIDYLYLTRANSFERASE (EC 2.7.7.10).//6.OOE-70//85aa//90%//P43424 KIDNE20028720//Mus musculus Ac39/physophilin mRNA, complete cds.//2.70E- 130//345aa//68%//U21549 KIDNE20028830 KIDNE20029800 KIDNE20067330 KIDNE20079440 KIDNE20096280 KIDNE20096470 KIDNE20100070//Rattus norvegicus kidney-specific protein (KS) mRNA, complete cds.//1.20E-253//572aa//77%//AF062389 KIDNE20100840 KIDNE20101370//GOLGIN-95.//3.40E-20//76aa//68%//Q08379 KIDNE20101510//UROMODULIN PRECURSOR (TAMM-HORSFALL URINARY GLYCOPROTEIN) (THP).//O//519aa//95%//P07911 KIDNE20102650 KIDNE20102710//Mus musculus mRNA for Shank3b protein (shank3 gene).//1.20E- 81//203aa//71%//AJ245904 KIDNE20104300 KIDNE20106740 KIDNE20107390//Homo sapiens CHRAC17 (CHRAC17) mRNA, complete cds.//1.50E- 40//105aa//86%//AF22607⁷ KIDNE20107500 KIDNE20107620//Rattus norvegicus protein kinase WNK1 (WNK1) mRNA, complete cds.//8.70E-140//266aa//74%//AF227741 KIDNE20109730//Mus musculus orphan transporter isoform B9 (Xtrp2) mRNA, alternatively spliced, complete cds.//8.70E-34//103aa//65%//AF075266 KIDNE20109890//Rattus norvegicus TGF-beta resistance-associated protein (TRAG) mRNA, complete cds.//2.60E-141//774aa//37%//AF305813 KIDNE20112000 KIDNE20115080//Homo sapiens mRNA for hNBL4, complete cds.//6.20E- 1 15//226aa//96%//AB030240 KIDNE20118580//actin interacting protein [Arabidopsis thaliana].//5.0OE- 34//140aa//56%//CAB16815 KIDNE20120090 KIDNE20121880//Mus musculus claudin-19 mRNA, partial cds.//6.10E- 97//193aa//95%//AF249889 KIDNE20122910 KIDNE20124400//Homo sapiens mRNA for ALEX1, complete cds.//i.lOE- 18//167aa//28%//AB039670 KIDNE20125630 KIDNE20126010 KIDNE20126130 KIDNE20127100//Drosophila melanogaster Diablo (dbo) mRNA, complete cds.//1.1OE-10//254aa//26%//AF237711 KIDNE20127450 KIDNE20127750//Homo sapiens partial mRNA for transport-secretion protein 2.1 (TTS-2.1 gene).//6.50E-45//178aa//46%//AJ278475 KIDNE20130450 KIDNE20131580//Homo sapiens mRNA for LAK-4p, complete cds.//1.80E- 111//21laa//100%//AB002405 KIDNE20132180 KIDNE20137340//HYPOTHETICAL 49.1 KDA PROTEIN CllD3.06 IN CHROMOSOME I.//5.80E-13//149aa//30%//Q10085 KIDNE20138010 KIDNE20141190 KIDNE20144890 KIDNE20148900 KIDNE20163880 KIDNE20180710 KIDNE20181660 KIDNE20182690//Homo sapiens mRNA for RERE, complete cds.//3.50E- 222//401aa//99%//AB036737 KIDNE20186780 KIDNE20190740//Rattus norvegicus SNIP-b mRNA, complete cds.//6.70E- 20//Slaa//92%//AF156982 LIVER10001260 LIVER10004790 LIVER20002160//HEAT SHOCK COGNATE 71 KDA PROTEIN.//O//585aa//95%//P11142 LIVER20011130//Homo sapiens F-box protein FBL9 mRNA, partial cds.//5.50E- 107//210aa//99%//AF176701 LIVER20011910 LIVER20028420 LIVER20035110 LIVER20035680 LIVER20038540 LIVER20045650 LIVER20055200//Homo sapiens leucocyte immunoglobulin-like receptor-8 (LIR-8) mRNA, complete cds.//2.,50E-43//132aa//71%//AF025534 LIVER20055440//Homo sapiens Rho GAP pl90-A mRNA, complete cds.//2.90E- 101//195aa//98%//AF159851 LIVER20059810//UDP-GLUCOSE 4-EPIMERASE (EC 5.1.3.2) (GALACTOWALDENASE) (UDP- GALACTOSE 4-EPIMERASE).//1.60E-15//39aa//100%//Q14376 LIVER20062510 LIVER20064100//Ciona intestinalis mRNA for myoplasmin-Cl, complete cds.//2.90E-14//167aa//26%//D42167 LIVER20064690//PLASMA SERINE PROTEASE INHIBITOR PRECURSOR (PCI) (PROTEIN C INHIBITOR) (PLASMINOGEN ACTIVATOR INHIBITOR-3) (PAI3).//1.70E- 146//319aa//89%//P05154 LIVER20075680 LIVER20080530//Drosophila melanogaster forked mRNA for large Forked protein, complete cds.//l.1OE-11//198aa//32%//D21203 LIVER20084730 LIVER20085800 LIVER20087060//Mus musculus putative purine nucleotide binding protein mRNA, complete cds.//2.70E-233//619aa//70%//U44731 LIVER20087510 LIVER20091180 MAMGLl0000830//Drosophila melanogaster L82B (L82) mRNA, complete cds. //3. OOE- 27//231aa//38%//AF125385 MESAN10001260//Drosophila melanogaster Crossveinless 2 (CV-2) mRNA, complete cds.//6.50E-104//628aa//35%//AF288223 MESAN20004570//MEDIAN BODY PROTEIN.//3.OOE-07//343aa//23%//Q08014 MESAN20014500//Drosophila melanogaster Dispatched (dispatched) mRNA, complete cds.//1.60E-46//225aa//37%//AF200691 MESAN20025190//Mus musculus cell cycle checkpoint control protein Mrad9 gene, complete cds.//7.30E-19//43aa//97%//AF045662 MESAN20027090 MESAN20029400 MESAN20031900//Homo sapiens mRNA for zinc-binding protein (Rbcc728 gene-).//2.90E-161//724aa//43%//AJ272269 MESAN20035290 MESAN20036460 MESAN20038510 MESAN20089360 MESAN20101140//PINCH PROTEIN (PARTICULARY INTERESTING NEW CYS-HIS PROTEIN).//2.30E-25//52aa//98%//P48059 MESAN20103120//Homo sapiens sodium/calcium exchanger NCKX3 (SLC24A3) mRNA, complete cds.//4.1OE-66//289aa//37%//AF169257 MESAN20106640 MESAN20115970 MESAN20121130 MESAN20125860//MELANOTRANSFERRIN PRECURSOR (MELANOMA-ASSOCIATED ANTIGEN P97).//1.30E-40//81aa//100%//P08582 MESAN20127350//myelin expression factor-3//2.80E-15//227aa//29%//JE0163 MESAN20130220//Homo sapiens testis-specific chromodomain Y-like protein (CDYL) mRNA, alternatively processed, complete cds.//2.10E- 126//319aa//63%//AF081258 MESAN20132110 MESAN20136110//Ciona savignyi mRNA for PEM-3, complete cds.//1.90E- 85//236aa//65%//AB001769 MESAN20138450 MESAN20139360 MESAN20141920//Human ovarian cancer downregulated myosin heavy chain homolog (Docl) mRNA, complete cds.//O//691aa//97%//U53445 MESAN20152770 MESAN20153910 MESAN20154010//Homo sapiens mRNA for putative ribulose-5-phosphate-epimerase, partial cds.//9.1OE-60//69aa//100%//AJ224326 MESAN20157080 MESAN20161590 MESAN20164090 MESAN20171520//Homo sapiens TNF intracellular domain-interacting protein mRNA, complete cds.//9.30E-30//198aa//40%//AF168676 MESAN20174170//REGULATOR OF G-PROTEIN SIGNALING 4 (RGS4) (RGP4).//1.80E- 39//80aa//98%//P49798 MESAN20182090 MESAN20186700 NESOP10001080 NOVAR10000150 NOVAR10000910//COLORECTAL MUTANT CANCER PROTEIN (MCC PROTEIN).//6.00E- 199//392aa//98%//P23508 NOVAR10001020 NOVAR20000380 NOVAR20003520 NT2NE20003740 NT2NE20010050 NT2NE20010210 NT2NE20010400//Homo sapiens GLO13 mRNA, complete cds.//2.90E- 51//223aa//60%//AF267859 NT2NE20010490//ZINC FINGER PROTEIN 85 (ZINC FINGER PROTEIN HPF4) (HTFl).//1.30E-194//464aa//72%//Q03923 NT2NE20015240 NT2NE20021620//Saccharomyces cerevisiae Vps9p (VPS9) gene, complete cds.//1.OOE-13//250aa//24%//U20373 NT2NE20043780 NT2NE20053580 NT2NE20068130//CELL SURFACE GLYCOPROTEIN 1 PRECURSOR (OUTER LAYER PROTEIN B) (S-LAYER PROTEIN 1).//2.50E-34//377aa//40%//QO6852 NT2NE20072200 NT2NE20074250 NT2NE20080170//HUNTINGTIN-ASSOCIATED PROTEIN-INTERACTING PROTEIN (DUO PROTEIN) (KALIRIN) (PAM COOH-TERMINAL INTERACTOR PROTEIN 10) (P- CIPlO).//6.60E-57//661aa//27%//P97924 NT2NE20089610 NT2NE20089970//ZINC FINGER PROTEIN 91 (ZINC FINGER PROTEIN HTF1O) (HPF7).//1.60E-29//77aa//81%//Q05481 NT2NE20108540 NT2NE20110360 NT2NE20118960//DOLICHYL-DIPHOSPHOOLIGOSACCHARIDE--PROTEIN GLYCOSYLTRANSFERASE 63 KDA SUBUNIT PRECURSOR (EC 2.4.1.119) (RIBOPHORIN II).//9.30E- 274//562aa//94%//P04844 NT2NE20122430//GLYOXYLATE-INDUCED PROTEIN.//7.70E-25//144aa//38%//P30147 NT2NE20124480 NT2NE20125050//Gallus gallus mRNA for avena, complete cds.//5.80E- 199//468aa//84%//ABO17437 NT2NE20130190 NT2NE20131890 NT2NE20132170//Rattus norvegicus lysosomal amino acid transporter 1 mRNA, complete cds.//3.70E-97//357aa//52%//AF361239 NT2NE20142210//SINGLE-MINDED HOMOLOG 2 (SIM TRANSCRIPTION FACTOR) (MSIM).//3.OOE-24//660aa//26%//Q61079 NT2NE20146810 NT2NE20152750 NT2NE20155110 NT2NE20156260 NT2NE20157470//COMPLEMENT C2 PRECURSOR (EC 3.4.21.43) (C3/C5 CONVERTASE).//6.60E-138//256aa//100%//P06681 NT2NE20158600//erythroid ankyrin - Synechocystis sp. (strain PCC 6803).//7.OOE-13//160aa//31%//S74626 NT2NE20159740 NT2NE20172590 NT2NE20174800 NT2NE20174920 NT2NE20177520//Guinea pig mRNA for decay-accelerating factor (isoform GDab- SEC), complete cds.//i.70E-15//273aa//28%//D49421 NT2NE20181650//Shb=Src homology 2 protein//2.90E-36//115aa//43%//AAB29780 NT2NE20183760 NT2NE20184900//Mus musculus mRNA for transcription factor CA150b, complete cds.//8.60E-29//98aa//55%//AB023485 NT2NE20187390 NT2RI20001330//Homo sapiens KE03 protein mRNA, partial cds.//3.40E- 103//339aa//57%//AF064604 NT2RI20003480//GLYPICAN-2 PRECURSOR (CEREBROGLYCAN) (HSPG M13).//1.80E- 261//581aa//82%//P51653 NT2RI20005750//Rattus norvegicus GTP-binding protein REM2 (Rem2) mRNA, complete cds.//8.90E-139//272aa//95%//AF084464 NT2RI20009870//lunatic fringe precursor [Mus musculus]//5.50E- 123//237aa//91%//U94351 NT2RI20022600 NT2RI20023160 NT2RI20023590 NT2RI20023910//Homo sapiens TMTSP mRNA for transmembrane molecule with thrombospondin module, complete cds.//O//480aa//96%//AB044385 NT2RI20025400//Mouse mRNA for P24 protein, complete cds.//9.70E- 94//196aa//91%//D83206 NT2RI20025640 NT2RI20028470 NT2RI20036670 NT2RI20040930//MITOCHONDRIAL CARRIER PROTEIN YMC2 PRECURSOR.//l.10E- 27//1 94aa//38%//P38087 NT2RI20040990//ANKYRIN 2 (BRAIN ANKYRIN) (ANKYRIN B) (ANKYRIN, NONERYTHROID).//2.40E-25//368aa//30%//Q01484 NT2RI20041880//MYOSIN HEAVY CHAIN, NONMUSCLE TYPE A (CELLULAR MYOSIN HEAVY CHAIN, TYPE A) (NMMHC-A).//8.10E-10//322aa//21%//P35579 NT2RI20046080 NT2RI20048840//GUANINE NUCLEOTIDE-BINDING PROTEIN G(I), ALPHA-2 SUBUNIT (ADENYLATE CYCLASE-INHIBITING G ALPHA PROTEIN).//2.10E- 171//316aa//100%//P04899 NT2RI20050960//Homo sapiens p53 regulated PA26-T2 nuclear protein (PA26) mRNA, complete cds.//5.40E-164//496aa//61%//AF033120 , NT2RI20054050//Drosophila melanogaster Abnormal X segregation (Axs) gene, complete cds.//2.40E-83//487aa//37%//AF101361 NT2RI20055790 NT2RI20056700//NEURONAL OLFACTOMEDIN-RELATED ER LOCALIZED PROTEIN PRECURSOR (NOEL) (1B426B).//3.40E-237//439aa//97%//Q62609 NT2RI20069730 NT2RI20076290 NT2RI20086220 NT2RI20091730 NT2RI20091940//CORNICHON-LIKE PROTEIN.//9.70E-73//159aa//81%//035089 NT2RI20198260 NT2RI20203900 NT2RI20207030 NT2RI20216250 NT2RI20240080//SMALL GLUTAMINE-RICH TETRATRICOPEPTIDE REPEAT-CONTAINING PROTEIN.//1.30E-86//311aa//58%//043765 NT2RI20244600//Homo sapiens mRNA for sphingosine-l-phosphatase (ORFI).//2.60E-50//273aa//36%//AJ293294 NT2RI20244960 NT2RI20250750 NT2RI20252550 NT2RI20273230//PUTATIVE HELICASE YGR271W.//1.10E-14//152aa//38%//P53327 NT2RP60000770//Homo sapiens mRNA for ZAC zinc finger protein.//5.80E- 1 79//325aa//98%//AJ006354 NT2RP60000850//Bos taurus RPGR-interacting protein-i (RPGRIPl) mRNA, complete cds.//2.10E-139//751aa//38%//AF227258 NT2RP70010740 NT2RP70027380//N-CHIMAERIN (NC) (N-CHIMERIN) (ALPHA CHIMERIN) (A- CHIMAERIN).//7.40E-31//203aa//36%//P15882 NT2RP70032610//ALPHA ENOLASE (EC 4.2.1.11) (2-PHOSPHO-D-GLYCERATE HYDRO- LYASE) (NON- NEURAL ENOLASE) (NNE) (PHOSPHOPYRUVATE HYDRATASE).//4.40E- 180//387aa//88%//P06733 NT2RP70036880//Gtpase activating protein for Yptlp; Gyplp [Saccharomyce scerevisiae].//2.OOE-66//250aa//50%//NP_014713 NT2RP70037240//H.sapiens E-MAP-115 mRNA.//1.1OE-79//475aa//41%//X73882 NT2RP70043480//ZINC FINGER PROTEIN 93 (ZINC FINGER PROTEIN HTF34) (FRAGMENT).//O//588aa//91%//P35789 NT2RP70044280//CTD-BINDING SR-LIKE PROTEIN RA4 (FRAGMENT).//1.20E- 11//19Oaa//31%//095104 NT2RP70045590//PUTATIVE ENDONUCLEASE ClF12.06C (EC 3.1.-.-).//3.60E- 34//246aa//36%//Q10348 NT2RP70056750 NT2RP70062230//NEUROFILAMENT TRIPLET H PROTEIN (200 KDA NEUROFILAMENT PROTEIN) (NF-H).//2.50E-29//622aa//29%//P19246 NT2RP70063950//PUTATIVE RHO/RAC GUANINE NUCLEOTIDE EXCHANGE FACTOR (RHO/RAC GEF) (FACIOGENITAL DYSPLASIA PROTEIN HOMOLOG).//4.90E-13//417aa//26%//P52734 NT2RP70072690 NT2RP70075240 NT2RP70077660 NT2RP70078420//Drosophila melanogaster Centaurin Gamma 1A (cenglA) mRNA, complete cds.//i.OOE-120//700aa//40%//AF254741 NT2RP70080850 NT2RP70081610//Mus musculus 10F6 protein mRNA, complete cds.//5.20E- 52//214aa//50%//AF131206 NT2RP70085440 NT2RP70102350//Mus musculus mRNA for Olig3 bHLH protein, complete cds.//1.90E-134//257aa//98%//AB038698 NT2RP70105210 NT2RP70110860 NT2RP70111320 NT2RP70122910 NT2RP70125160 NT2RP70130020 NT2RP70133740//SECRETORY CARRIER-ASSOCIATED MEMBRANE PROTEIN 2.//2.60E- 136//267aa//94%//015127 NT2RP70134990 NT2RP70137290 NT2RP70137640 NT2RP70143480 NT2RP70147210 NT2RP70150800 NT2RP70157890//zinc finger protein 267; zinc finger (C2H2) [Homo sapiens]//1.60E-125//228aa//99%//NP_003405 NT2RP70159960//Rattus norvegicus pl35 SynGAP mRNA, partial cds.//4.80E- 60//177aa//69%//AF053938 NT2RP70169110 NT2RP70175670 NT2RP70179710 NT2RP70181970 NT2RP70188020 NT2RP70188710 NT2RP70190640 NT2RP70192730//LYSOSOMAL ACID LIPASE/CHOLESTERYL ESTER HYDROLASE PRECURSOR (EC 3.1.1.13) (LAL) (ACID CHOLESTERYL ESTER HYDROLASE) (STEROL ESTERASE) (LIPASE A) (CHOLESTERYL ESTERASE).//3.OOE-181//323aa//99%//P38571 NT2RP70194450 NT2RP70195430//PUTATIVE NADP-DEPENDENT OXIDOREDUCTASE IN TEHB-RHSE INTERGENIC REGION (EC 1.-.-.-).//1.10E-57//349aa//38%//P76113 NT2RP70198350//HEPATOMA-DERIVED GROWTH FACTOR (HDGF).//2.60E- 111//213aa//98%//P51858 NT2RP70203790 NTONG20009770//NEUROLYSIN PRECURSOR (EC 3.4.24.16) (NEUROTENSIN ENDOPEPTIDASE) (MITOCHONDRIAL OLIGOPEPTIDASE M) (MICROSOMAL ENDOPEPTIDASE) (MEP).//1.30E-304//599aa//92%//P42675 NTONG20013620//Homo sapiens hydroxysteroid sulfotrans~ferase SULT2Blb (HSST2) mRNA, complete cds.//9.10E-82//15laa//100%//U92315 NTONG20015870//KERATIN, TYPE II CYTOSKELETAL 4 (CYTOKERATIN 4) (K4) (CK4).//3.30E-132//489aa//54%//P19013 NTONG20028070//CYR61 PROTEIN PRECURSOR (GIG1 PROTEIN) (INSULIN-LIKE GROWTH FACTOR- BINDING PROTEIN 10).//1.60E-65//133aa//92%//000622 NTONG20029480//Mus musculus Xin.mRNA, complete cds.//7.20E- 93//409aa//54%//AF051945 NTONG20029700//Homo sapiens laminin alpha 3b chain mRNA, partial cds.//6.60E- 230//425aa//92%//AF00⁵258 NTONG20046140//Homo sapiens mRNA for MNK1, complete cds.//5.70E- 89//177aa//98%//AB000409 NTONG20048060 NTONG20049910 NTONG20050620 NTONG20050860 NTONG20051530//KUPFFER CELL RECEPTOR.//6.30E-85//391aa//45%//P70194 NTONG20052650//Gallus gallus Xin mRNA, complete cds.//5.40E- 146//768aa//40%//AF051944 NTONG20056570//CORONIN-LIKE PROTEIN P57.//2.20E-121//356aa//62%//Q92176 NTONG20061870 NTONG20063010//Mus musculus EF-9 mRNA, partial cds.//1.70E- 78//154aa//92%//U72678 NTONG20064400//REPETIN.//2.20E-107//446aa//50%//P97347 NTONG20064840//Mus musculus slpl mRNA for synaptotagmin-like protein 1, complete cds.//2.60E-1-28//258aa//90%//AB050741 NTONG20065010 NTONG20066460//Mus musculus Gd mRNA for gasdermin, complete cds.//8.30E- 207//446aa//88%//AB033595 NTONG20067090//Mus musculus mRNA for Sh3yll, complete cds.//2.OOE- 63//136aa//91%//D85926 NTONG20067830//ANKYRIN 1 (ERYTHROCYTE ANKYRIN) (ANKYRIN R) (ANKYRINS 2.1 AND 2.2).//1.1OE-24//227aa//34%//P16157 NTONG20070200//ZINC FINGER PROTEIN 83 (ZINC FINGER PROTEIN HPFl).//1.30E- 134//352aa//65%//P51522 NTONG20070340//collagen alpha 1(IX) chain//1.50E-43//220aa//45%//S42617 NTONG20075220//Rattus norvegicus SNIP-a-mRNA, complete cds.//1.80E- 121//436aa//41%//AF156981 NTONG20076930//ALPHA-1-INHIBITOR III PRECURSOR.//1.20E- 124//513aa//47%//P14046 NTONG20077560 NTONG20083650 NTONG20088620//Homo sapiens genethonin 3 mRNA, partial cds.//4.90E- 202//390aa//99%//AF177292 NTONG20090600//SYNAPSIN I (BRAIN PROTEIN 4.1).//2.10E-07//198aa//29%//P17600 NTONG20090680 NTONG20092290 NTONG20092330//BESTROPHIN (VITELLIFORM MACULAR DYSTROPHY PROTEIN) (TU15B).//1.40E-135//414aa//59%//076090 OCBBF10000540//Mus musculus rjs (rjs) mRNA, complete cds.//4.OOE- 14//105aa//36%//AF061529 OCBBF10001750//Mus musculus mRNA for sprouty-4, complete cds.//1.50E- 159//300aa//92%//AB019280 OCBBF10001850//ZINC FINGER PROTEIN 84 (ZINC FINGER PROTEIN HPF2).//8.90E- 166//605aa//51%//P51523 OCBBF20005230 OCBBF20006770//TREACLE PROTEIN (TREACHER COLLINS SYNDROME PROTEIN).//2.50E- 287//693aa//84%//Q13428 OCBBF20013890 OCBBF20019380//seizure related gene 6//6.OOE-170//336aa//90%//NP_067261 OCBBF20019830 OCBBF20020150 OCBBF20020830//Homo sapiens Pumilio 1 (PUMH1) mRNA, complete cds.//0//814aa//99%//AF315592 OCBBF20022900//Homo sapiens SCHIP-1 mRNA, complete cds.//2.80E- 250//469aa//99%//AF145713 OCBBF20023570 OCBBF20026630 OCBBF20028050//Homo sapiens B2 gene partial cDNA, clone B2E.//7.70E- 38//246aa//33%//AJ002220 OCBBF20028650//DOSAGE COMPENSATION REGULATOR (MALE-LESS PROTEIN) (NO ACTION POTENTIAL PROTEIN).//1.40E-50//160aa//47%//P24785 OCBBF20029800 OCBBF20030280//Rattus norvegicus hfb2 mRNA, complete cds.//5.20E- 63//175aa//68%//AF031483 OCBBF20030910//PUROMYCIN-SENSITIVE AMINOPEPTIDASE (EC 3.4.11.-) (PSA).//2.90E-146//279aa//98%//P55786 OCBBF20032460 OCBBF20035930//BETA-SOLUBLE NSF ATTACHMENT PROTEIN (SNAP-BETA).//7.80E- 135//264aa//96%//P81126 OCBBF20037440//ZINC-FINGER PROTEIN HT2A (72 KDA TAT-INTERACTING PROTEIN).//2.1OE-08//80aa//40%//Q13049 OCBBF20039250//Homo sapiens breast cancer metastasis-suppressor 1 (BRMS1) mRNA, complete cds.//2.20E-55//188aa//56%//AF159141 OCBBF20041680 OCBBF20045330 OCBBF20046120//zinc finger protein 16 (KOX 9)//1.OOE- 131//350aa//59%//NP_008889 OCBBF20046470//ARFAPTIN 1.//5.80E-114//229aa//97%//P53367 OCBBF20046690//PROBABLE CATION-TRANSPORTING ATPASE W08D2.5 IN CHROMOSOME IV (EC 3.6.1.-).//4.20E-105//249aa//39%//Q27533- OCBBF20047570 OCBBF20048660 OCBBF20049300//ZINC FINGER PROTEIN 184 (FRAGMENT).//7.10E- 141//566aa//45%//Q99676 OCBBF20049840//Homo sapiens mRNA for neurabin II protein.//4.90E- 166//808aa//47%//AJ401189 OCBBF20050770//CARNITINE O-PALMITOYLTRANSFERASE I, MITOCHONDRIAL LIVER ISOFORM (EC 2.3.1.21) (CPT I) (CPTI-L).//3.10E-211//653aa//56%//P32198 OCBBF20051610 OCBBF20053430//Mus musculus MAST205 protein kinase mRNA, complete cds.//O//498aa//94%//U02313 OCBBF20053490//MANNOSE-6-PHOSPHATE ISOMERASE (EC 5.3.1.8) (PHOSPHOMANNOSE ISOMERASE) (PMI) (PHOSPHOHEXOMUTASE).//1.10E-24//52aa//100%//P34949 OCBBF20053730//85 KDA CALCIUM-INDEPENDENT PHOSPHOLIPASE A2 (EC 3.1.1.4) (IPLA2) (CAI- PLA2).//0//636aa//91%//060733 OCBBF20054200//DEVELOPMENTAL PROTEIN SEVEN IN ABSENTIA.//1.10E- 27//97aa//54%//P21461 OCBBF20054760//SERINE/THREONINE PROTEIN KINASE RIP (EC 2.7.1.-) (CELL DEATH PROTEIN RIP) (RECEPTOR INTERACTING PROTEIN).//4.OOE-122//230aa//97%//Q13546 OCBBF20059560//Homo sapiens (clone D320) C219-reactive peptide mRNA, partial cds.//6.70E-39//140aa//62%//L34688 OCBBF20060300 OCBBF20061720 OCBBF20062140 OCBBF20062410 OCBBF20063320 OCBBF20066390//ZINC FINGER PROTEIN 84 (ZINC FINGER PROTEIN HPF2).//8.90E- 63//173aa//65%//P51523 OCBBF20068490//Mus musculus RW1 protein mRNA, complete cds.//4.60E- 40//310aa//37%//AF060565 OCBBF20071210//M-PHASE PHOSPHOPROTEIN 9 (FRAGMENT).//1.80E- 96//184aa//100%//Q99550 OCBBF20071840//ZINC FINGER PROTEIN 135.//I.OOE-139//416aa//57%//P52742 OCBBF20071960//Coturnix coturnix japonica qMEF2D gene.//6.50E- 06//1 24aa//31%//AJ002238 OCBBF20072240//Homo sapiens candidate tumor suppressor protein DICE1 mRNA, complete cds.//7.60E-165//354aa//83%//AF097645 OCBBF20072320 OCBBF20073540//Homo sapiens p30 DBC mRNA, complete cds.//4.OOE- 65//146aa//91%//AF293335 OCBBF20074140 OCBBF20076220 OCBBF20078920//Homo sapiens zinc-,finger helicase (hZFH) mRNA, complete cds.//3.10E-67//152aa//92%//U91543 OCBBF20079310 OCBBF20079460 OCBBF20080050//RTOA PROTEIN (RATIO-A).//3.50E-07//19laa//32%//P54681 OCBBF20080410//ZINC FINGER PROTEIN 43 (ZINC PROTEIN HTF6).//6.90E- 145//445aa//51%//P28160 OCBBF20081380 OCBBF20082830//NDRG1 PROTEIN (DIFFERENTIATION-RELATED GENE 1 PROTEIN) (DRG1) (REDUCING AGENTS AND TUNICAMYCIN-RESPONSIVE PROTEIN) (RTP) (NICKEL- SPECIFIC INDUCTION PROTEIN CAP43). //3. 1OE-190//282aa//99%//Q92597 OCBBF20084660 OCBBF20085200 OCBBF20086400//Mus musculus ADP-ribosylation factor-like membrane-associated protein (Arml) mRNA, complete cds.//2.10E-114//244aa//87%//AF205936 OCBBF20086910//Mus musculus mSox5L mRNA, complete cds.//9.30E- 253//528aa//91%//AB⁰⁰63³0 OCBBF20087010 OCBBF20088140 OCBBF20088220 OCBBF20091150 OCBBF20094240 OCBBF20097720 OCBBF20100400 OCBBF20103130 OCBBF20104040 OCBBF20105570 OCBBF20107090//Homo sapiens protocadherin 68 (PCH68) mRNA, complete cds.//2.60E-77//359aa//49%//AF029343 OCBBF20107920 OCBBF20108190//ZINC FINGER PROTEIN ZFP-36 (FRAGMENT).//2.90E- 151//429aa//61%//P16415 OCBBF20108430//GUANINE NUCLEOTIDE-BINDING PROTEIN G(I), ALPHA-2 SUBUNIT (ADENYLATE CYCLASE-INHIBITING G ALPHA PROTEIN).//2.10E- 171//316aa//100%//P04899 OCBBF20108580//APICAL-LIKE PROTEIN (APXL PROTEIN).//1.OOE- 196//376aa//100%//Q13796 OCBBF20108630//ATP-BINDING CASSETTE, SUB-FAMILY A, MEMBER 1 (ATP-BINDING CASSETTE TRANSPORTER 1) (ATP-BINDING CASSETTE 1).//1.OOE- 63//268aa//46%//P41233 OCBBF20109310 OCBBF20111770 OCBBF20116850//Mus musculus Islr(immunoglobulin superfamily containing leucine-rich repeat) mRNA, complete cds.//2.10E-88//285aa//57%//ABO24538 OCBBF20O118970 OCBBF20120390//SODIUM-DEPENDENT PROLINE TRANSPORTER (FRAGMENT).//0//636aa//100%//Q99884 OCBBF20121390//RING CANAL PROTEIN (KELCH PROTEIN).//7.80E- 28//220aa//31%//Q04652 OCBBF20122620 OCBBF20124360//Homo sapiens mRNA for Misshapen/NIK-related kinase MINK-1, complete cds.//2.70E-98//185aa//100%//AB035698 OCBBF20125530//Mus musculus PRAJAL (Prajal) mRNA, complete cds.//3.60E- 110//281aa//77%//U06944 OCBBF20126780 OCBBF20127040//Drosophila melanogaster woc gene, exons 1-11.//1.10E- 09//284aa//24%//AJ276394 OCBBF20127140//GUANINE NUCLEOTIDE-BINDING PROTEIN G(I)/G(S)/G(T) BETA SUBUNIT 1 (TRANSDUCIN BETA CHAIN 1).//5.50E-63//119aa//100%//P04901 OCBBF20127550 OCBBF20128120//Mus musculus mmDNAJA4 mRNA for mmDj4, complete cds.//1.20E- 205//397aa//93%//AB032401 OCBBF20129360//1-PHOSPHATIDYLINOSITOL-4,5-BISPHOSPHATE PHOSPHODIESTERASE DELTA 1 (EC 3.1.4.11) (PLC-DELTA-1) (PHOSPHOLIPASE C-DELTA-1) (PLC- III).//1.00E-130//461aa//36%//P51178 OCBBF20130110 OCBBF20130910 OCBBF20132850//Homo sapiens brain tumor associated protein NAG14 (NAG14) mRNA, complete cds.//3.80E-24//399aa//27%//AF196976 OCBBF20139260 OCBBF20140640 OCBBF20140890 OCBBF20145760//GLYPICAN-1 PRECURSOR.//3.40E-118//222aa//100%//P35052 OCBBF20148280//Mus musculus mlt 1 gene, complete cds.//1.70E- 151//502aa//63%//AB032418 OCBBF20148730//RING CANAL PROTEIN (KELCH PROTEIN).//2.90E- 43//509aa//26%//Q04652 OCBBF20149280//Mus musculus WAVE-1 mRNA, complete cds.//4.30E- 07//210aa//29%//AF290877 OCBBF20151150 OCBBF20153340//Rattus norvegicus cytosolic sorting protein PACS-la (PACS-1) mRNA, complete cds.//0//701aa//93%//AF076183 OCBBF20153350//G PROTEIN PATHWAY SUPPRESSOR 2 (GPS2 PROTEIN).//1.20E- 49//103aa//99%//Q13227 OCBBF20155060//CADHERIN-RELATED TUMOR SUPPRESSOR PRECURSOR (FAT PROTEIN).//1.90E-67//307aa//37%//P33450 OCBBF20164050 OCBBF20164670 OCBBF20170690 OCBBF20173060 OCBBF20173250 OCBBF20173980//Homo sapiens RCCl-like G exchanging factor RLG mRNA, complete cds.//3.70E-211//531aa//70%//AF060219 OCBBF20178150//Plasmodium falciparum ADA2-like protein gene, partial cds.//2.20E-19//322aa//27%//AF184590 OCBBF20178880//11-CIS RETINOL DEHYDROGENASE (EC 1.1.1.105) (11-CIs RDH).//3.90E-37//lOlaa//78%//Q92781 OCBBF20178990 OCBBF20180120//Homo sapiens sodium-dependent high-affinity dicarboxylate transporter (NADC3) mRNA, complete cds.//1.50E-272//320aa//89%//AF154121 OCBBF20180840 OCBBF20186870 OCBBF20188730 OCBBF20189560 PANCR10000910//ATP-binding cassette, sub-family A member 8//2.OOE- 17//230aa//30%//NP_009099 PEBLM10000240 PEBLM10000710//leptin receptor//2.10E-29//69aa//91%//U66496 PEBLM20013120//Homo sapiens rhotekin mRNA, partial cds.//4.10E- 25//164aa//36%//AF290512 PEBLM20024320//zinc resistance protein homolog //3.80E-28//139aa//45%//T27544 PEBLM20024550 PEBLM20040150 PEBLM20042900 PEBLM20044520//PAB-DEPENDENT POLY(A)-SPECIFIC RIBONUCLEASE SUBUNIT PAN2 (EC 3.1.13.4) (PABlP-DEPENDENT POLY(A)-NUCLEASE).//2.40E-54//331aa//39%//P53010 PEBLM20052820//PROTEIN PHOSPHATASE 2C HOMOLOG 3 (EC 3.1.3.16) (PP2C- 3).//7.60E-09//96aa//36%//Q09173 PEBLM20060310 PEBLM20060360//ZINC FINGER PROTEIN 33A (ZINC FINGER PROTEIN KOX31) (KIAA0065) (HA0946) (FRAGMENT).//5.10E-12//57aa//56%//QO6730 PEBLM20060490//polymerase (RNA) III (DNA directed) (39kD) [Homo sapiens]//1.50E-72//143aa//100%//NP_006457 PEBLM20071880 PEBLM20072960 PEBLM20074370 PEBLM20075980//Mus musculus immunoglobulin scavenger receptor IgSR mRNA, complete cds.//2.30E-69//285aa//52%//AF302046 PEBLM20078320//ZINC FINGER PROTEIN 84 (ZINC FINGER PROTEIN HPF2).//2.OOE- 184//543aa//59%//P51523 PEBLM20085760//Homo sapiens mRNA for TOLLIP protein.//l.lO0E- 106//153aa//98%//AJ242972 PERIC10000250//DNA TOPOISOMERASE III BETA-1 (EC 5.99.1.2).//1.20E- 138//271aa//94%//095985 PERIC20002140 PERIC20003860 PERIC20003870//Mus musculus transcriptional activator alpha-NAC (Naca) gene, complete cds.//l.20E-152//956aa//43%//U48363 PERIC20004220 PERIC20004780//Rattus norvegicus Jun dimerization protein 1 (jdp-1) gene, complete cds.//2.OOE-15//73aa//49%//U53450 PLACE50000660//PROTEIN ARGININE N-METHYLTRANSFERASE 1 (EC 2.1.1.-).//1.60E- 12//200aa//27%//Q63009 PLACE60003480//Rattus norvegicus protein associating with small stress protein PASS1 (Passl) mRNA, complete cds.//4.60E-119//255aa//82%//AF168362 PLACE60004630 PLACE60060420//60S RIBOSOMAL PROTEIN L44 (L36A).//1.70E- 29//58aa//100%//P09896 PLACE60079250//Homo sapiens mRNA for actin binding protein ABP620, complete cds.//O//979aa//61%//AB029290 PLACE60086400 PLACE60119750 PLACE60121080 PLACE60136500 PLACE60136720 PLACE60138830 PLACE60153220 PLACE60155130 PLACE60161600 PLACE60169420 PLACE60177140//PROSTACYCLIN RECEPTOR (PROSTANOID IP RECEPTOR) (PGI RECEPTOR).//9.90E-135//257aa//99%//P43119 PLACE60181070 PLACE60187690 PLACE60188340 PROST10003220//HOMEOBOX PROTEIN HOX-A2.//5.OOE-69//139aa//95%//043364 PROST10004800 PROST20005050 PROST20005670 PROST20021010 PROST20024890 PROST20029270 PROST20047270 PROST20047390//ZINC FINGER PROTEIN 84 (ZINC FINGER PROTEIN HPF2).//5.70E- 52//427aa//31%//P51523 PROST20050670 PROST20052280 PROST20057930 PROST20059040 PROST20066880//Mus musculus zinc finger protein 276 C2H2 type (Zfp276) mRNA, complete cds.//9.80E-101//192aa//94%//AF178935 PROST20079500 PROST20083600//Bos taurus pyruvate dehydrogenase phosphatase regulatory subunit precursor, mRNA, complete cds.//1.40E-101//243aa//83%//AF026954 PROST20087700 PROST20097950 PROST20100460//Homo sapiens secretory mucin MUC6 (MUC6) mRNA, partial cds.//3.1OE-216//421aa//98%//U97698 PROST20104000//SPLICEOSOME ASSOCIATED PROTEIN 62 (SAP 62) (SF3A66).//1.40E- 20//128aa//39%//Q62203 PROST20107820//Human C3f mRNA, complete cds.//9.90E-140//252aa//100%//U72515 PROST20111050 PROST20112970 PROST20114390 PROST20116600 PROST20120050 PROST20120160 PROST20121900 PROST20123530 PROST20127400 PROST20127800 PROST20130530 PROST20132600 PROST20133270 PROST20144220 PROST20146010 PROST20149160 PROST20149250 PROST20151240 PROST20152460 PROST20153320 PROST20159240//Homo sapiens Opa-interacting protein OIP2 MRNA, partial cds.//1.1OE-19//46aa//100%//AF025438 PROST20161950//Mus musculus RalGDS-like protein 3 mRNA, complete cds.//8.30E- 88//205aa//85%//AF237669 PROST20164440 PROST20166680 PROST20168290 PROST20169800//CYTOCHROME P450 4F2 (EC 1.14.13.30) (CYPIVF2) (LEUKOTRIENE-B4 OMEGA- HYDROXYLASE), (LEUKOTRIENE-B4 20-MONOOXYGENASE) (CYTOCHROME P450- LTB- OMEGA).//6.30E-188//507aa//66%//P78329 PROST20170980 PROST20171280//hematopoietic zinc finger//2.OOE-70//380aa//50%//NP_038894 PROST20175290 PROST20176170//Homo sapiens-ENIGMA protein mRNA, complete cds.//2.60E- 1 56//270aa//98%//AF265209 PROST20178360 PROST20185830//NITROGEN REGULATORY PROTEIN AREA.//5.50E- 07//14laa//28%//013412 PROST20189770//ZINC FINGER PROTEIN 84 (ZINC FINGER PROTEIN HPF2).//5.OOE- 155//459aa//53%//P51523 PROST20191640//Mus musculus UbcM4-interacting protein 4 mRNA, complete cds.//1.50E-91//279aa//57%//AF360998 PUAEN10000850 PUAEN20003740 PUAEN20011880//Mus musculus mRNA for MIWI (piwi), complete cds.//2.70E- 190//670aa//51%//AB032604 PUAEN20015260//Rattus norvegicus inositol polyphosphate multikinase (Ipmk) mRNA, complete cds.//2.40E-111//246aa//85%//AY014898 PUAEN20015860//Mus musculus PDZ-RGS3 protein mRNA, complete cds.//1.50E- 205//469aa//82%//AF350047 PUAEN20018820//C-ETS-2 PROTEIN.//7.90E-261//469aa//99%//P15036 PUAEN20025680 PUAEN20027580 PUAEN20030180//CARBONIC ANHYDRASE XII PRECURSOR (EC 4.2.1.1) (CARBONATE DEHYDRATASE XII) (CA-XII) (TUMOR ANTIGEN HOM-RCC-3.1.3).//7.60E- 148//259aa//95%//043570 PUAEN20040670//Mus musculus neuronal protein 4.1 mRNA, complete cds.//O//733aa//93%//AF061283 PUAEN20044000 PUAEN20045110 PUAEN20045250 PUAEN20051100//Mus musculus otogelin mRNA, complete cds.//2.60E- 89//368aa//43%//U9641 1 PUAEN20052470 PUAEN20055020//Homo sapiens goodpasture antigen-binding protein (COL4A3BP) mRNA, complete cds.//O//624aa//100%//AF136450 PUAEN20078980//faciogenital dysplasia homolog//l.OOE- 19//200aa//39%//NP_032027 PUAEN20081230 PUAEN20083140//Homo sapiens SWAP-70 mRNA, complete cds.//2.70E- 280//451aa//99%//AF210818 PUAEN20085150 PUAEN20108240//Drosophila melanogaster ankyrin 2 (Ank2) mRNA, complete cds.//5.OOE-22//200aa//35%//AF190635 RECTM10001410 RECTM20003490 RECTM20005100 SALGL10001710//Homo sapiens mRNA for C11ORF25 gene.//1.80E- 88//455aa//41%//AJ300461 SKMUS2Q001980//Mus musculus N-RAP mRNA, complete cds.//1.40E- 63//14laa//88%//U76618 SKMUS20003610//PUTATIVE MITOCHONDRIAL CARRIER PROTEIN PET8.//7.40E- 59//274aa//47%//P38921 SKMUS20007010//VESTIGIAL PROTEIN.//2.70E-14//209aa//32%//Q26366 SKMUS20007800//PROSTAGLANDIN TRANSPORTER (PGT) (MATRIN F/G).//4.20E- 47//274aa//36%//Q00910 SKMUS20011640 SKMUS20012010 SKMUS20016220//Mus musculus N-RAP mRNA, complete cds.//1.80E- 85//352aa//47%//U76618 SKMUS20018230//Homo sapiens MYPT2 mRNA, complete cds.//8.10E- 13//107aa//40%//AB003062 SKMUS20018500//Homo sapiens t(3;5)(q25.1;p34) fusion gene NPM-MLF1 mRNA, complete cds.//2.30E-131//268aa//94%//L49054 SKMUS20020840 SKMUS20021530//Homo sapiens SPG protein (SPG) mRNA, complete cds.//1.50E- 278//506aa//99%//AF302154 SKMUS20024750//RAS SUPPRESSOR PROTEIN 1 (RSU-1) (RSP-1 PROTEIN) (RSP- 1).//3.90E-21//203aa//33%//Q15404 SKMUS20028210 SKMUS20028400//Mus musculus YIP1B (Yiplb) mRNA, complete cds.//2.90E- 53//142aa//74%//AF217188 SKMUS20029200//Homo sapiens ASB-1 protein mRNA, complete cds.//1.20E- 45//302aa//39%//AF156777 SKMUS20031680 SKMUS20046670 SKMUS20048970//ACTIN, ALPHA SKELETAL MUSCLE (ALPHA-ACTIN 1).//8.OOE- 181//263aa//99%//P02568 SKMUS20049030//H.sapiens mRNA for nebulin.//3.50E-148//286aa//99%//X83957 SKMUS20077400 SKMUS20084740 SKNMC20006220 SKNSH20008190//ZINC FINGER PROTEIN 133.//2.80E-165//503aa//56%//P52736 SKNSH20020540 -SKNSH20028660 SKNSH20031740 SKNSH20034660 SKNSH20051940 SKNSH20062340 SKNSH20063040//Homo sapiens tetraspan NET-4 mRNA, complete cds.//.0OOE- 20//177aa//41%//AF065389 SKNSH20080430 SKNSH20087770 SKNSH20089400//Homo sapiens Rad5l-interacting protein mRNA, complete cds.//2.20E-172//292aa//93%//AF006259 SKNSH20091970 SMINT20001760//ZINC FINGER PROTEIN 83 (ZINC FINGER PROTEIN HPFl).//1.40E- 37//138aa//37%//P51522 SMINT20005410 SMINT20008240 SMINT20009840//IG KAPPA CHAIN V-II REGION GM607 PRECURSOR (FRAGMENT).//9.OOE- 54//117aa//90%//P06309 SMINT20011140 SMINT20011580 SMINT20011990 SMINT20013480 SMINT20014580 SMINT20015590 SMINT20022020 SMINT20023280 SMINT20024570//tektin Ai//6.90E-26//124aa//45%//M97188 SMINT20026890//SMOOTHELIN.//3.1OE-278//611aa//88%//P53814 SMINT20028820//Homo sapiens mRNA for F5-2, complete cds.//2.40E- 83//162aa//98%//AB020739 SMINT20029760 SMINT20033170 SMINT20033400 SMINT20035690 SMINT20040860 SMINT20042990 SMINT20047810 SMINT20049090//Homo sapiens mRNA for partial putative mitogen-activated protein kinase kinase kinase.//2.20E-32//69aa//98%//AJ242724 SMINT20050750//SPARC PRECURSOR (SECRETED PROTEIN ACIDIC AND RICH IN CYSTEINE) (OSTEONECTIN) (ON) (BASEMENT MEMBRANE PROTEIN BM-40).//4.20E- 11l//259aa//82%//P09486 SMINT20051610//Mus musculus ES18 mRNA, complete cds.//6.90E- 235//485aa//88%//AF083929 SMINT20053300//Homo sapiens hepatocellular carcinoma-associated antigen 59 mRNA, complete cds.//7.OOE-20//44aa//100%//AF218421 SMINT20053870 SMINT20056210 SMINT20058000 SMINT20060780 SMINT20065960 SMINT20068010 SMINT20071400 SMINT20073650//IG ALPHA-1 CHAIN C REGION.//7.90E-197//353aa//100%//P01876 SMINT20076470 SMINT20080540 SMINT20089170 SMINT20092330 SMINT20092720 SMINT20095050 SMINT20098320 SMINT20100680 SMINT20101440//Human cisplatin resistance associated alpha protein (hCRA alpha) mRNA, complete cds.//1.70E-96//182aa//100%//U78556 SMINT20102780//NICOTINATE PHOSPHORIBOSYLTRANSFERASE (EC 2.4.2.11) (NAPRTASE).//5.30E-05//123aa//33%//P18133 SMINT20103690 SMINT20105000 SMINT20105330//BETA-GALACTOSIDASE PRECURSOR (EC 3.2.1.23) (LACTASE) (ACID BETA- GALACTOSIDASE).//l.OOE-54//138aa//78%//P16278 SMINT20106290//FORMAMIDOPYRIMIDINE-DNA GLYCOSYLASE (EC 3.2.2.23) (FAPY-DNA GLYCOSYLASE).//7.OOE-07//214aa//32%//050606 SMINT20106720//Homo sapiens mRNA for immunoglobulin lambda heavy chain.//3.30E-235//477aa//89%//Y14737 SMINT20108530 SMINT20109970 SMINT20110330 SMINT20110660//Homo sapiens mammalian inositol hexakisphosphate kinase 2 (IP6K2) mRNA, complete cds.//1.20E-33//68aa//100%//AF177145 SMINT20112730//IG ALPHA-1 CHAIN C REGION.//1.70E-196//353aa//99%//P01876 SMINT20115880//Kruppel associated box (KRAB) zinc finger 1 [Rattus norvegicus]//1.50E-42//211aa//45%//NP_062566 SMINT20121220//MYOSIN HEAVY CHAIN, NONMUSCLE TYPE B (CELLULAR MYOSIN HEAVY CHAIN, TYPE B) (NMMHC-B).//1.OOE-18//493aa//24%//P35580 SMINT20121950//HYPOTHETICAL 70.2 KDA PROTEIN C22E12.10C IN CHROMOSOME I.//5.70E-16//9Oaa//45%//Q10361 SMINT20122850 SMINT20122910//Mus musculus StAR-related protein 1-4E mRNA, partial cds.//1.50E-77//170aa//82%//AY007808 SMINT20127350//U1 SMALL NUCLEAR RIBONUCLEOPROTEIN 70 KDA (Ul SNRNP 70 KDA) (SNRP70).//3.50E-14//186aa//32%//P08621 SMINT20127930//IG ALPHA-1 CHAIN C REGION.//7.90E-197//353aa//100%//P01876 SMINT20130320//Rattus norvegicus MHC class II transactivator type IV (CIITA) mRNA, complete cds.//2.50E-33//645aa//26%//AF251307 SMINT20131810 SMINT20132280 SMINT20136130//IG LAMBDA CHAIN C REGIONS.//4.OOE-51//lOSaa//95%//P01842 SMINT20138900//DESMIN.//7.20E-203//425aa//94%//P17661 SMINT20144430//IG LAMBDA CHAIN V-I REGION BL2 PRECURSOR.//3.80E- 55//130aa//83%//P06316 SMINT20144800//Human zinc finger protein zfp6 (ZF6) mRNA, partial cds.//1.60E-139//354aa//70%//U71363 SMINT20144890 SMINT20152940//Mus musculus ATP-dependent zinc metalloprotease (Afg3ll) mRNA, complete cds; nuclear gene for mitochondrial product.//1.1OE- 52//75aa//84%//AF329695 SMINT20153260//EXTRACELLULAR MATRIX PROTEIN 1 PRECURSOR (SECRETORY COMPONENT P85).//3.50E-274//476aa//98%//Q16610 SMINT20153530 SMINT20154540//CHLORINE CHANNEL PROTEIN P64.//l.lOE-135//419aa//68%//P35526 SMINT20155180//Homo sapiens GBAS (GBAS) mRNA, complete cds.//6.70E- 115//142aa//97%//AF029786 SMINT20157450 SMINT20158100 SMINT20161220 SMINT20162860 SMINT20163960 SMINT20164400 SMINT20164770 SMINT20168570//Homo sapiens mRNA for stabilin-l (stabl gene).//5.50E- 61//128aa//98%//AJ275213 SMINT20173190 SMINT20173240 SMINT20174³60//RHYTHMICALLY EXPRESSED GENE 2 PROTEIN (DREG-2).//6.90E- 24//242aa//28%//Q94915 SMINT20177360//SPLICING FACTOR, ARGININE/SERINE-RICH 2 (SPLICING FACTOR SC35) (SC-35) (SPLICING COMPONENT, 35 KDA) (PR264 PROTEIN).//6.40E- 37//82aa//92%//P30352 SMINT20178550 SMINT20179740//IG MU CHAIN C REGION.//8.50E-248//454aa//99%//P01871 SMINT20183530//GCN20 PROTEIN.//5.50E-118//410aa//52%//P43535 SMINT20190170//IG ALPHA-1 CHAIN C REGION.//8.50E-199//353aa//100%//P01876 SMINT20191420//AMP DEAMINASE 1 (EC 3.5.4.6) (MYOADENYLATE DEAMINASE) (AMP DEAMINASE ISOFORM M).//5.40E-214//401aa//97%//P23109 SMINT20191530//PUTATIVE ATP-DEPENDENT RNA HELICASE DBP73D.//5.OOE- 85//547aa//42%//P26802 SMINT20192000 SPLEN10000830 SPLEN20000640 SPLEN20002220 SPLEN20003070 SPLEN20006070//ANKYRIN 1 (ERYTHROCYTE ANKYRIN) (ANKYRIN R) (ANKYRINS 2.1 AND 2.2).//1.50E-81//788aa//30%//P16157 SPLEN20008390//Human placenta (Diff48) mRNA, complete cds.//4.60E- 108//337aa//60%//U49187 SPLEN20008740//IMPORTIN ALPHA SUBUNIT (KARYOPHERIN ALPHA SUBUNIT) (SERINE- RICH RNA POLYMERASE I SUPPRESSOR PROTEIN).//5.50E-12//490aa//22%//Q02821 SPLEN20008820 SPLEN20011410//RHO-GTPASE-ACTIVATING PROTEIN 1 (GTPASE-ACTIVATING PROTEIN RHOGAP) (RHO-RELATED SMALL GTPASE PROTEIN ACTIVATOR) (CDC42 GTPASE-ACTIVATING PROTEIN) (P50-RHOGAP).//1.50E-21//183aa//34%//Q07960 SPLEN20013540 SPLEN20016260 SPLEN20019450 SPLEN20020070 SPLEN20021660//GAMMA-GLUTAMYLTRANSPEPTIDASE PRECURSOR (EC 2.3.2.2) (GAMMA- GLUTAMYLTRANSFERASE) (GGT).//9.OOE-23//167aa//33%//P07314 SPLEN20022230 SPLEN20023140 SPLEN20026950//POSSIBLE GLOBAL TRANSCRIPTION ACTIVATOR SNF2L2 (SNF2- ALPHA).//O//766aa//81%//P51531 SPLEN20027440//ANKYRIN 2 (BRAIN ANKYRIN) (ANKYRIN B) (ANKYRIN, NONERYTHROID).//6.1OE-25//368aa//30%//Q01484 SPLEN20029310 SPLEN20031600 SPLEN20032040 SPLEN20032190 SPLEN20033960 SPLEN20039240//HEAT SHOCK 70 KDA PROTEIN 1 (HSP70.1) (HSP70-1/HSP70- 2).//9.80E-112//213aa//100%//P08107 SPLEN20040600 SPLEN20054290//Fugu rubripes zinc finger protein, isotocin, fatty acid binding protein, sepiapterin reductase and vasotocin genes, complete cds.//4.20E-180//448aa//71%//U90880 SPLEN20076530 SPLEN20077500//Mus musculus Niban mRNA, complete cds.//1.30E- 39//351aa//31%//AB04935⁵ SPLEN20079260//ZINC FINGER PROTEIN 132.//6.30E-117//320aa//61%//P52740 SPLEN20079510 SPLEN20084600//RING CANAL PROTEIN (KELCH PROTEIN).//5.20E- 58//558aa//29%//Q04652 SPLEN20095410//ZINC FINGER PROTEIN 184 (FRAGMENT).//6.50E- 83//236aa//58%//Q99676 SPLEN20095550 SPLEN20095810 SPLEN20097330 SPLEN20099700//TAT-BINDING HOMOLOG 7.//1.50E-142//553aa//48%//P54816 SPLEN20101190 SPLEN20103950//40S RIBOSOMAL PROTEIN S17.//7.10E-22//49aa//100%//PO6584 SPLEN20106250 SPLEN20117660//Homo sapiens BCL-6 corepressor (BCOR) mRNA, complete cds; alternatively spliced.//1.30E-38//139aa//61%//AF317391 SPLEN20118300//Rattus norvegicus amino acid transport system A3 (Ata3) mRNA, complete cds.//1.70E-20//210aa//28%//AF295535 SPLEN20119810 SPLEN20121750//Danio rerio uridine kinase mRNA, complete cds.//1.60E- 29//130aa//50%//AF195851 SPLEN20126190 SPLEN20128000//Xenopus laevis XMAB21 (Xmab-21) mRNA, complete cds.//6.80E- 12//287aa//24%//AF040992 SPLEN20129610 SPLEN20140800//ZINC FINGER PROTEIN 84 (ZINC FINGER PROTEIN HPF2).//1.20E- 145//586aa//47%//P51523 SPLEN20141360 SPLEN20141990 SPLEN20142100//Rattus norvegicus alpha D integrin mRNA, complete cds.//7.10E- 37//105aa//76%//AF021334 SPLEN20143180//Mus musculus EWS/FLI1 activated transcript 2 (EAT-2) mRNA, complete cds.//2.50E-45//132aa//65%//AF020263 SPLEN20144520 SPLEN20145720//Rattus norvegicus nuclear GTPase PIKE mRNA, complete cds.//2.OOE-24//120aa//45%//AF280816 SPLEN20146450//H.sapiens mRNA for plakophilin 2a and b.//1.20E- 08//87aa//42%//X97675 SPLEN20146690 SPLEN20147110//cyclin-E binding protein 1//0//580aa//58%//NP_057407 SPLEN20147390//ZINC FINGER PROTEIN 136.//i.40E-105//417aa//49%//P52737 SPLEN20149110 SPLEN20149190 SPLEN20149240//Cricetulus longicaudatus arginine N-methyltransferase p82 isoform mRNA, complete cds, alternatively spliced.//3.50E- 259//525aa//86%//AF336043 SPLEN20150940//Mus musculus histone deacetylase mHDAl mRNA, complete cds.//4.20E-187//550aa//51%//AF006602 SPLEN20151210//protein tyrosine phosphatase, non-receptor type 13(APO-l/CD95 (Fas)-associated phosphatase)//3.00E-25//250aa//29%//NP_006255 SPLEN20152610 SPLEN20152760 SPLEN20157300 SPLEN20157880//Homo sapiens Ig superfamily receptor LNIR precursor, mRNA, complete cds.//1.70E-05//137aa//29%//AF160477 SPLEN20158900 SPLEN20158990 SPLEN20160450//Homo sapiens mRNA for Hrs, complete cds.//5.60E- 28//59aa//100%//D84064 SPLEN20160690 SPLEN20160980 SPLEN20162680//NUCLEAR PROTEIN SNF7.//4.20E-11//189aa//25%//P39929 SPLEN20163560 SPLEN20165310//Homo sapiens mRNA for immunoglobulin lambda heavy chain.//4.90E-230//477aa//88%//Y14737 SPLEN20166270 SPLEN20167200//Mus musculus MPS1 gene and mRNA, 3end.//1.50E- 15//46aa//84%//L20315 SPLEN20169220 SPLEN20169720 SPLEN20170310//Homo sapiens Asef mRNA for APC-stimulated guanine nucleotide exchange factor, complete cds.//8.40E-95//305aa//62%//AB042199 SPLEN20171210 SPLEN20171470 SPLEN20171890 SPLEN20172120 SPLEN20173510//Xenopus laevis putative N-terminal acetyltransferase mRNA, complete cds.//3.90E-210//413aa//66%//AF247679 SPLEN20174260 SPLEN20176200 SPLEN20179180//Homo sapiens EH domain containing 2 (EHD2) mRNA, complete cds.//l.lOE-181//340aa//94%//AF181263 SPLEN20179810//Mus musculus pecanex 1 mRNA, complete cds.//3.80E- 131//534aa//51%//AF096286 SPLEN20181810//Mus musculus faciogenital dysplasia protein 2 (Fgd2) mRNA, complete cds.//6.60E-68//144aa//86%//AF017368 SPLEN20186430//PROBABLE G PROTEIN-COUPLED RECEPTOR APJ./12.20E- 163//226aa//96%//P35414 SPLEN20193110 SPLEN20194050//Homo sapiens HOTTL protein mRNA, complete cds.//9.50E- 135//264aa//93%//AF078842 SPLEN201981 10 SPLEN20204170 SPLEN20211220 SPLEN20211570 SPLEN20211940 SPLEN20212730//CALPAIN 2, LARGE [CATALYTIC] SUBUNIT (EC 3.4.22.17) (CALCIUM- ACTIVATED NEUTRAL PROTEINASE) (CANP) (M-TYPE). //1. 70E-137//265aa//98%//P17655 SPLEN20212950 SPLEN20213830 SPLEN20214400 SPLEN20214580//Mus musculus mdgl-l mRNA, complete cds.//1.40E- 16//39aa//94%//AF190⁶²⁴ SPLEN20222270//Mus musculus adaptor protein (Dokl) mRNA, complete cds.//i.1OE-42//123aa//61%//AF¹79242 SPLEN20225220 SPLEN20242320 SPLEN20242730 SPLEN20243830//TRANSCRIPTION INITIATION FACTOR TFIID 135 KDA SUBUNIT (TAFII- 135) (TAFII135) (TAFII-130) (TAFII130).//4.70E-38//98aa//87%//000268 SPLEN20245300// ADP-ribosylation factor binding protein GGA1//3.OOE- 39//120aa//76%//NP_037497 SPLEN20249560 SPLEN20250170//PUTATIVE RHO/RAC GUANINE NUCLEOTIDE EXCHANGE FACTOR (RHO/RAC GEF) (FACIOGENITAL DYSPLASIA PROTEIN HOMOLOG).//1.40E-51//488aa//27%//P52734 SPLEN20250390//CALPAIN 1, LARGE [CATALYTIC] SUBUNIT (EC 3.4.22.17) (CALCIUM- ACTIVATED NEUTRAL PROTEINASE) (CANP) (MU-TYPE). //3. OOE-55//1 15aa//94%//P07384 SPLEN20252190//ZINC FINGER PROTEIN 135.//6.OOE-89//303aa//52%//P52742 SPLEN20261440 SPLEN20264110 SPLEN20267650//ZINC FINGER PROTEIN 184 (FRAGMENT).//5.20E- 90//410aa//45%//Q99676 SPLEN20273950 SPLEN20279950 SPLEN20280660 SPLEN20283650//Mus musculus ras activator RasGRP (Rasgrp) mRNA, complete cds.//9.80E-54//182aa//57%//AF106070 SPLEN20284240//Homo sapiens hOBDPF mRNA for osteoblast differentiation promoting factor, complete cds.//9.80E-93//177aa//98%//AB048363 SPLEN20292950//ATP-binding cassette, sub-family A member 8 //3.30E- 211//469aa//64%//NP_009099 SPLEN20293800 SPLEN20303970 SPLEN20304950//Homo sapiens CAGH32 mRNA, partial cds.//9.60E- 44//86aa//98%//U80743 SPLEN20305620//DIHYDROOROTATE DEHYDROGENASE PRECURSOR (EC 1.3.3.1) (DIHYDROOROTATE OXIDASE) (FRAGMENT).//3.60E-59//124aa//96%//Q02127 SPLEN20329240 STOMA20001830//IG ALPHA-1 CHAIN C REGION.//2.10E-196//353aa//99%//POi876 STOMA20005390//IG ALPHA-1 CHAIN C REGION.//7.90E-197//353aa//100%//P01876 STOMA20005670//Homo sapiens mRNA for immunoglobulin lambda heavy chain.//1.9OE-216//478aa//83%//Y14737 STOMA20006400//Homo sapiens IGHG3 gene for immunoglobulin heavy chain gamma 3 constant region, 4-exon hinge, isolate Lib-A2.//8.40E- 214//377aa//100o%//AJ390247 STOMA20006780 STOMA20006860//Homo sapiens TOB3 mRNA, complete cds.//i.80E- 74//159aa//97%//AF343078 STOMA20008880//MYOCILIN PRECURSOR (TRABECULAR MESHIWORK-INDUCED GLUCOCORTICOID RESPONSE PROTEIN).//i.OOE-196//405aa//91%//Q99972 STOMA20010250//Homo sapiens RNA-binding protein (RBMS3) mRNA, complete cds.//7.70E-46//116aa//86%//AF023259 STOMA20013890 STOMA20026880 STOMA20032890//ZINC FINGER PROTEIN CKRl.//5.80E-30//162aa//38%//P30373 STOMA20034770//IG ALPHA-1 CHAIN C REGION.//4.40E-196//353aa//99%//P01876 STOMA20036460 STOMA20046680//FOSB PROTEIN (GO/GI SWITCH REGULATORY PROTEIN 3).//4.10E- 14//36aa//100%//P53539 STOMA20048520 STOMA20048840 STOMA20051200 STOMA20056640//Ig lambda chain V region //6.80E-54//150aa//73%//S23626 STOMA20056670//IG ALPHA-1 CHAIN C REGION.//7.90E-197//353aa//100%//PO1876 STOMA20057820 STOMA20062130//IG KAPPA CHAIN V-III REGION HAH PRECURSOR.//3.10E- 53//129aa//80%//P18135 STOMA20062290 STOMA20063250//TRANSCRIPTION FACTOR COE3 (EARLY B-CELL FACTOR 3) (EBF-3) (OLF-1/EBF- LIKE 2) (OE-2) (O/E-2).//7.50E-50//105aa//93%//008791 STOMA20063980 STOMA20064470//PLACENTAL RIBONUCLEASE INHIBITOR .(RIBONUCLEASE/ANGIOGENIN INHIBITOR) (RAI) (RI).//3.60E-14//262aa//30%//P13489 STOMA20067800 STOMA20069040 STOMA20072690 STOMA200-76800 STOMA20077450//UBIQUITIN-ACTIVATING ENZYME El (AlS9 PROTEIN).//2.70E- 228//430aa//97%//P22314 STOMA20080500//ATP-binding cassette, sub-family A, member 7, isoform a//l.OOE-297//538aa//94%//NP_061985 STOMA20083610//IG ALPHA-1 CHAIN C REGION.//7.90E-197//353aa//100%//PO1876 STOMA20086140 STOMA20088380//IG ALPHA-1 CHAIN C REGION.//2.10E-196//352aa//lOO%//PO1876 STOMA20092530//Homo sapiens mRNA for immunoglobulin lambda heavy chain.//3.10E-239//477aa//91%//Yl4737 STOMA20092560 STOMA20092890 SYNOV20001520//Homo sapiens kappa 1 immunoglobulin light chain mRNA, complete cds.//5.50E-107//236aa//86%//AF113887 SYNOV20001730//Human (hybridoma H210) anti-hepatitis A IgG variable region, constant region, complementarity-determining regions mRNA, complete cds.//2.60E-226//479aa//86%//M87789 SYNOV20002510//Homo sapiens IGHG3 gene for immunoglobulin heavy chain gamma 3 constant region, 4-exon hinge, isolate Kp-25.//6.60E- 214//377aa//100%//AJ390254 SYNOV20002790//Human (hybridoma H210) anti-hepatitis A IgG variable region, constant region, complementarity-determining regions mRNA, complete cds.//1.30E-238//476aa//91%//M87789 SYNOV20002970//Human (hybridoma H210) anti-hepatitis A IgG variable region, constant region, complementarity-determining regions mRNA, complete cds.//7.OOE-226//476aa//86%//M87789 SYNOV20003970 SYNOV20004260//Homo sapiens mRNA for immunoglobulin lambda heavy chain.//i.1OE-225//477aa//86%//Y14737 SYNOV20007000//Human (hybridoma H210) anti-hepatitis A IgG variable region, constant region, complementarity-determining regions mRNA, complete cds.//4.OOE-239//478aa//91%//M87789 SYNOV20008240//Human (hybridoma H210) anti-hepatitis A IgG variable region, constant region, complementarity-determining regions mRNA, complete cds.//4.10E-237//479aa//90%//M87789 SYNOV20009230//IG ALPHA-1 CHAIN C REGION.//7.90E-197//353aa//100%//P01876 SYNOV20010880//Human (hybridoma H210) anti-hepatitis A IgG variable region, constant region, complementarity-determining regions mRNA, complete cds.//1.60E-233//476aa//89%//M87789 SYNOV20011110//Human (hybridoma H210) anti-hepatitis A IgG variable region, constant region, complementarity-determining regions mRNA, complete cds.//6.90E-235//476aa//89%//M87789 SYNOV20013000//Ig gamma =immunoglobulin heavy chain [rats, humanized lympholytic MoAb CAMPATH-lH, mRNA, 1465 nt].//7.70E-220//472aa//86%//S79307 SYNOV20013560//Homo sapiens mRNA for immunoglobulin lambda heavy chain.//1.40E-234//477aa//89%//Y14737 SYNOV20013900//Homo sapiens mRNA for immunoglobulin kappa heavy chain.//3.50E-231//476aa//89%//Y14735 SYNOV20017080 SYNOV30001840 TBAES20000590 TBAES20002550//AMINOPEPTIDASE B (EC 3.4.11.6) (ARGINYL AMINOPEPTIDASE) (ARGININE AMINOPEPTIDASE) (CYTOSOL AMINOPEPTIDASE IV) (AP-B).//2.10E- 310//586aa//89%//009175 TBAES20003150//CYTOCHROME P450 4A1 (EC 1.14.15.3) (CYPIVAL) (LAURIC ACID OMEGA- HYDROXYLASE) (P450-LA-OMEGA -) (P452).//1.40E-82//323aa//44%//P08516 TBAES20003770//SPERM-SPECIFIC ANTIGEN 2 (CLEAVAGE SIGNAL-1 PROTEIN) (CS- 1).//1.90E-122//249aa//97%//P28290 TCOLN20001390 TESOP20000900 TESOP20003120 TESOP20004000//CATHEPSIN B PRECURSOR (EC 3.4.22.1) (CATHEPSIN B1) (APP SECRETASE).//3.30E-111//194aa//98%//P07858 TESOP20005270//MONOAMINE-SULFATING PHENOL SULFOTRANSFERASE (EC 2.8.2.1) (SULFOTRANSFERASE, MONOAMINE-PREFERRING) (M-PST) (THERMOLABILE PHENOL SULFOTRANSFERASE) (TL-PST) (PLACENTAL ESTROGEN SULFOTRANSFERASE) (CATECHOLAMINE-SULFATING PHENOL SULFOTRANSFERASE) (HAST3).//3.40E- 47//92aa//100%//P50224 TESOP20005690//Mus musculus p53 apoptosis-associated target (Perp) mRNA, complete cds.//2.30E-53//113aa//91%//AF249870 TESTI10000940 TESTI20001000//FORMAMIDOPYRIMIDINE-DNA GLYCOSYLASE (EC 3.2.2.23) (FAPY-DNA GLYCOSYLASE).//7.80E-06//238aa//28%//P74290 TESTI20001170 TESTI20001720 TESTI20002720//TUBULIN-TYROSINE LIGASE (EC 6.3.2.25) (TTL).//1.70E- 18//237aa//29%//P38584 TEST120002780//ADENYLATE CYCLASE (EC 4.6.1.1) (ATP PYROPHOSPHATE-LYASE) (ADENYLYL CYCLASE).//1.90E-11//140aa//36%//P08678 TESTI20004890 TESTI20011200 TESTI20017950 TESTI20018230 ,TESTI20023510 TESTI20029930 TESTI20030310 TESTI20030890 TESTI20031270//TUMOR NECROSIS FACTOR, ALPHA-INDUCED PROTEIN 1, ENDOTHELIAL (B12 PROTEIN).//7.30E-52//146aa//71%//Q13829 TESTI20031810 TESTI20035960//VEGETATIBLE INCOMPATIBILITY PROTEIN HET-E-1.//1.70E- 67//329aa//40%//Q00808 TEST120036380//DRA PROTEIN (DOWN-REGULATED IN ADENOMA).//6.40E- 46//243aa//35%//P40879 TESTI20037560 TEST120038270 TESTI20039400//EBNA-1 NUCLEAR PROTEIN.//3.60E-43//298aa//43%//P03211 TESTI20041690//TRANSCRIPTION INTERMEDIARY FACTOR 1-BETA (KRAB-A INTERACTING PROTEIN) (KRIP-1).//l.OOE-12//341aa//21%//Q62318 TESTI20044230//Mus musculus testis-specific Y-encoded-like protein (Tspyll) mRNA, complete cds.//1.70E-94//291aa//64%//AF042180 TESTI20044310//RAS SUPPRESSOR PROTEIN 1 (RSU-1) (RSP-1 PROTEIN) (RSP- 1).//6.70E-06//118aa//32%//Q15404 TESTI20046750 TESTI20057750 TESTI20060400//Columba livia mRNA for 5′-nucleotidase.//3.80E- 115//328aa//66%//AJ131243 TESTI20061110//Xenopus laevis katanin p60 MRNA, partial cds./11.80E- 170//489aa//66%//AF177942 TESTI20063830//Drosophila melanogaster nuclear fallout (nuf) mRNA, nuf-1 allele, complete cds.//2.10E-34//371aa//29%//AF045015 TESTI20066670//probable acyl-CoA dehydrogenase //1.90E-72//222aa//60%//D75616 TEST120066770 TEST120067200//PRE-B-CELL LEUKEMIA TRANSCRIPTION FACTOR-3 (HOMEOBOX PROTEIN PBX3).//4.20E-132//352aa//71%//P40426 TESTI20076850 TESTI20082330//helicase II homolog//4.10E-44//775aa//25%//T13889 TESTI20083200//Homo sapiens mitogen-activated protein kinase phosphatase x (MKPX) mRNA, complete cds.//l.OOE-41//13laa//58%//AF165519 TESTI20083940 TESTI20086210 TESTI20087620 TESTI20088220//ZINC FINGER PROTEIN 91 (ZINC FINGER PROTEIN HTF1O) (HPF7).//8.50E-175//633aa//48%//Q05481 TESTI20094020 TESTI20094120 TESTI20094230//Strongylocentrotus purpuratus tektin Al mRNA, complete cds//4.50E-64//252aa//50%//M97188 TESTI20094470//ETS-RELATED PROTEIN 71 (ETS TRANSLOCATION VARIANT 2).//1.40E- 183//318aa//99%//000321 TESTI20098350 TESTI20098530 TESTI20102800 TESTI20105720 TESTI20108720//PROTEIN PHOSPHATASE 2C BETA ISOFORM (EC 3.1.3.16) (PP2C-BETA) (IA) (PROTEIN PHOSPHATASE lB).//3.30E-49//249aa//46%//P36993 TESTI20110280 TESTI20112940 TESTI20114070 TESTI20116650 TEST120116830//Homo sapiens liprin-beta2 mRNA, partial cds.//8.20E- 1 7//50aa//92%//AF0³48⁰3 TESTI20121550//NUCLEOPORIN-LIKE PROTEIN RIP (REV INTERACTING PROTEIN) (REV/REX ACTIVATION DOMAIN-BINDING PROTEIN).//1.60E-152//363aa//85%//P52594 TESTI20122310 TESTI20123080 TESTI20123560 TESTI20127760 TESTI20128350 TESTI20129150 TESTI20129220 TESTI20130010//ZINC FINGER PROTEIN 84 (ZINC FINGER PROTEIN HPF2).//2.10E- 63//173aa//65%//P51523 TESTI20130120 TESTI2Q135660 TESTI20136100//ZINC/CADMIUM RESISTANCE PROTEIN. //3. 70E-12//lOlaa//35%//P20107 TESTI20136710 TESTI20136990 TESTI20137370 TESTI20137670 TESTI20143240 TESTI20143390//Mus musculus testicular condensing enzyme (AMAC1) mRNA, complete cds.//1.60E-51//123aa//79%//AF016712 TESTI20143620 TESTI20148000//PROTEIN DISULFIDE ISOMERASE (PDI) (EC 5.3.4.1) (PROLYL 4- HYDROXYLASE BETA SUBUNIT) (CELLULAR THYROID HORMONE BINDING PROTEIN) (RETINA COGNIN) (R-COGNIN).//2.80E-75//493aa//34%//P09102 TEST120152460//MLO2 PROTEIN.//9.60E-42//170aa//40%//Q09329 TESTI20155900 TESTI20156100//KRUPPEL-LIKE FACTOR 4 (EPITHELIAL ZINC-FINGER PROTEIN EZF).//2.30E-32//254aa//32%//043474 TESTI20157100 TESTI20157520 TESTI20159140 TESTI20161970 TESTI20164100 TEST120168480//H.sapiens mRNA for titin protein (clone hhl-hh54).//6.30E- 48//393aa//31%//X90568 TESTI20168630 TESTI20168960 TESTI20169960 TESTI20170350 TESTI20171020 TESTI20178160 TESTI20179320 TESTI20183370 TESTI20184620//OXYSTEROL-BINDING PROTEIN.//6.20E-27//18laa//28%//P16258 TESTI20185650//Xenopus laevis ubiquitin-like fusion protein mRNA, complete cds.//2.90E-129//543aa//46%//LO8474 TESTI20185810 TESTI20189410//Mus musculus axotrophin mRNA, complete cds.//7.50E- 43//142aa//57%//AF155739 TESTI20192280 TESTI20192800//Homo sapiens nasopharyngeal carcinoma susceptibility protein LZ16 mRNA, complete cds.//2.40E-23//164aa//41%//AF121775 TESTI20193360 TESTI20194300 TESTI20194810 TESTI20197940 TESTI20199170 TESTI20199760//TRICHOHYALIN.//8.80E-59//547aa//30%//P37709 TESTI20200260 TESTI20200710//Mus musculus epithelial protein lost in neoplasm-a (Eplin) mRNA, complete cds.//4.40E-40//212aa//42%//AF307844 TESTI20202650 TESTI20203440 TESTI20204450//M.musculus of DNA encoding DNA-binding protein.//1.90E- 58//477aa//32%//Z54200 TESTI20208400//PROLIFERATING-CELL NUCLEOLAR ANTIGEN P120 (PROLIFERATION- ASSOCIATED NUCLEOLAR PROTEIN P120).//1.70E-16//18laa//33%//P46087 TESTI20208710 TESTI20209460 TESTI20209810 TESTI20209990 TESTI20211160 TESTI20211220 TESTI20211240 TESTI20213150 TESTI20213580 TESTI20214250//MITOCHONDRIAL CARRIER PROTEIN PMT.//i.lOE- 34//242aa//36%//P32332 TEST120215990//Homo sapiens leucine-rich repeats containing F-box protein FBL3 mRNA, complete cds.//l.lOE-39//375aa//28%//AF186273 TESTI20216370//LIVER CARBOXYLESTERASE PRECURSOR (EC 3.1.1.1) (ES-MALE) (ESTERASE-31).//1.50E-60//164aa//68%//Q63880 TESTI20220100 TESTI20220650 TESTI20224620 TESTI20226230//Rattus norvegicus KPL2 (Kpl2) mRNA, complete cds.//8.90E- 111//371aa//59%//AF102129 TEST120226490 TESTI20229600//Drosophila melanogaster SP2353 mRNA, complete cds.//8.30E- 117//607aa//33%//AF239610 TEST120230250 TESTI20230850//CIRCADIAN LOCOMOTER OUTPUT CYCLES KAPUT PROTEIN (MCLOCK).//l.OOE-23//186aa//30%//008785 TESTI20231920 TESTI20231940//Human OB binding protein-2 (OB-BP2) mRNA, complete cds.//4.60E-14//140aa//36%//U71383 TESTI20232140//i-PHOSPHATIDYLINOSITOL-4,5-BISPHOSPHATE PHOSPHODIESTERASE DELTA 1 (EC 3.1.4.11) (PLC-DELTA-1) (PHOSPHOLIPASE C-DELTA-1) (PLC-III) (FRAGMENT).//2.50E-90//388aa//47%//P10895 TESTI20234140 TESTI20234270 TESTI20234360//PEPTIDYL-PROLYL CIS-TRANS ISOMERASE NIMA-INTERACTING 1 (EC 5.2.1.8).//5.90E-66//128aa//98%//Q13526 TESTI20237520//poly(A)-specific ribonuclease (deadenylation nuclease)//i. lOE- 34//31laa//26%//NP_002573 TEST120238000 TEST120238610//MELANOMA-ASSOCIATED ANTIGEN B1 (MAGE-B1 ANTIGEN) (MAGE-XP ANTIGEN) (DAM10).//6.80E-69//268aa//51%//P43366 TESTI20239470 TESTI20239510//ubiquitin specific protease 6//5. 60E-43//182aa//50%//NP_004496 TESTI20240090 TESTI20241530 TESTI20241920 TESTI20242830 TESTI20242990 TESTI20244190//Homo sapiens IGHG3 gene for immunoglobulin heavy chain gamma 3 constant region, 4-exon hinge, isolate Lib-A2.//8.40E- 214//377aa//100%//AJ390247 TESTI20244760 TESTI20249990//ATAXIN 7 (SPINOCEREBELLAR ATAXIA TYPE 7 PROTEIN).//7.30E- 49//388aa//37%//015265 TESTI20254220 TESTI20254540//Homo sapiens hepatocellular carcinoma-associated antigen 59 mRNA, complete cds.//1.60E-1OO//197aa//98%//AF218421 TESTI20254860//TUMOR SUPPRESSOR PROTEIN DCC PRECURSOR.//1.20E- 35//564aa//28%//P7021 1 TESTI20255820 TESTI20258460//Homo sapiens OSBP-related protein 4 mRNA, complete cds.//8.20E-196//369aa//99%//AF323731 TESTI20262330 TESTI20262910 TESTI20265250 TESTI20265370 TESTI20265970 TESTI20266740//Homo sapiens topoisomerase-related function protein (TRF4-1) mRNA, partial cds.//2.70E-105//278aa//71%//AF089896 TESTI20269570 TESTI20271850 TESTI20272060 TESTI20272390 TESTI20272960//Mus musculus gene for odorant receptor MOR83, complete cds.//3.30E-84//306aa//50%//AB030894 TEST120275030 TESTI20275620 TESTI20277360 TESTI20278200 TESTI20278400//INTRACELLULAR PROTEIN TRANSPORT PROTEIN USO1.//2.50E- 1 1//604aa//21%//P25386 TESTI20280980 TESTI20282540 TESTI20284880 TESTI20285830 TESTI20288110 TESTI20288910//Mus musculus endophilin II mRNA, complete cds.//2.10E- 110//225aa//92%//U58885 TESTI20289850 TESTI20291310 TESTI20291620 TESTI20291960//RHOMBOID PROTEIN (VEINLET PROTEIN).//2.OOE- 40//230aa//38%//P20350 TESTI20294700 TESTI20297850 TESTI20301360 TESTI20303220//Rattus norvegicus neural cell adhesion protein BIG-2 precursor (BIG-2) mRNA, complete cds.//O//807aa//94%//U35371 TESTI20303360 TESTI20303420 TESTI20305540//M.musculus mRNA for IB3/5-polypeptide.//1.30E- 183//684aa//56%//X79131 TESTI20305560 TESTI20307540 TESTI20307700 TESTI20308600 TESTI20309170//Mucor circinelloides crgA gene for carotenoid regulatory protein.//3.10E-41//198aa//40%//AJ250998 TESTI20310070 TESTI20311290 TESTI20314180//TRYPSIN I-P1 PRECURSOR (EC 3.4.21.4).//2.10E- 25//86aa//40%//Q90627 TESTI20316870//Homo sapiens mRNA for cartilage-associated protein (CASP).//4.90E-106//199aa//99%//AJ006470 TESTI20317600 TESTI20318090//ZINC FINGER PROTEIN 135.//2.OOE-56//208aa//50%//P52742 TESTI20319190 TESTI20320440//THIOREDOXIN.//4.30E-32//103aa//63%//P50413 TESTI20320670//Rattus norvegicus mRNA for type A/B hnRNP protein p40.//2.20E- 170//337aa//91%//AJ238854 TESTI20326810//RAN-SPECIFIC GTPASE-ACTIVATING PROTEIN (RAN BINDING PROTEIN 1) (RANBPl).//2.OOE-33//66aa//100%//P34022 TESTI20327680 TESTI20327740 TEST120328280 TEST120330310 TEST120332420//Mus musculus cell cycle checkpoint control protein Mrad9 gene, complete cds.//5.80E-20//246aa//28%//AF045662 TESTI20333000 TESTI20333950 TESTI20334410//Sus scrofa RNA helicase (RHIV-1) mRNA, complete cds.//4.40E- 58//281aa//33%//AF181119 TESTI20335050//Homo sapiens cell cycle checkpoint protein CHFR mRNA, complete cds.//6.OOE-188//333aa//99%//AF170724 TESTI20335200//BILIARY GLYCOPROTEIN 1 PRECURSOR (BGP-1) (ANTIGEN CD66) (CD66A ANTIGEN).//8.10E-20//87aa//50%//P13688 TESTI20336410 TESTI20337100 TESTI20342430 TESTI20343070 TESTI20343570//TRIPEPTIDYL-PEPTIDASE II (EC 3.4.14.10) (TPP II) (TRIPEPTIDYL AMINOPEPTIDASE).//2.OOE-75//201aa//75%//P29144 TESTI20345060 TESTI20347180//Mus musculus membrane protein TMS-2 mRNA, complete cds.//6.OOE-35//186aa//41%//AF181685 TEST120347300 TEST120347740 TESTI20347770 TESTI20351830 TESTI20352620//PROACTIVATOR POLYPEPTIDE PRECURSOR [CONTAINS: SAPOSIN A (PROTEIN A); SAPOSIN B (SPHINGOLIPID ACTIVATOR PROTEIN 1) (SAP-1) (DISPERSIN) (SULFATIDE/GM1 ACTIVATOR); SAPOSIN C (CO-BETA-GLUCOSIDASE) (Al ACTIVATOR) (GLUCOSYLCERAMIDASE ACTIVATOR) (SPHINGOLIPID ACTIVATOR PROTEIN 2) (SAP-2); SAPOSIN D (PROTEIN C) (COMPONENT C)].//1.30E-52//240aa//44%//P07602 TESTI20355020//Drosophila sp. Hls (hls) mRNA, complete cds.//9.80E- 30//416aa//28%//S79915 TEST120357750 TESTI20357930 TESTI20357960 TESTI20358980//Volvox carteri mRNA for hydroxyproline-rich glycoprotein (HRGP gene).//2.90E-37//155aa//50%//AJ242540 TESTI20361140 TESTI20366910//Homo sapiens mRNA for thioredoxin reductase II beta, complete cds.//2.OOE-233//442aa//93%//ABO19695 TESTI20367360 TESTI20368330//M-PHASE INDUCER PHOSPHATASE3 (EC 3.1.3.48).//2.10E- 258//473aa//99%//P30307 TESTI20369130 TESTI20369220 TESTI20369650//Homo sapiens mRNA for HsGAK, complete cds.//2.40E- 269//493aa//99%//D88435 TESTI20369690 TESTI20370020 TESTI20370550 TESTI20370810//Homo sapiens mRNA for LAK-4p, complete cds.//l.lOE- 74//385aa//38%//AB002405 TESTI20371030//TIP ELONGATION ABERRANT PROTEIN 1 (CELL POLARITY PROTEIN TEAl).//7.80E-23//243aa//29%//P87061 TESTI20371060 TESTI20373820 TESTI20375340//1-PHOSPHATIDYLINOSITOL-4,5-BISPHOSPHATE PHOSPHODIESTERASE DELTA 1 (EC 3.1.4.11) (PLC-DELTA-1) (PHOSPHOLIPASE C-DELTA-1) (PLC-III) (FRAGMENT).//4.80E-68//273aa//45%//P10895 TESTI20377230 TESTI20378190//ZINC FINGER PROTEIN 91 (ZINC FINGER PROTEIN HTF1O) (HPF7).//2.30E-114//323aa//52%//QO5481 TEST120378450 TESTI20380650 TESTI20381040 TESTI20382750//Homo sapiens hookl protein (HOOKI) mRNA, complete cds.//2.60E- 96//195aa//99%//AF044923 TESTI20383880//Homo sapiens gamma cysteine string protein mRNA, partial cds.//6.50E-61//109aa//100%//AF368277 TESTI20385960//Homo sapiens mRNA for RET finger protein-like 3.//4.80E- 156//288aa//100%//AJ010232 TEST120386230 TESTI20386440 TESTI20388580 TESTI20390260 TESTI20390410 TESTI20391130 TESTI20391210 TESTI20391770 TESTI20392090 TESTI20392250//Homo sapiens VAV-3 protein mRNA, complete cds.//9.80E- 145//268aa//98%//AF067817 TESTI20392270 TESTI20392760//PROTEIN PHOSPHATASES PP1 REGULATORY SUBUNIT SDS22.//5.70E- 22//226aa//31%//P36047 TESTI20393530//MITOCHONDRIAL PHOSPHATE CARRIER PROTEIN PRECURSOR (PTP).//9.OOE-34//105aa//68%//P12234 TESTI20396130 TESTI20397760//POTENTIAL PHOSPHOLIPID-TRANSPORTING ATPASE IIB (EC 3.6.1.- ).//i.60E-109//221aa//90%//P98195 TESTI20400940//CENTROMERIC PROTEIN E (CENP-E PROTEIN).//4.70E- 1 6//669aa//23%//Q02224 TESTI20401020//Oryctolagus cuniculus peroxisomal Ca-dependent solute carrier mRNA, complete cds.//5.80E-64//234aa//56%//AF004161 TESTI20401280 TESTI20401430 TESTI20404240//INTERFERON-RELATED DEVELOPMENTAL REGULATOR 2 (SKMC15 PROTEIN).//4.60E-36//46aa//93%//QI2894 TESTI20406420 TESTI20408150 TESTI20408970//NUCLEAR ENVELOPE PORE MEMBRANE PROTEIN POM 121 (PORE MEMBRANE PROTEIN OF 121 KDA) (P145).//4.30E-16//264aa//30%//P52591 TESTI20409440 TESTI20409890//GCD14 PROTEIN.//2.30E-46//263aa//40%//P46959 TESTI20413300 TESTI20415170 TESTI20415640 TESTI20416640//CHOLINE/ETHANOLAMINE KINASE [INCLUDES: CHOLINE KINASE (EC 2.7.1.32) (CK); ETHANOLAMINE KINASE (EC 2.7.1.82) (EK)].//2.10E- 77//139aa//100%//Q9Y259 TEST120417300//DYNEIN BETA CHAIN, CILIARY.//6.80E-129//552aa//45%//P39057 TESTI20419560 TESTI20420620//TRANSCRIPTION INITIATION FACTOR TFIID 70 KDA SUBUNIT (TAFII- 70) (TAFII-80) (TAFII80).//O//526aa//99%//P49848 TESTI20421490 TEST120422640 TESTI20423020 TESTI20424000 TESTI20424730 TESTI20425070 TESTI20427830 TEST120428060 TESTI20429280 TESTI20429580 TESTI20432750//Mus musculus pantothenate kinase 1 beta (panKIbeta) mRNA, complete cds.//9.70E-165//363aa//82%//AF200357 TESTI20432820//ZINC FINGER PROTEIN 43 (ZINC PROTEIN HTF6).//1.OOE- 173//403aa//75%//P28160 TESTI20433130 TESTI20436560//LAMIN C.//9.20E-235//453aa//99%//P02546 TESTI20438570//Homo sapiens nolp mRNA, complete cds.//2.70E- 43//146aa//60%//AB017800 TESTI20438660 TESTI20441940//Human K-Cl cotransporter (hKCCl) mRNA, complete cds.//5.50E- 139//264aa//99%//U55054 TEST120442760//Homo sapiens Ig-like membrane protein (IGSF3) mRNA, complete cds.//0//545aa//93%//AF031174 TESTI20443090//DNA REPAIR PROTEIN RAD51 HOMOLOG 4 (R51H3) (TRAD).//2.70E- 68//14laa//100%//075771 TESTI20444130 TESTI20444180 TESTI20447540 TESTI20449200//METABOTROPIC GLUTAMATE RECEPTOR 7 PRECURSOR.//9.OOE- 173//313aa//99%//Q14831 TESTI20451710 TESTI20451990 TESTI20455090//KERATIN, TYPE I CYTOSKELETAL 18 (CYTOKERATIN 18) (K18) (CK 18).//i.20E-76//199aa//80%//PO5783 TESTI20455620//HEAT SHOCK-RELATED 70 KDA PROTEIN 2 (HEAT SHOCK 70 KDA PROTEIN 2).//4.80E-218//336aa//99%//P54652 TESTI20456110//52 KDA RO PROTEIN (SJOGREN SYNDROME TYPE A ANTIGEN (SS-A)) (RO(SS-A)).//9.40E-75//382aa//43%//P19474 TESTI20458190 TESTI20463520 TESTI20463580//UBIQUITIN CARBOXYL-TERMINAL HYDROLASE 4 (EC 3.1.2.15) (UBIQUITIN THIOLESTERASE 4) (UBIQUITIN-SPECIFIC PROCESSING PROTEASE 4) (DEUBIQUITINATING ENZYME 4) (UBIQUITOUS NUCLEAR PROTEIN HOMOLOG).//1.50E- 17//19Oaa//28%//Q13107 TESTI20465350//2,3′-CYCLIC NUCLEOTIDE 3′-PHOSPHODIESTERASE (EC 3.1.4.37) (CNP) (CNPASE).//2.20E-123//231aa//100%//P09543 TESTI20465520 TESTI20465690//Homo sapiens Borg4 mRNA, complete cds.//2.OOE- 152//235aa//99%//AB042237 TEST120467210//Homo sapiens mRNA for HELG protein.//2.OOE- 1 66//368aa//83%//AJ27729 1 TESTI20467320//Mus musculus WAVE-1 mRNA, complete cds.//1.20E- 11 1//233aa//88%//AF290877 TEST120467970 TESTI20468630 TESTI20471410//PROTEIN PHOSPHATASE 2C ALPHA ISOFORM (EC 3.1.3.16) (PP2C- ALPHA) (IA) (PROTEIN PHOSPHATASE lA).//1.30E-210//382aa//99%//P35813 TESTI20471470 TESTI20471530 TESTI20472120 TEST120473420 TESTI20473830//Columba livia mRNA for 5′-nucleotidase.//2.OOE- 14//75aa//49%//AJ131243 TESTI20477920 TESTI20478010 TESTI20478180 TESTI20478850 TESTI20479300 THYMU10005360//Human T cell receptor beta chain (TCRB) mRNA, VNDNJC region, 5end.//1.20E-130//270aa//91%//L07294 THYMU10005540//Homo sapiens mRNA for immunoglobulin lambda heavy chain.//1.20E-237//479aa//90%//Y14737 THYMU20000570 THYMU20011950 THYMU20015210 THYMU20018190 THYMU20023380//Homo sapiens m6A methyltransferase (MT-A70) gene, complete cds.//1.20E-38//86aa//100%//AF014837 THYMU20027560 THYMU20029100 THYMU20032870 THYMU20039810//MPS1 protein//2.60E-283//646aa//77%//I52603 THYMU20045120 THYMU20058070 THYMU20061700 THYMU20066100 THYMU20070360 THYMU20075320 THYMU20081490//Homo sapiens ICB-1 mRNA, complete cds.//1.50E- 23//267aa//33%//AF044896 THYMU20095960 THYMU20100410 THYMU20101610 THYMU20101920 THYMU20105190//MYOSIN I ALPHA (MMI-ALPHA).//7.50E-54//282aa//45%//P46735 THYMU20106710//Homo sapiens T-cell receptor alpha delta locus from bases 501613 to 752736 (section 3 of 5) of the Complete Nucleotide Sequence.//1.20E-54//113aa//98%//AE000660 THYMU20108310//Mouse NCBP-29 mRNA for PW29, complete cds.//7.70E- 93//102aa//99%//D49429 THYMU20111180 THYMU20111420 THYMU20111830//protease, serine, 16 (thymus)//1.40E- 129//175aa//98%//NP_005856 THYMU20114470 THYMU20115850 THYMU20118060 THYMU20118520//Xenopus laevis ubiquitin-like fusion protein mRNA, complete cds//3.OOE-42//109aa//77%//L08475 THYMU20119390 THYMU20122730//target of mybl (chicken) homolog//l.OOE- 122//233aa//100%//NP_005479 THYMU20126900//UDP-GLUCOSE 6-DEHYDROGENASE (EC 1.1.1.22) (UDP-GLC DEHYDROGENASE) (UDP-GLCDH) (UDPGDH).//1.40E-229//341aa//99%//060701 THYMU20128070 THYMU20128260 THYMU20130890//40S RIBOSOMAL PROTEIN S16.//1.90E-28//125aa//57%//P17008 THYMU20141670 THYMU20142040//WISKOTT-ALDRICH SYNDROME PROTEIN HOMOLOG (WASP).//2.60E- 12//155aa//32%//P70315 THYMU20142970 THYMU20143270//Homo sapiens HSNFRK (HSNFRK) mRNA, complete cds.//5.40E- 171//321aa//100%//AF226044 THYMU20147770//Homo sapiens mRNA for immunoglobulin lambda heavy chain.//5.40E-235//477aa//89%//Y14737 THYMU20153160 THYMU20158250 THYMU20159430//IG ALPHA-1 CHAIN C REGION.//7.90E-197//353aa//100%//P01876 THYMU20161640//Mus musculus p53 apoptosis-associated target (Perp) mRNA, complete cds.//1.40E-92//188aa//89%//AF249870 THYMU20162190 THYMU20169680//DIACYLGLYCEROL KINASE, ZETA (EC 2.7.1.107) (DIGLYCERIDE KINASE) (DGK- ZETA) (DAG KINASE ZETA).//1.40E-64//124aa//99%//Q13574 THYMU20172150//CORONIN-LIKE PROTEIN P57 (CORONIN 1A).//1.60E- 49//96aa//100%//P31146 THYMU20173980 THYMU20180280//RED PROTEIN (RER PROTEIN) (IK FACTOR) (CYTOKINE IK).//2.60E- 40//83aa//96%//Ql3l23 THYMU20186390 THYMU20186730 THYMU20187720 THYMU20193640//HETEROGENEOUS NUCLEAR RIBONUCLEOPROTEIN L (HNRNP L).//1.70E- 82//157aa//99%//P14866 THYMU20194360 THYMU20194420 THYMU20195990 THYMU20201980//Mus musculus faciogenital dysplasia protein 2 (Fgd2) mRNA, complete cds.//2.90E-122//259aa//86%//AF017368 THYMU20202890//PROTEIN KINASE CLK3 (EC 2.7.1.-).//1.1OE- 204//367aa//99%//035492 THYMU20204160 THYMU20204990 THYMU20208300 THYMU20209590//DYNAMIN 2.//2.10E-189//363aa//97%//P50570 THYMU20215090 THYMU20215970 THYMU20216840 THYMU20222890 THYMU20226600 THYMU20228540 THYMU20229220 THYMU20232090//SYNTAXIN BINDINGPROTEIN 2 (UNC-18 HOMOLOG 2) (UNC- 18B).//2.10E-54//112aa//99%//Q15833 THYMU20235760 THYMU20239000//collagen alpha 1(XI) chain //1.70E-37//579aa//33%//S18251 THYMU20239430 THYMU20240710//Halocynthia roretzi mRNA for HrPET-3, complete cds.//5.60E- 54//1 55aa//44%//AB029335 THYMU20241210//Homo sapiens mRNA for nuclear protein, NP220, complete cds.//2.OOE-58//117aa//100%//D83032 THYMU20241850//HLA CLASS II HISTOCOMPATIBILITY ANTIGEN, DX BETA CHAIN PRECURSOR.//4.40E-141//261aa//100%//P05538 THYMU20246840 THYMU20247480//ZINC FINGER PROTEIN 135.//i.20E-97//19laa//90%//P52742 THYMU20250420 THYMU20251890 THYMU20253250 THYMU20255570 THYMU20255720 THYMU20259090 THYMU20265300 THYMU20271250 THYMU20272490 THYMU20277390 THYMU20279750 THYMU20283790 THYMU20284120 THYMU20286290 THYMU20286320 TKIDN10000010//translocase of inner mitochondrial membrane 23 (yeast) homolog//6.30E-67//133aa//98%//NP_006318 TKIDN20004640//GALACTOKINASE 2 (EC 2.7.1.6).//5.10E-99//200aa//97%//QO1415 TKIDN20005210 TKIDN20030590 TKIDN20030620 TKIDN20047480//MITOGEN-ACTIVATED PROTEIN KINASE 12 (EC 2.7.1.-) (EXTRACELLULAR SIGNAL-REGULATED KINASE 6) (EC 2.7.1.-) (ERK6) (ERK5) (STRESS- ACTIVATED PROTEIN KINASE-3) (MITOGEN-ACTIVATED PROTEIN KINASE P38 GAMMA) (MAP KINASE P38 GAMMA).//2.20E-52//104aa//100%//P53778 TOVAR20004760 TOVAR20005750 TRACH20002870//CLAUDIN-6.//1.30E-27//175aa//42%//Q9Z262 TRACH20003590//CYTOCHROME P450 4A4 (EC 1.14.14.1) (CYPIVA4) (PROSTAGLANDIN OMEGA- HYDROXYLASE) (P450-P-2).//1.50E-138//493aa//49%//P1O611 TRACH20005020 TRACH20005400//Mus musculus GTPase Rab37 (Rab37) mRNA, complete cds.//3.30E- 109//223aa//93%//AF233582 TRACH20007020//TRICHOHYALIN.//5.60E-24//532aa//23%//P37709 TRACH2001621O//ALPHA- (1, 3) -FUCOSYLTRANSFERASE (EC 2.4.1.65) (GALACTOSIDE 3-L- FUCOSYLTRANSFERASE) (FUCOSYLTRANSFERASE 6) (FUCT-VI).//5.OOE- 192//254aa//99%//P51993 TRACH20019960//SODIUM/POTASSIUM-TRANSPORTING ATPASE ALPHA-1 CHAIN PRECURSOR (EC 3.6.1.37) (SODIUM PUMP) (NA+/K+ATPASE).//9.50E-185//410aa//84%//P05023 TRACH20027840 TRACH20028030//Mus musculus mmDNAJA4 mRNA for mmDj4, complete cds.//8.50E- 205//397aa//92%//AB03²4⁰1 TRACH20029540 TRACH20032720 TRACH20033230//MALTOSE PERMEASE.//1.20E-10//197aa//23%//Q45632 TRACH20034840//SKIN SECRETORY PROTEIN XP2 PRECURSOR (APEG PROTEIN).//5.90E- 14//342aa//28%//P17437 TRACH20037360 TRACH20041830//Aedes triseriatus putative disulfide-isomerase mRNA, partial cds.//3.10E-29//134aa//47%//AF306866 TRACH20042920//Human C3f mRNA, complete cds.//7.80E-195//381aa//89%//U72515 TRACH20048450//PROTEIN K4 (PROTEIN K3).//4.70E-57//431aa//32%//P18377 TRACH20050040//PUTATIVE SURFACE GLYCOPROTEIN C21ORF1 PRECURSOR (C21ORF3).//8.50E-74//177aa//74%//P53801 TRACH20056980 TRACH20057690//RAC-BETA SERINE/THREONINE KINASE (EC 2.7.1.-) (RAC-PK-BETA) (AKT2 KINASE).//8.80E-22//48aa//100%//P31751 TRACH20060150 TRACH20067620//N-ACETYLLACTOSAMINIDE BETA-1, 6-N-ACETYLGLUCOSAMINYLTRANSFERASE (EC 2.4.1.150) (N-ACETYLGLUCOSAMINYLTRANSFERASE) (I-BRANCHING ENZYME) (IGNT).//8.20E-76//145aa//92%//Q06430 TRACH20068660//Mouse 19.5 mRNA, complete cds.//1.OOE-55//263aa//41%//M32486 TRACH20068700//Homo sapiens adaptor protein CIKS mRNA, complete cds.//1.50E- 232//572aa//79%//AF272151 TRACH20069180//Homo sapiens IGHG3 gene for immunoglobulin heavy chain gamma 3 constant region, 4-exon hinge, isolate Lib-A2.//1.OOE- 213//377aa//100%//AJ390247 TRACH20076740//FOLATE-LIKE TRANSPORTER DJ206D15.1 ON CHROMOSOME 1 (FRAGMENT).//1.OOE-61//276aa//46%//060779 TRACH20076760 TRACH20077540//DXS8237E PROTEIN (FRAGMENT).//6.OOE-96//189aa//95%//P98175 TRACH20079690//ZINC FINGER PROTEIN 136.//1.50E-113//368aa//58%//P52737 TRACH20082780 TRACH20084720//METHIONYL-TRNA SYNTHETASE, MITOCHONDRIAL (EC 6.1.1.10) (METHIONINE-- TRNA LIGASE) (METRS).//8.50E-90//525aa//38%//074634 TRACH20085400//Mus musculus immunoglobulin scavenger receptor IgSR mRNA, complete cds.//1.30E-89//384aa//47%//AF302046 TRACH20085830//CYTOCHROME P450 4A8 (EC 1.14.14.1) (CYPIVA8) (P450-KP1) (P450- PP1).//3.70E-247//508aa//87%//P24464 TRACH20091230 TRACH20092680 TRACH20096610//LAMIN A (70 KDA LAMIN).//1.70E-77//164aa//93%//P02545 TRACH20099340 TRACH20105870//EUKARYOTIC TRANSLATION INITIATION FACTOR 4 GAMMA (EIF-4-GAMMA) (EIF- 4G) (EIF4G) (P220).//9.20E-95//204aa//92%//Q04637 TRACH20107710 TRACH20109650 TRACH20111130 TRACH20115740 TRACH20118940 TRACH20121380//REGULATOR OF G-PROTEIN SIGNALING 14 (RGS14) (FRAGMENT).//7.60E-144//308aa//92%//043566 TRACH20128110//Rattus norvegicus TM6P1 (TM6P1) mRNA, complete cds.//2.10E- 87//187aa//88%//AF186469 TRACH20128230//Homo sapiens IGHG3 gene for immunoglobulin heavy chain gamma 3 constant region, 4-exon hinge, isolate Lib-A2.//9.60E- 213//377aa//99%//AJ390247 TRACH20134950 TRACH20135520 TRACH20136710//IG LAMBDA CHAIN V-II REGION NIG-84.//2.20E- 43//11 2aa//75%//P04209 TRACH20139820//SIGNAL RECOGNITION PARTICLE 68 KDA PROTEIN (SRP68).//3.70E- 48//107aa//92%//Q00004 TRACH20140820 TRACH20141240//Mus musculus G21 protein mRNA, complete cds.//6.10E- 26//60aa//93%//AF131207 TRACH20145440 TRACH20147250 TRACH20149970//Rattus norvegicus Ca2+-dependent activator protein (CAPS) mRNA, complete cds.//2.30E-205//512aa//74%//U16802 TRACH20153810 TRACH20154860//RETINOIC ACID RECEPTOR ALPHA (RAR-ALPHA).//8.90E- 221//443aa//92%//P10276 TRACH20162860//NADH-UBIQUINONE OXIDOREDUCTASE SUBUNIT B14. 5B (EC 1.6.5.3) (EC 1.6.99.3) (COMPLEX I-B14.5B) (CI-B14.5B).//1.80E-39//80aa//98%//095298 TRACH20163170//HOMEOBOX PROTEIN MEISl.//1.50E-131//238aa//100%//000470 TRACH20164980//ZINC FINGER PROTEIN 184 (FRAGMENT).//1.50E- 1 63//488aa//56%//Q99676 TRACH20167220 TRACH20168350 TRACH20169800 TRACH20180840 TRACH20183170//Rattus norvegicus Sprague-Dawley SM-20 mRNA, complete cds.//1.60E-75//215aa//61%//U06713 TRACH20184490//Homo sapiens mRNA for zinc finger protein (ZNF304 gene).//3.20E-111//477aa//46%//AJ276316 TRACH20187180 TRACH20190240//Homo sapiens mRNA for fibulin-4.//l.OOE- 98//179aa//97%//AJ132819 TSTOM10001860 TSTOM20001390 TSTOM20003150 TSTOM20005690//kelch (Drosophila)-like 3 [Homo sapiens]//5.60E- ²11//399aa//98%//NP_059111 TUTER20002830//Homo sapiens transformer-2-beta (SFRS10) gene, alternatively spliced products, complete cds.//4.70E-122//253aa//90%//AF057159 UMVENl0001560//Anthocidaris crassispina mRNA for outer arm dynein light chain 1, complete cds.//1.90E-24//119aa//47%//AB010055 UMVEN10001860//N-CHIMAERIN (NC) (N-CHIMERIN) (ALPHA CHIMERIN) (A- CHIMAERIN).//5.90E-25//180aa//33%//P30337 UMVEN20000690 UMVEN20003540 UTERU20000740//Human fusion protein mRNA, complete cds.//4.90E- 47//97aa//100%//M82829 UTERU20004240//CGI-96 protein//2.1OE-39//108aa//81%//NP_056518 UTERU20006290 UTERU20006960//endoplasmic reticulum resident protein 58//5.90E- 51//150aa//63%//NP_076994 UTERU20020010 UTERU20022940//Human (p23) mRNA, complete cds.//2.80E-80//147aa//99%//L24804 UTERU20030570//CHLORIDE CHANNEL PROTEIN CLC-KB (CLC-K2).//3.OOE- 252//469aa//99%//P51801 UTERU20040610 UTERU20046640//Mus musculus ldlBp (LDLB) mRNA, complete cds.//O//839aa//83%//AF109377 UTERU20046980//Mus musculus mRNA for thrombospondin type 1 domain, complete cds.//7.30E-117//232aa//87%//AB016768 UTERU20050690 UTERU20054460 UTERU20055330 UTERU20055480 UTERU20055930 UTERU20056010 UTERU20059050 UTERU20061030 UTERU20064000 UTERU20064860//GLUCOAMYLASE S1/S2 PRECURSOR (EC 3.2.1.3) (GLUCAN 1,4-ALPHA- GLUCOSIDASE) (1,4-ALPHA-D-GLUCAN GLUCOHYDROLASE).//1.50E- 29//595aa//28%//P08640 UTERU20065930//GTP-RHO BINDING PROTEIN 1 (RHOPHILIN).//6.10E- 131//489aa//48%//Q61085 UTERU20067050 UTERU20068990 UTERU20070040 UTERU20070810 UTERU20076390 UTERU20081300 UTERU20084260 UTERU20094350 UTERU20095380 UTERU20095400 UTERU20097760//OVCA2=candidate tumor suppressor [human, fetal brain, Peptide, 120 aa]//6.OOE-30//66aa//95%//AAB36422 UTERU20099720//Homo sapiens mRNA for SPIN protein.//6.50E- 72//186aa//79%//Y14946 UTERU20101240 UTERU20114100 UTERU20115740//Human PMS2 related (hPMSR3) gene, complete cds.//l.OOE- 43//84aa//98%//U38979 UTERU20116570//Homo sapiens actin-binding double-zinc-finger protein (abLIM) mRNA, complete cds.//4.80E-163//468aa//71%//AF005654 UTERU20118110 UTERU20118970 UTERU20119060 UTERU20119680 UTERU20120310//Rattus norvegicus rexo7O mRNA, complete cds.//1.50E- 65//178aa//78%//AF032667 UTERU20124070 UTERU20126880 UTERU20134910 UTERU20135860 UTERU20143980 UTERU20144640//ACID CERAMIDASE PRECURSOR (EC 3.5.1.23) (ACYLSPHINGOSINE DEACYLASE) (N-ACYLSPHINGOSINE AMIDOHYDROLASE) (AC) (PUTATIVE 32 KDA HEART PROTEIN) (PHP32).//i.90E-166//243aa//100%//Q13510 UTERU20145480//Homo sapiens ZK1 mRNA for Kruppel-type zinc finger protein, complete cds.//4.40E-213//673aa//57%//AB011414 UTERU20146310//DIACYLGLYCEROL KINASE ETA (EC 2.7.1.107) (DIGLYCERIDE KINASE) (DGK- ETA) (DAG KINASE ETA).//4.50E-242//485aa//92%//Q64398 UTERU20146680 UTERU20150870 UTERU20151980//DUAL SPECIFICITY PROTEIN PHOSPHATASE 8 (EC 3.1.3.48) (EC 3.1.3.16) (DUAL SPECIFICITY PROTEIN PHOSPHATASE HVH-5).//5.20E- 15//248aa//31%//Q13202 UTERU20158300 UTERU20158800//P-SELECTIN GLYCOPROTEIN LIGAND 1 PRECURSOR (PSGL-1) (SELECTIN P LIGAND) (CD162 ANTIGEN).//2.20E-185//384aa//95%//Q14242 UTERU20161570//PROBABLE G PROTEIN-COUPLED RECEPTOR RTA.//2.70E- 141//303aa//85%//P23749 UTERU20164260 UTERU20168220//AIG1 PROTEIN.//7.70E-16//145aa//35%//P54120 UTERU20176130//Mus musculus zinc finger protein 289 (Zfp289) mRNA, complete cds.//4.OOE-143//297aa//94%//AF229439 UTERU20176320//DNA REPAIR PROTEIN RAD18.//Il.1OE-40//333aa//32%//P53692 UTERU20178100 UTERU20179880 UTERU20183640//SEMAPHORIN 3B PRECURSOR (SEMAPHORIN V) (SEMA V).//1.20E- 69//135aa//100%//Q13214 UTERU20185230//Human androgen-induced prostate proliferative shutoff associated protein (AS3) mRNA, complete cds.//1.90E-255//571aa//80%//U95825 UTERU20186740 UTERU20188110//Rattus norvegicus cytosolic sorting protein PACS-la (PACS-1) mRNA, complete cds.//4.10E-157//315aa//97%//AF076183 UTERU20188810

The application's sequence listing, which the Patent Office published only in electronic form, follows.

SEQUENCE LISTING (5458 sequences)

SEQ ID NO: 1 - DNA, 1726 bp, Homo sapiens
ctaaatgccaccctggagcgggagccgcaatggcacggcagcacgcccggaccttgtggtacgacaggcccaggtatgtgttcatggagttttgtgttgaggacagcaccgatgtccacgtgcttattgaggatcaccgcattgtgttcagctgcaagaatgccgatggagtggagttgtacaatgagattgagttctatgccaaagtgaactccaaggactcccaggataagcgctcttcccgctctattacttgttttgtgagaaaatggaaggaaaaggtggcctggccgcggcttaccaaggaggatatcaagccagtgtggctgtctgtggactttgataactggagagactgggaaggggatgaagagatggagctggctcatgtggaacattatgcagagcttttgaagaaggtcagcaccaagagacctccacctgccatggatgatttggatttcaccaccaccgtggtctcttgctgtcccgcggagctgcagactgaagggagcaacggcaagaaagaagtgctgagcggtttccaagtggtgctggaagacacagtgcttttccctgagggcgggggacagcctgatgaccgtggtacaatcaatgacatctctgtgctgagagtgactcgccgtggggaacaggctgatcatttcacccagacacccctggatccaggaagccaggttctggtccgggtagattgggagcggaggtttgaccacatgcagcagcattcagggcagcatctcatcacggcagttgctgaccatctatttaagctgaagacaacatcatgggagttagggagatttcggagtgcgattgagctggacaccccctctatgactgcagagcaagtagctgccattgagcagagcgtcaatgaaaaaatcagagatcggctgcctgtgaatgtccgagaactgagcctggatgatcctgaggtggagcaggtgagtggccggggtttgcctgatgatcatgctgggcccattcgggttgttaacatcgagggcgttgattccaacatgtgctgtgggacccatgtgagcaatctcagtgaccttcaggtcattaagattctgggcactgagaaggggaaaaagaacagaaccaacctgatatttctgtctgggaaccgggtgctgaagtggatggagagaagtcatggaactgaaaaagcactgactgctctgcttaagtgtggagcagaggatcatgtggaagcagtgaaaaagctccagaactccaccaagatcctgcagaagaataacctgaatctgctcagagacctggctgtgcacattgcccatagcctcaggaacagtccagactggggaggtgtggtcatattacacaggaaggagggtgattcagagttcatgaatatcattgccaatgagattgggtcagaggagaccctcctgttcttaactgtgggcgatgagaaaggtggtggactcttcttactggcagggccacctgcgtctgtggagaccctggggcccagggtggctgaggtcctggaaggcaaaggagcagggaagaaaggccgttttcagggcaaggccaccaagatgagccggcggatggaggcgcaggcgcttctccaggactacatcagcacgcagagtgctaaggagtgagggcttagggcactcacctcctgtttccacaggaatcttttggtcaataaaatagattgactcag

SEQ ID NO: 2 - DNA, 1589 bp, Homo sapiens
agccccgggcccgcggagacatgaacgccccgcggccccacgcaccccgggcgcagcggcccggccccgcggccccgtgatgggctcctgcgtgtcgcgagacctgttcacaagtgcccacaagaactgccccataccccagggtgcggaccccttgaacccagatctgccctcgggccgcactcccaccgtggctccagactgtgtcattggcaaggacgaacagatggatttctgttgggatccttggcagaggtgcttccagaccaccaacggctacctgtccgactccaggtcccgccccggcaactacaacgtggcagccctggccacctcgtcccttgtgggggtggtgcagagcatcaaggaccacatcacaaagcccacggccatggcccgaggccgcgtggcccacctcatcgagtggaagggctggagtgcccagcgggcaggctgggagctgtccccagctgaggatgagcattactgctgcctcccggatgagctgcgtgaggcccgctttgctgcaggggtcgccgagcagtttgccatcacagaggccacactgagcgcttggtcctcgctggacgaagaggagctgcaccccgagaacagcccccagggcatcgtccagctccaagatctggagagcatctaccttcaggacagccttcccagtggcccctcacaggatgacagccttcaggccttctcctcgcccagcccctcccctgacagctgtccctcacctgaggagccccccagcaccgctggcatcccgcagccccccagcccagagctgcagcatcggcggcggctgcccggggcccaaggacccgagggtgggacccaccccccgggctccctcccctccatggacagcggctccctctgggaggaggacgaggtgttctataactgaggtgggggctgtgctggtccagcacctgctctcaccatgacctcgcctggtgggcagcccaggcatatctggaccccggggtccagggcagggcatcccttgacccctcgggtaggcacagggtaggtgcggcagggatggggccagcgctcatggtggcctctctgtgcctcggtggacctgccccagcagtgggagccataaccccctcccccttcattacttcactcaggtgggcaccttcccctgcagggtgtctgccctcagggaactcaaggactctcagagacaccagggcagcctggcccagaggagcaacagccaggcccccaggaggacagccatggagagaactgagacccacttacagtggggtctgggaaccctgcctgtacctggggttcagtccctcccaactccctccttgtgtcttccccccagcaaaggtggggtgaccacttctggtagctaagcacctgctccccggctctcttcacccaggacatctgtctctctggagtgtctgtctgtctgtccctccctctctgaacctgcttcctccgtgtcccctgctcctcgcccctgggagcccactccccctccttgcggctccctcccatctcactcaaggttctctgaggacattaaagtggtggattcaccctgg

SEQ ID NO: 3 - DNA, 1685 bp, Homo sapiens
atggcaggcgcgcactaccctctgcactgtctgcactcggcggcggcggcggcagcggccggctcgcaccaccaccaccaccaccagcaccaccaccacggctcgccctacgcgtcgggcggagggaactcctacaaccaccgctcgctcgccgcctacccctacatgagccactcgcagcacagcccttacctccagtcctaccacaacagcagcgcagccgcccagacgcgaggggacgacacagatcaacaaaaaactacagtgattgaaaacggggaaatcaggttcaatggaaaagggaaaaagattcggaagcctcggaccatttattccagcctgcagctccaggctttaaaccatcgctttcagcagacacagtatctggcccttccagagagagccgaactggcagcttccttaggactgacacaaacacaggtgaagatatggtttcagaacaaacgctctaagtttaagaaactgctgaagcagggcagtaatcctcatgagagcgaccccctccagggctcggcggccctgtcgccacgctcgccagcgctgcctccagtctgggacgtttctgcctcggccaagggtgtcagtatgccccccaacagctacatgcctggctattctcactggtactcctctccacaccaggacacgatgcagagaccacagatgatgtgagttgcccaagggaacaccctagggaaacgtctgaacaaggaaaagaggatccgggacctgcttgtatctgcgaaaaggagccaaaggagcaggcttaggagagctcataagtgcggcaagaagccgactaggctcattctctctccctctctctctctctccctctcctttctttttacttcttcctttcctccattccttctttctttccttttcctttctacctttcttttctttttgcctttcaccttttttctcatttaccttctctcttgagcaacgtcagtaattgatcttgcatctcagagagagagaaagagcatgtgtgagagagaaactggtttctatgccagcactcctgaaaccccttactgtaaggatattttctcttaccccttgggatccaggctctgagtctcttctctttgggagtatccatcaaaatgactttttttaaaaacagattttcccccaaccagaagaatctgcacaaacttggcagcgtttttacttgtttaatgagtttaagacattacatggtgaaagagaagcattttggactcctgcatttttatttaccattcccagactgacgagaaaaagaaaattcctcacataacagcccttctctaaagaaaaaggaaaaagtggctgtaagattagaacattgctacaaagggaatgctgcatgttttatcaaaatgcaatgaccaggaatgatggttgattaaaaaaaaacaaaacaaaaaccactctttccccaccccacccccccaaaccctgaactggaatcaggaaagacggaggaaacaatcaaaatcaccattctattgctttgacacctttactaggtgaattggtggcattcacaaagctaatagggacgtttatatcaagaaacatttctgtatatattgttgaattttagttgtacatatactttgtatgtttttgtcttctttcatatatggagtaaaagccacaaaacgctg

SEQ ID NO: 4 - DNA, 1204 bp, Homo sapiens
gttttagtctatcgctgcggttgcgagcgcggtagggagcctgtgctgtgccgcgcagttaggcagcagcagccgcggagcagtagccgccgtgggagggagccatgaagcattacgagcagagagatgattcttcaagaaaccaaagcagcctgtggcattccagcgattcctcattgctcaagggtggagattctggacgcaaagacaagggagaagctgtgtttcttggacaaggtggagccccacgccaccattgcggagatcaagaacctcttcactaagacccatccgcagtggtaccccgcccgccagtccctccgcctggaccccaagggcaagtccctgaaggatgaggatgttctgcagaagctgcccgtgggcaccacggccacactgtacttccgggacctgggggcccagatcagctgggtgacggtcttcctaacagagtacgcggggccccttttcatctacctgctcttctacttccgagtgcccttcatctatggccacaaatatgactttacgtccagtcggcatacagtggtgcacctcgcctgcatctgtcactcattccactacatcaagcgcctgctggagacgctcttcgtgcaccgcttctcccatggcactatgcctttgcgcaacatcttcaagaactgcacctactactggggcttcgccgcgtggatggcctattacatcaatcaccctctctacactccccctacctacggagctcagcaggtgaaactggcgctcgccatctttgtgatctgccagctcggcaacttctccatccacatggccctgcgggacctgcggcccgctgggtccaagacgcggaagatcccataccccaccaagaaccccttcacgtggctcttcctgctggtgtcctgccccaactacacctacgaggtggggtcctggatcggtttcgccatcatgacgcagtgtctcccagtggccctgttctccctggtgggcttcacccagatgaccatctgggccaagggcaagcaccgcagctacctgaaggagttccgggactacccgcccctgcgcatgcccatcatccccttcctgctctgagcgctcacccctgctgaggctcagcccctcaacccggtggcattctgggggaggagtggggcccacagctctccagcacccggaataaagcccgcctgccccagtc

SEQ ID NO: 5 - DNA, 2463 bp, Homo sapiens
catccgccatgttggatgccgcagattcgccataacctcgccggctcttttcttaaaaaaataaaaataaaaagcgaagcgtcagcagggcgccccgccccctcggtcggcacgggagggggcccggaagagcccgaggcttttttttcctccgcggtggggcgttgccatggagacgcgggcggcagaaaacacggccatctttatgtgtaaatgttgtaacctcttctcaccaaatcagtcggaactcctctcccacgtttcagagaagcacatggaagaaggggttaatgttgatgagattattattccccttaggcctctgagtacacctgaaccccccaactcaagcaaaaccggagatgagtttttggtcatgaagaggaagagaggcaggcctaaggggtccacgaagaagtccagcacagaagaggagctggcagaaaacatcgtgagtccgactgaggacagcccgctggctccggaggaagggaacagcctgcctccaagcagcttggagtgtagcaagtgctgtcggaagttctccaacacgcgccagctgcggaagcacatctgcattatcgtgctgaatttgggtgaggaggaaggagaagcaggtgctaccaagattgtgccagtggaggctgggccccctgaaacaggagctacaaattctgagaccacttcagcagacctggtgcctcggagaggctaccaggaatacgccattcagcagacaccttatgagcaaccaatgaagtcaagcaggctaggtcccactcagctcaaaatcttcacttgtgaatactgcaacaaggtcttcaagttcaagcactcgctgcaggcccacctgaggatccacaccaatgaaaagccatacaagtgcccccagtgcagctatgccagtgccatcaaggccaacctcaatgtgcacctgcgcaagcacactggagagaagttcgcctgcgactactgctcgttcacctgcctgagcaagggccacctcaaggtgcacatcgagcgagtgcacaagaagatcaagcagcactgccgcttctgcaagaagaagtactctgacgtcaagaacctcatcaagcacatccgagacgcgcatgacccacaggacaagaaggtcaaagaggccttggacgagctctgcctgatgacgagggagggcaagcggcagctgctctatgactgccacatctgtgagcgcaagttcaagaacgagctggaccgcgaccgccatatgctggtccacggagacaagtggccttttgcctgtgagctctgtggccatggggccaccaagtaccaggcgctggaactgcatgtcaggaagcaccccttcgtgtacgtctgtgccgtctgccgcaagaagttcgtcagctccatcaggctgcgcacccacatcaaagaggtgcacggggctgcccaggaggccttggtcttcaccagttccatcaaccagagcttctgcctcctggaacctggtggggacatccagcaagaagctctgggggaccagctacagctggtggaagaggagtttgccctccagggcgtgaatgcactcaaggaagaggcctgtcctggggacactcagctggaggagggccggaaggagccggaggcccctggggaaatgcctgccccagctgtgcacctggcctccccgcaggccgaaagcacagccctgccaccctgtgagctggaaaccaccgtggtctcctcctcagacctgcattctcaagaggtggtttcagatgattttttgttgaaaaatgatacctcctccgcagaggctcatgctgctcctgagaagcccccagacatgcagcacagaagctcagtccagacgcaaggtgaagtgatcacactactgctgtccaaggcccagagtgctgggtcagatcaggaaagccatggcgcccagagccccctaggggaagggcagaacatggctgtgctttcagctggtgacccagatcccagcaggtgtctcaggtcaaacccagctgaggcctcagacctcctcccctacacacaccccacaccttcaccccttgcttcaagattcaaacagagactcccagtccccctcagcatcttccctgaatcacagccccagctccttgacccccatctaggtgccaaatgttcatctgcaaccgctatgcagtctggtgagagggagacagccatcacatagaaagtgaccgtacgggtttttaatcactgctgggtggggtgggggtagggggattgtcctggctttgtcgacaaagtcccacttccccgagtattaagggcccttggtatcaagtgaggtaaattcacccatcacagggcctcgccctaccatcctggaattatttcacttttaagataaatgcactatttcactgttcgcctcccattctaaggaggtgaggtggttggaataaaaacagttcctgtctg

SEQ ID NO: 6 - DNA, 2846 bp, Homo sapiens
ctcaacagtacaccagcatcgtggcggagctcctgttgaatgcggaactgtcgccagatgccatcaaggccaactctatggaactcactgcagggagcgtggacacggtcaggccggcaaccagccccacccagagagggtgatgccaagtctgcctcccaggcactgcctgccaatgtcacacggcgcccacgtgtcccatccccaggctatgggccccacatttcttacttgggattgtgatgtgataaacacgtttgcaggttgccatggttggaatggggggttcctttctgtggaggactcagggaaaggggtttggatgggcattaggatttgaagtcttgggctctgtcgttctcagggtatgcatgtctgcacccctcacagggaggttgtcctgggaggggtgtcccgggggctgagtcctcctgtgcaaggtctgaccctgcagctgtgtctcctgcagacggtgtttcccttgctgatgacgctctttgagctggctcggaaccccaacgtgcagcaggccctgcgccaggagagcctggccgccgcagccagcatcagtgaacatccccagaaggcaaccaccgagctgcccttgctgcgtgcggccctcaaggagaccttgcggctctaccctgtgggtctgtttctggagcgagtggcgagctcagacttggtgcttcagaactaccacatcccagctggggtgctgaaacacctccaggtggagacactaacccaagaggacataaagatggtctacagcttcatattgaggcccagcatgttccccctcctcaccttcagagccatcaactaatcacgtctctgcacccagggtcccagcctggccaccagcctccctttctgcctgaccccaggccacccctcttctctcccacatgcacagcttcctgagtcacccctctgtctaaccagccccagcacaaatggaactcccgagggcctctaggaccaaggtttgccaggctaagcagcaatgccagggcacagctggggaagatcttgctgaccttgtccccagccccaccaggccctttctccagcaagcactgtcctctgggcagtttgcccccatccctcccagtgctggctccaggctcctcgtgtggccatacaagggtgctgtggttttgtcccttgccttcctgcctagtctcacatgtccctgttcctcttcccctggccagggcccctgcgcagactgtcagagtcattaagcgggatcccagcatctcagagtccagtcaagttccctcctgcagcctgacccctaggcagctcgagcatgccctgagctctctgaaagttgtcaccctggaatagggtcctgcagggtagaataaaaaggcccctgtggtcacttgtcctgacatccccattttcaagtgatacaactgagtctcgagggacgtgtgttccccagctgatcgtgtcagcctcatgccccaggcctcatctttcatggaccaggccttgttccaggagtgggtgttgggtcctctgcttcctgtgctgtcccctggggaaggtcccgaggatgctgtcaggagatggaagagtcatgtggggtgggaacctggggtgtggttccagaaatgtttttggcaacaggagagacaggattgggccaacaaggactcagacgagttttattgactcatttctctggttgatacggagccatgtcatgtgccacgacctggggtgggcacagggaggctgcagtttcctgcgtgaacctgccttgggcctcatctgctcctagcccagcagagagagttgacccctcctgaactggccactccccagtgctcccgtgcagggagaggaagcacccagtttgagagcgtacccagccagactgtctttatctccatggattttcatcagggcaaagatcacagcagccagctcctggtggctgatgaggatcagagcatttgttcccccatgaaaggggaaatccctatggcatcattccagtggtggtcagtagatccaggacgccctgcaggactcagcctgtacagggagatgaagtgccccaggttgggagcacacctagctagagttatttgtgttaatctattcaggatgctctaagaaaacgccatagactgggttgctgacaaacatcagaattctatttctcatggttctgaaggcttagaaggctaagatcaaggtgtcagcaggttctgtgtctggtgaggacccacctcttgtttcgtagataaaaccttcttgctgtgtcctcacatggtggaaaagggcaagacagctcacagagacctcttttataaggacgccagttccattcaagagggcactgcctgcattcccttcccccctcaaaggcccggccctgctattatcgtcaccttggtgactagatttcagcctatgaattctggaggcggacacaaaaattcagattaaactactctgcttctgtttctctaaaatctacatccttctcatatacaaaacacatgcatttctccccagtagccccaaatatcaactcattttagcatcaactttaaaattgtagtccaaagtgtgatttaaatgttatctgagtcaaacatgggtaagactcaaggtacaatttatcctgagtccaactgttcttgctgcgaacctatgaaatcaaacatgttatgtgcttccaaaatacagtggttggagaggcataggataaacattcccattccagaaaggagaaacaggaaagaagaaaggagtaacaagtttcaagcaactccaaaattgaatgtgacaaacagtattaaaccttaagcctcaagaat

SEQ ID NO: 7 - DNA, 1633 bp, Homo sapiens
tcctgagggcgatggcgcggggtggctggcgccggctacgccgcctgttatccgcggggcagcttctattccagggccgcgcgctgctcgtcactaacacgctgggctgcggcgcgctcatggcggccggtgatggcgtgcgccagtcctgggagatccgcgcccggcccggccaggttttcgacccacggcgctccggtgaggacgccacgctgcttagtccttcaccccgggcgacctttgatcccgacacccgactgcgggccgtgacccctgacccgtggcctcagtcccccgcaggacccttgccctgaccgcgcctctccccgggtgtctgtctccccgcagctctgggtctccatcacctcccaacccccggaggtctctgcccactacccaggagcctctggagccgcgcctcctggtggggcttgtagtggaagaatgcacgggtgggctcttccggttttcccggtgaggctgaggctccgggatggcattgggcttacccaggccttagccagggagggagagagggaatggactgaggaacttgccggcccgacccagccccctgacttacactcttatagcgagcatgtttgcggtgggctgcagcatgggtcccttcctgcactactggtacttgtcgctggaccgcctattccctgcgtctggcctccgaggcttcccaaatgtcctcaagaaggtcctcgtggatcagctggtagcctctccattgctgggcgtctggtacttcttgggcagactggtgcgtgtggcctgctgcgcagttcgtgaacttcctcttcgtgcccccccaatttcgagtcacctacatcaacggcctgacgctgggctgggacacgtacctgtcctacttgaagtaccggagcccagttcctctgacacccccaggctgtgtggccctggacacccgagcagactgaactgtctgcttcctggaccagatgcaagactgtctcctggcggaccaccccctctgacagaaggggaatgggctcctgcagcaagctcgggtcttgagccacgtcccagcaccacttcagctcccgagcattgggctgagccgccctttccaagctcacttctgggactgagtttcctcaaccggaacacacccatgaagatggatgatcatcccctagcccttctcagcaggaacctcatgcgacctgtgaccaagatgtcccatcctcagcacagggcccactctgccaaccagtctcaagcaccagcccctcaacactgccatccacctggctctgggccaagccaccaatccagagctccctcaggtcctgggactaaggcggggacatgactgatcccctcagagcaggctcaggcctggagtcggcccccaaaagtttcacatagggccaggcagcctctgtgtttctttccctggtcctgaactgtggaaatgccattaaactctctctataatgtaactgaaactgctggctgggcgcagtggctcccacctgtaatctcagcccttcccgaggctgaggtggaaggattgctcgaggccaggtgttcgagaccagcctgggcaacatagcaagaccctgtctctatttatattgaaaaataaaaataacaaaag

SEQ ID NO: 8 - DNA, 2254 bp, Homo sapiens
gtacaaaaacgaactttcacaaaatggatcaactctcatctggccaagcggaaacctccaatggtggtggacgatctttttgaagacatgaaagatggtgttaaactgcttgcccttctggaggtcctgtctgggcagaaactgccttgtgaacaaggacgccggatgaagcgaatccatgctgtggctaacattggcacggcactcaagttcctcgaaggaagaaagattaaattagtcaacattaactccaccgatatagctgatggccgaccctcaatagttcttggattgatgtggaccattattctatatttccagattgaagagttgaccagcaacctgccccagctccagtctttgtccagcagcgcatcctccgtggacagcatagttagctctgagactcccagcccaccaagtaaacggaaggtgaccaccaagatccaaggaaatgctaagaaggctttattaaagtgggttcagtacacagctggcaagcagactggaatagaagtaaaagattttgggaagagttggagaagcggggttgcctttcattcagttattcatgccattcgaccggaattggtggacttggagacagtgaaaggcagatccaaccgagaaaatttggaggatgctttcactatcgctgaaacagaactggggatcccaagactgctagatcctgaagacgttgatgtggataaaccagatgagaaatctattatgacctatgtagcccagtttctgaaacattatcctgacatccacaatgcaagcactgatgggcaagaggatgatgaaatacttccaggtttcccatcttttgcaaattctgtacaaaattttaagagagaagacagagtaatttttaaggaaatgaaagtttggatagaacaatttgagagagatttgacaagagcacagatggtggaatcaaatttacaggataaatatcagtcatttaagcacttcagagttcaatatgaaatgaagaggaaacagattgaacatttaatacaaccattacacagagacggtaaattgtcacttgaccaagcattggtaaaacaatcttgggatagagtgacctccaggctctttgactggcatatacagcttgataaatctcttcctgcacctctgggcaccataggtgcctggctgtacagagcggaggtggccctgagagaggaaataaccgttcaacaggtccacgaggaaacagcaaacacgatacaacggaaacttgagcaacataaggatctgcttcaaaacacggatgcccacaaaagagcattccatgaaatctaccggaccaggtctgttaacgggattccagtgccacctgatcaattagaggacatggccgagaggtttcattttgtttcctccacatcagagctacacctaatgaaaatggaatttttagaattaaagtaccgtctgctctcactgctggttcttgcagagtcaaagctgaagtcttggatcattaagtacgggaggagagagtcagtggagcagcttctacaaaactacgtgtcttttatagaaaatagcaagttctttgaacaatatgaggtgacataccagatcttgaaacagacagctgagatgtatgtcaaagcagatggttcagtggaagaagctgagaatgtgatgaaattcatgaatgaaaccaccgctcagtggaggaatctctcagtagaagtgaggagtgtgaggagcatgctggaagaagtgatctctaactgggatcgctatggcaatacagtggctagtctgcaagcctggctagaggatgctgaaaaaatgctcaatcaatcagaaaatgccaaaaaggatttttttcgaaatttacctcattggattcagcagcatactgccatgaacgatgctggcaattttctaattgaaacctgtgatgagatggtttcccgtgacctgaagcagcaattactgttgctaaatgggcggtggagggagttgtttatggaagtcaagcaatatgctcaagctgatgagatggacagaatgaagaaggaatacacagactgtgttgttaccctgtctgcttttgcaacggaagcccataagaaactttctgaacccttagaagtctcttttatgaatgtcaagctattaattcaagacttggaggatattgagcagagggtgcctgtgatggatgcccaatacaagataattacaaagacagcacacctcattaccaaagaaagccccc

SEQ ID NO: 9 - DNA, 2145 bp, Homo sapiens
attaactcggagcccggcgcagtggaaagcgggccaagaagcagaggtccaggttccaactcttgattctatcacaaaacactgcacccgaggcagccaggcagcttccgaagacctcgtaagtgccccgccatttgctgggtgctggggatacagacatgaaaagaaaaataaaagactcagccctgcctccgggaactcacagtcccgctgacggtttagtcctctcctctctctgggcctcactgcccccatctgggagattgacaggttggactgtcacgaccgtctcgccgccgctgcagagacgcccctggatcacagcgcccctgcctctgcggccctggacagggctcagggcccagcccctaaaattgctcagggtgaggttggatggatcaaccacagcaactgtcacctcacagcaggagacagggaaactgagtcccagagagtcaagagagtgcttacctgagacctgggtaatactggaagctgtccttccatccaccaagagctcttcgcctttttatttttaatttttgtttttgtttttgagacggagtctcactgtcgcccaggctggagtgcggtggtgcaatctcagctcactgcaacctccacctcccgggtttcagcgattctcgtgcctcagcttcccaagtggctgggattacaggcatgtgccaccacgcccggctaatttttgtatttttagtagagaagaggtttcaccatgttggccaggctggtctcgagctcttgacctcaagtaatccacctgccttggcttcccagagtggtggggttaccggcgtaagccactatgcccagcccaagagctctttgccttctgagagcagcgtcctgtggaggcagaaacaggtatctgccctcaccaagcctgacttctcaccggcttcccccaacaattgcactgcaggttccgcacgcttttccttccttttcttcttgtcctgtcccctcccttcccacagctctgggaccgcagcctttacctgggctgcccgatcccctggttgctccccagaaacagtggcttggctgcgtgttggcatccacagcacgtgataagggctatgggatttgggcgaccctggagggtgaggaaagggaaggtgcccatgtgaggactaggcgtctggagagaggaagggagagggcccggcgggaggaagtgctgccccaagcggcaggacagggctctgaaaaaccacaaggtgcttgtgaacagccagtgctgctgctggtccaagccgttaccctgtgcgatgcctgaggagcgccctgaagttttgaaaggcggaagatgagctccctgcaaggagggttttcctgcggtgggatagaggcctcgcccagagcccgagggcagcacagcacccctcgcaggccacctgtctgcatagttcaccctcctcggcctcctctctccctcctcccaccaaggtgggccctttgttctccatctgactcaccagggctccttccccactcccaccccacaccagccctgcctcaagctggagggggaatgctgggggagctggggagttggtttgggtcctgcttctgagaggcgagagctccaaaggacccctccctgcccagcgtgtttcatccccagattcttagagctgaccaccgcccccccccccacccacccacccacccacacacacactggctccagctgtcctcagggtcccagtgccctctggacactatgccaggacagcccctctgagtctgccagtagctaccatacccctccctccttctccaagctaaatggcctctgttccctcaaaaacaaagaactaaaggcaagcactagaatgatcaagctcttagaagaagcagagggccgtgtctccaggacctcatggaggcaacagcttcttagccttgacaccaaagcatgagcaacaaaaggaagaataaataaattggatttcagcaaattcaaaacagttgtgctctaaaggacactatcaagaaaataggctgggtgcagtggctcacgcctgtaatcccagcacttggggaggccaaagcggttcgatcacttgaggccaggagttcgagatcagcctggccaacatggcaaaaccctgcctctac

SEQ ID NO: 10 - DNA, 2071 bp, Homo sapiens
acatatcccctgcgcactgtccggagcactccttcccttccctggttcctcaaggcacggctcccccaggcagatgaaagcttaatagagttttgcgacatgaaagtcagtcggaggaaagagccttgaacagttgtgcgtgagagagaggcaagcgcccgaaattattttacgacaaaggcagctctctctgccacagaggcacagaggagaaaggagcccaggaaacgggtcatttctttcgtggaaaaatggaaatgctctgaagcattttgggagacatgctgtgaagcaggtgacaccagaagacaaggacactgggggctccctgccgggaggcgcaaaaagcaactcccgttcgagggtcagaggagcctggatgctaatgtctctccaaagtgacttggagccaactgccggaaaggccatgcccttaggagcacaggcaggtcccagctcaggtgagcctgaaccttctgccccatcaggaggttccagtgggaggagctcaggtggggaggagttggaagtcaggatttcatgcctccctcattggctctggggttccctttaaggtggacactcggtgtgggcagtgggaggcaagagtgaagcagaggagagcaagcgtggtggtttagcaaagtaaagcaaagtaaacctggagggagcaaatgactttgtcctgggtgtgaaagggtaaggccccattgtaggtcatttattcattcaacaaacacgggttgaactgtgtcttgggctggcctcagagaagctcaagaaaagaaagatgctgtcattgccccgaggagccactgtctggcatgcaggccaactgtgacaagctgtggtccagggatcaagaggtctgctgtgtgaccttcttcaagttcctgaccctctctgggctgcagtcaccttattcagaaaatggagaggctagacaagaaaatgatgctaatctcacccttttctgggctggcattttattgagcacctactaggcgctgggcattttgctaggcccttcgtgcacactgccatgagaaatccacagcaaccccagagatgggttcatcaataactcaccagcaaatacttcctgaggccccactgtgtgccgagcatgggcataggtactgggcacacctcgatgaacaagggaggtaaggatgtgactctcctagacctttctgtcgagaagaggagatggagaataaacatggaaacaagcaagatcattctggagaaaatgcaatcagatgatgtgctagatggtaacagagagaggtcgaatgagagagagggccgtgacagcctctctgagaagctgaaatccaagcagaacctgaaagacgaggagaaactcagatacataaagactgggaaaagcattcaagtagagggaacagtgcgtgcaaaggccctgaggtgggtgcagtagataccacaggccccctcacttgagaccactccaagcacctcctgccctcttgtgccacagagctcagaaagctaaagcaatgttccccagaggtcctgtggccaaggtcctgcatgggcctgggtgacccctgcagaagcttctgagcaagactgagcagggaaagaaaggccatgtcagaaaaccatcctccagcgagcatggaggcagagagtctcatcctggcatcccaggtgctgagcagagcagacagcagcagaggggctccctagagcagctgggggccctgcctgtgccgtcgctctttcccctccctgccctctggtctgacatcccattggcatcacacacgatgcctcccggaggtgctcttgtgcacacagcaggtcaaagtgccagagaattagatcctgtcctcttgggaacagccctcagccagcagtgagcccttaggaggatgctccaagctctatcctccccgggtccagaggccctgggatggagcgccattgtgaaagcagtgacaacttgatgaagctccctgggctggccccttcctctctgccttgttccccgttccctgcagtcctgcaatcacctcccaaataaaccatgtgcccttgctgg

SEQ ID NO: 11 - DNA, 1837 bp, Homo sapiens
ttggctgagtgcacgtcggtggcgagtgggcccgggcgctcgggcggccagagcgacccagcggaggggtgaggcgggtaggcgctcctgtgcctgccacggccaggccaggcagcatccacgccctcccgcggaagatcgcagggaacaggtgggcactatcctctgtgccctcatttttcggaggagccgagggaggctgagcggttgaggaagcggccagccatgccgggcccactcacctgcacacctgcctggcaagggcagggaagagccgcggccttcctctgctgctccttccagagggcaggcgccgtggtgggggtgcccgcccgatggcatcgcgggaggctgagctcccagcagcggctgaggtcctccctgggtgggagccacccttgtccccagctgggccggcggctggtgagggagggggtgatatccgtgccacgccagcagggccgcaggcggtgcagggagagcttcagtccggctgacgtggcaccagggccaatctgctcagctaacatttgcctttcaggagtcagattcctgacctgtttgaacagagttagggagcacgtggtagggcccagccccagccccgctgcccccatctgcttcttcccagtggtcgaggcgctctgcaccctccgcggaaggaggtgtcattgtttgccctttccaaagagggggatgcagaggtggatgctgcctctcaggcgtggggctcgccttttgccgctcgcgagttcaaagaacccaagagccaggagcccagggctcgaccctctagggtcctccgaaaccctgtggtcccaccggggtgggcactaagctatgggagagaccatagctgcagaaaccaaccctgccctaggcataaaatgcaaggtctctggacctcagggcagggatgttagacagcggcttctgttggctcctaggggtgtgaatcaccacatcacctgcagggggcgcggctgtctttcttccccctcttctccctaatcctgagtgcacggagacagctctcagcagtttgtagcctgatgtggagtggagggttcctgcaccctacacccgagcccatccagcctctgggccatagacccttccgttgaaggcccagcctgcccctgagacgctgtgtgccctttttcagcttccttagtctctgagcatcaggtcttcatctctaagatagagcaagatgagcacctaaacgtttcagggctgaaatggggttgccaggacaacaagcatggcaggggcgaatggggacatcaggtgactgactgcgagccagcagaggcctccacccagtgctgggaggtgtcccgccggtggtggccatcactattcctggtggggctttgctgcttttgcctgcagcatccgctggtttctccattctccaagtctctgcccctgctcacacctggaggctggacacaagtgtcaccacttccctgaacccccctaggtgggctggaatcagcatctggtgcaaagctctgtgaccactgctgtaccacattatgcagagcacacaggacaggctggtgcacctccaggctgtgccaggaaacccgctgcctttgcgtcaccacagccttggtcacagcgtgaccttggtgcctctgacgggtcagctcctcccattagccatgctgtccagcacgggggccgctggtgcttgctgtgagactgagctgggctctgagtgtaaactacatggtaggttgtgaaggatgcaaatatcgaatcaatcattttttattgcatattaaaatgacaatatcttggatgtatcagattaaacaaaatacttttt

SEQ ID NO: 12 - DNA, 2654 bp, Homo sapiens
actcagtgacctcggggtcgttaggcctccacgtcctcgctggagctgcggacctcagtcgtccatccacacctcccccctgccgcccccgcccatctcactctcccaaccctgggcaccagggcaggtcgacagcccgaggcactcctctactgcgtttccaggcccaggagacccactccagcgccgcggttccttgcgacccggcagccgttcagcagacctcccattctttcctgcatcatcgggcattgtggaggcaccctacggtgattcctctcagagcctgtttgtaggtgaccgtgacagagacaaaaccatggaagtgactgggtttggagtgaccagaccgggcaaggtcccccaggccaggatgtcaggcctggtgttggggcagcgggatgagcctgcaggccaccggctcagccaagaggagatcctggggagcacacggctggtcagccaagggctagaggccctacgcagtgaacaccaggccgtgctgcaaagcctgtcccagaccattgagtgtctgcagcagggaggccatgaggaagggctggtgcatgagaaggcccggcagcttcgccgttctatggaaaacattgagctcgggctgagtgaggcccaggtgatgctggctctagccagccacctgagcacagtggagtcggagaaacagaagctgcgggctcaggtgcggcggctatgccaggagaaccagtggctgcgggatgagctggctggcacccagcagcggctacagcgcagtgaacaggctgtggctcagctggaggaggaaaagaagcacctggagttcctggggcagctgcggcagtatgatgaggatggacatacctcggaggagaaagaaggcgatgccaccaaggattccctggatgacctctttcctaatgaggaggaagaggaccccagcaatggcttgtcccgtggtcaaggtgctacagcagctcagcagggtggatatgagatcccagcaaggttgcggacgttgcacaacctggtgatccagtacgcagcccaaggtcgctatgaggtggccgtgccactctgtaagcaggcactagaggacctggagcgcacatcaggccgtggccaccctgatgtcgccaccatgctcaacatccttgctttggtgtatcgtgaccagaataagtataaggaagctgcccacctgctgaatgatgcccttagcatccgggagagcaccttgggacctgaccatcctgctgtggctgccacactcaacaatttggctgtgctctatggcaaaaggggcaagtacaaggaggcagagcctctgtgccagcgggcactggagattcgagaaaaggtcctgggcacgaatcatccagatgtggcaaaacagctgaacaacctggccctcttgtgccaaaaccagggcaagtatgaggccgtggaacgctactaccagcgagcactggccatctacgaggggcagctggggccggacaaccctaatgtagcccggaccaagaacaacctggcttcctgttacctgaaacagggcaaatatgctgaggctgagacactatacaaagagatcctgacccgtgcccatgtacaggagtttgggtctgtggatgatgaccacaagcccatctggatgcatgcagaggagcgggaggaactgagcaaaagccggcaccatgagggtgggacaccctatgctgagtatggaggctggtacaaggcctgcaaagtgagcagccccacagtgaacactactctgagaaacctgggagctctgtataggcgccagggaaagctggaggctgctgagaccctggaggaatgtgccctgcggtcccggagacagggcactgaccctatcagccagacgaaggtggcagagctgcttggggagagtgatggtagaaggacctcccaggagggccctggagacagtgtgaaattcgagggaggtgaagatgcttctgtggctgtggagtggtccggggatggcagtgggaccctgcagaggagtggctctcttggcaagatccgggatgtgctccgcagaagcagtgaactcttggtgaggaagctccaggggactgagcctcggccctccagcagcaacatgaagcgagcagcctccttgaactatctgaaccaacctagtgcagcacccctccaggtctcccggggcctcagtgccagcaccatggacctctcttcaagcagctgacattcaacccggcccccaggtctgctgggtccccccacccccacagccctcacagcattccccattgctcctggctcttccccacccctaggtgggacagtgaaggggagcagtttaaccagaagattgctgctgcccttagggtctcagctccctcctcaggaatccctcttaggaaggaccctcaggacaccctctctgcaccctgtggtcctctagagtagctagctctgaggccccaaggtgggtacaaagcaggtatggccctcagagatgcagcctgctgctggcttttcagtcagagggttgggggctggccagccaagctgccttgccctggccgctcttactccctccctctgctgtctcacttcaggtccatgtatttcacttttcttaaataaaagaatcaggtaacctt

SEQ ID NO: 13 - DNA, 2060 bp, Homo sapiens
taccacctccttctctctctggcccccttggtgtgtgaggaagcacaggaatggatgtggaccaggcatgccctggagccagctcatcccagcttgcacctgcccaccagagctgatcgtgcccgtctctccccagctctggcccaggggcatccccttgaaggtgtggaatcagccaaaatgggattgttcacaacacagaaatccgcacatgccgggatcagggcttgttgttccagagagcctgatgttaagcatttatcagcacagacctggccgtggctgctgacgctgctggcccctgtttgtggagtgtttgcacgtgccaggcaccgtgctgaggaagcacttttcatggattagctcattgtttgggatcttcgcacagctctccccgagcagggtgtattttgtcatcctaatgaataggaattgtcacaagaccagtagagcttgggcagtgctgatgggagggagctcagcaacagtctctccagggggctgtttctcctccttggcctccgcaactctgggcagggggcacaggcttgggtcgtcaagcaacttgctgcagtcacaccactagacacgacagagccgagacttgaacctgcacctgtaagaggctcagcccttgtcggagttcctgtgtcacacggagggcttgcctcctgcctgctttgcacttgggtagactcaagctccaccagcatcagggtggctggtgtggattcgtgcagtccagggttcaaaactctgagtccctgagctcactcaccagagcctgagtcctcaccacacttgctactggaatggatcatttatgcaaggccagagattgctccagaccctgacctcggagagcagctgatgtttcgtagatgacttggggagcgggaggtggtcacctgtagcgtgatccggatctcctcgaacaagggtgaaacaaagcggttacatgcttgagtgtgtgtgtgcgcgtttgtgtgcctcgaggcagaaggtggatgttcgtgcttggagagagactctagccttcgtcagaccccctgaaccgtcagaggcagggtcactttggagagagggttgtgggttctggtggggaacgcacgctgcacttcggcccagcctggggtggaggggtagccaatggggaactcagaatggtccggtgttgtggtttacagcaggggtcagattacctgggttcaattcctggccccgcaccacatgtctgtgaacactcaggaaagtttttaacttccaaagtctcagtttcctcatttgtaccatgagatgacagtaccgacttcacagggctgtcttgtaaggactgaatgagccagtccacacacaggactcagagctgtgtctggcgcccatgaaacaccatagcattactgttctgttagcagccgagaaaggaggtgagagccgcagtgatactcatgagggatgggagggctgccttgggctgcattttattggaaaggactggatgatggcaatggtaatgataacaataataataacgatggctgcatttttgaccacctgccatgtgccaagcctggttctagatgctctacaagaataatttctggtctttaaaacatccctggaaaatcagggttattgtccccattttacagatgggaaaattgaggctgagatgtccaaagactcacagctagtgtggggtggagctgagaaggttttgtttcacccgctgcgatgtttagcctaggtctgctgggtgccgtttaccatgatcttctgccattggcaggagaaggtcatggttaaatgcccagacttggaagccaggctaccctgggtctgaatgcacttcattgtgagatctcagggtctcgatttttccctctgtgaaatgggcataatgataggtgccacctcatagggctgctgtgaggaccaaggagagactacgtggataacaaaagccaagttcctagaacagtcctcatacacaggcccccagccagcccccaccatcctcactcccaggcctccaaccagttcatcccattcccccccgc

SEQ ID NO: 14 - DNA, 1945 bp, Homo sapiens
cttgccgccgccacctcgcggagaagccagccatgggcgccgccggctcctccgcgctggcgcgctttgtcctcctcgcgcaatcccggcccgggtggctcggggttgccgcgctgggcctgaccgtggcggctgctgcagcaggtgggcacagtggcgcagctctggatctaccctgcgggacaggttttggcttgtgatcaaccgggagggaaacatggttactgctcgccaggaacctcgcctggtcctgatttccctgacctgcgatggtgacaccctgactctcagtgcagcctacacaaaggacctactactgcctatcaaaacgcccaccacaaatgcagtgcacaagtgcagagtgcacggcctggagatagagggcagggactgtggcgaggccgccgcccagtggataaccagcttcctgaagtcacagccctaccgcctggtgcacttcgagcctcacatgcgaccgagacgtcctcatcaaatagcagacttgttccgacccaaggaccagattgcttactcagacaccagcccattcttgatcctttctgaggcgtcgctggcggatctcaactccaggctagagaagaaagttaaagcaaccaacttcaggcccaatattgtaatttcaggatgcgatgtctatgcagaggtaacactatgcccctttggatctttccttggatttgacttcttttttaaggattcttgggatgagcttcttattggtgacgtggaactgaaaagggtgatggcttgttccagatgcattttaaccacagtggacccagacaccggtgtcatgagcaggaaggaaccgctggaaacactgaagagttatcgccagtgtgacccttcagaacgaaagttatatggaaaatcaccactctttgggcagtattttgtgctggaaaacccagggaccatcaaagtgggagaccctgtgtacctgctgggccagtaatgggaaccgtgtgtcctggaatattagatgccttttaaaaatgttctcaaaaatgacaacacttgaagcatggtgtttcagaactgagacctctacattttctttaaatttgtgattttcacatttttcgtcttttggacttctggtgtctcaatgcttcaatgtcccagtgcaaaaagtaaagaaatatagtctcaataacttagtaggacttcagtaagtcacttaaatgacaagacaggattctgaaaactccccgtttaactgattatggaatagttctttctcctgcttctccgtttatctaccaagagcgcagacttgcatcctgtcactaccactcgttagagaaagagaagaagagaaagaggaagagtgggtgggctggaagaatgtcctagaatgtgttattgcccctgttcatgaggtacgcaatgaaaattaaattgcaccccaaatatggctggaatgccacttcccttttcttctcaagccccgggctagcttttgaaatggcataaagactgaggtgaccttcaggaagcactgcagatattaattttccatagatctggatctggccctgctgcttctcagacagcattggatttcctaaaggtgctcaggaggatggttgtgtagtcatggaggacccctggatccttgccattcccctcagctaatgacggagtgctccttctccagttcggggtgaaaaagttctgaattctgtggaggagaagaaaagtgattcagtgatttcagatagactactgaaaacctttaaagggggaaaaggaaagcatatgtcagttgtttaaaacccaatatctattttttaactgattgtataactctaagatctgatgaagtatattttttattgccattttgtcctttgattatattgggaagttgactaaacttgaaaaatgtttttaaaactgtgaataaatggaagctactttg

SEQ ID NO: 15 - DNA, 2231 bp, Homo sapiens
acacagctcttctactccaccgctgtctatcttgcctgccggcacccagccaccatgtgggagctcgtggctctcttgctgcttaccctagcttatttgttttggcccaagagaaggtgccctggtgccaagtaccccaagagcctcctgtccctgcccctggtgggcagcctgccattcctccccagacatggccatatgcataacaacttcttcaagctgcagaaaaaatatggccccatctattctgttcgtatgggcaccaagactacagtgattgtcggccaccaccagctggccaaggaggtgcttattaagaagggcaaggacttctctgggcggcctcaaatggaattgggagtaggaggccttagggtctgtcctaccaagtccttgcagtcatggtggagtgcagtggggctgtgcccacatgggagtcagcatgccaggtacttgccttctcctccaggaaggaaagcagggaccagaggtgtaagggcaagagtggggtggatggtgtgagattcctacagccttgcctgctctctaaaggcaactctagacatcgcgtccaacaaccgtaagggtatcgccttcgctgactctggcgcacactggcagctgcatcgaaggctggcgatggccacctttgccctgttcaaggatggcgatcagaagctggagaagatcatttgtcaggaaatcagtacattgtgtgatatgctggccacccacaacggacagtccatagacatctcctttcctgtcttcgtggcggtaaccaatgtcatctccttgatctgcttcaatacctcctacaagaatggggaccctgagttgaatgtcatacagaattacaatgaaggcatcatagacaacctgagcaaagacagcctggtggacctagtcccctggttgaaggtgagatgctgccagccctgccttcaggttctagtagaccctgacattgtccccaatcttccttcctttttacttccctgctccagccgcaatgacccatctttttcctgattacctccgccacctctacctcctctgccacttaaaacctttgccatttctctgcagagatagatttagccttttaattatgcaccttagtactccagataatgaccttcatttcttttccaattaccatgtgccagtactaagcattctatacgcattcatcgctgaattccccttggaagtaggttttattatccccattgtgcaggtgagaagcaggcttagcggggttaaggagcttgtctgagccttcaggctcatgtctctctcactcctaagggctggacacatagcagagtcagcgcttgatgtttgattgaatggggaaggagaggtggagaccacgccctcctcccttgtttagaattgtcttcgtcgtcatgataaacccgttctgtgtccccatcttgccttccattctggctgaaggtcaggggtggagtaggaacttccagagacagaaagctaagatccgcctccaggagagactctggcagctggagaagcaaaatggaagaagggtggatttaacatttctttttatttcccagattttccccaacaaaaccctggaaaaattaaagagccatgttaaaatacgaaatgatctgctgaataaaatacttgaaaattacaaggtaggtgatagagcagaagagaatatgagttaggctaaaagtaatcacaagagcagggtggagtccattctacacactgtagaagcttcaaaaccaagcagagaacctggcacatagtaggtgtacaataaaaactgacttaagggctgggcgcggtggctcacgcctgtaatcccaacactttgggaggccgaggtgggcagatcaattgaggtcaggagttcgagatgagcctggccaatatggtgaaaccccgtctgtactaaaaatacaaaaactaggccaggcaagatggctcacacctgtaatcccaacattttgggaggccaaggtgggcagatcacctgaggttgggagttcgagaccagcctgaccaacatggagaaactctgtctctactaaaaatacaaaattagccgggcacggtggcgcatgcctataatcccagctatttgggaggctgaggcaggagactcacttgaacccgagaagcagaggttgcagtgagctgagatcatgccattgcactccagcctgggcattgcaccaagattctgtctc

SEQ ID NO: 16 - DNA, 1899 bp, Homo sapiens
attttgcaggagggccaggaaggggttccggccatctgttcactctgtggagggagttttccccaggaggccgtctggcctgtctaataactgtagtatgatcatgagagggaaatacaccccttagcagccagtcaaggtctctacgtatggggttacagatggccaatgatctctccaactattctctgaacttgccacatcaataacatccttccccagcacatccagcagtggcaaaggagcccctgcattgccaatgagcatggcaagaaaatgctcgagcacatccaccataagcaacagaacacctatacttgcctgaaggacatggagcaccatttccatgaacttgaggccatcattctgcatggcaaacagcaggctgtgtgcacggattactaggcgagagggcattggcgaggtagagcttaaaggtaccgggcctctggtcctgtcctccccatcctgtactgcttccctggtccctccattgtcctgtgcagagcaacaaaggtgaaaagggcagcaaagacctgcagatcttttgcgcctcctgcaggcggcccatctctaagcgtgtcacctttcaccacatggagcactgctttgccaaggttggaacattggctgggagtcagatgggacgagggtgtttttggttgggtggggtggcacatgggtggggtccatgtggtgggggcagatttggcgcctggatatttgtcataggaggaatgcaacacacatccatggcttcccctgtgtgtgctcttcccccatgcccagtatgaaagccaaggtcagggcattaaccagtgatgaaggggacactggctgtgcagacgggagcatagggtctgcaggggacaacagacctggtgtttggagctttattgtaggaggacatgcagcatatgtccacagttcctcccatttgtgctctttcttctccagtatgagtgccaattgcccgttgggtccctgtaccctacttgtattgaaagggccacatggctcttctgtgatgtctacaatctgaagagtaagaggtactgtaagcgcctccaggtgctgtgtcctgagcactcttgggaccccaaggtccacatacagaaagagaggaattgtgcctcagaagctgtatgtaatggatgacacccaggagcctcatctgcacctggacctaatatggtgataaaattttaggcttggagctgatactgtaatgaggtgagccttttgggaccttggaatggggtgaatgtattttgcatgtgagagggatataaagcattggtggtcagagggaagactctggtggacacacactaaggtgatacatagtgagtcacacaatcttgtataatttcctctccttgggtgcagatagaatctctgtgacttgtttctaacaaatagaatatggcgaaggtgatgggatatcactcccttgatcaggttatattacagtcaaagatgatatgatataactcccatgatttcattacattatctaacactctgctttagtagactggcacaagagattctccttactggcttaatgaggtaagcgtctatattgaggaaacccacatggcaagaaactgcaggcagcctctagaaaccatgggtggcctcttcgatttgaaggtagcttccagctgacaaccagtaagaagccagggccctcagtcatgtagctgcaagaaaataaaatctgccaatgacgtgaatgatcttggaagtggattcttccccagtcaagtttccagatgaaaatatagcctggctgacaccttgtgagatcctgaacagaggacttagttaagctatgtgtgaacttttgacacacagaaactgtgaaataataaaagtgtgttgtcttaagctact

SEQ ID NO: 17 - DNA, 2488 bp, Homo sapiens
gagggtgagaagggccggctgccggagctgggttgcgatcttcccggagccggagaccctcccttgaaaccggcactgggacttctcgatctctggaggcacctgttgcaagtgacaggcaactctggtagctctccttgtctggttgttttgaagaaagaagagtagaagaaaaagttgagtaaatcatgtcggagttactggacctttcttttctgtctgaggaggaaaaggatttgattctcagtgttctacagcgagatgaagaggtccggaaagcagatgagaaaaggattaggcgactaaagaatgagttactggagataaaaaggaaaggggccaagaggggcagccaacactacagtgatcggacctgtgcccggtgccaggagagcctgggccgtttgagtcccaaaaccaatacttgtcggggttgtaatcacctggtgtgtcgggactgccgcatacaggaaagcaatggtacctggaggtgcaaggtgtgcgccaaggaaatagagttgaagaaagcaactggggactggttttatgaccagaaagtgaatcgctttgcttaccgcacaggtagtgagataatcaggatgtccctgcgccacaaacctgcagtgagtaaaagagagacagtgggacagtccctccttcatcaggcacagatgggtgacatctggccaggaagaaagatcattcaggagcggcagaaggagcccagtgtgctatttgaagtgccaaagctgaaaagtggaaagagtgcattggaagctgagagtgagagtctggatagcttcacagctgactcggatagcacctccaggagagactctctggataaatctggcctctttccagaatggaagaagatgtctgctcccaaatctcaagtagaaaaggaaactcagcctggaggtcaaaatgtggtatttgtggatgagggtgagatgatatttaagaagaacaccagaaaaatcctcaggccttcagagtacactaaatctgtgatagatcttcgcccagaagatgtggtacatgaaggtggctccttgggagacagaagcaaatccgtcccaggcctcaatgtggatatggaagaggaagaagaagaagaagacattgaccacctagtgaagttacatcgccagaagctagccagaagcagcatgcaaagtggctcctccatgagtacgatcggcagcatgatgagcatctacagtgaagctggtgatttcgggaacatctttgtgactggcaggattgccttttccctgaagtatgagcagcaaacccagagtctggttgtccatgtgaaggagtgccatcagctggcctatgctgatgaagccaagaagcgctctaacccatatgtgaagacttaccttctgcctgacaagtcccgccaaggaaaaagaaaaaccagcatcaagcgggacactgttaatccactatatgatgagacgctgaggtatgagatcccagaatctctcctggcccagaggaccctgcagttctcagtttggcatcatggtcgttttggcagaaacactttccttggagaggcagagatccagatggattcctggaagcttgataagaaactggatcattgcctccctttacatggaaagatcagtgctgagtccccgactggcttgccatcacacaaaggcgagttggtggtttcattgaaatacatcccagcctccaaaacccctgttggaggtgaccggaaaaagagtaaaggtggggaagggggagagctccaggtgtggatcaaagaagccaagaacttgacggctgccaaagcaggagggacttcagacagctttgtcaagggatacctccttcccatgaggaacaaggccagtaaacgtaaaactcctgtgatgaagaagaccctgaatcctcactacaaccatacatttgtctacaatggtgtgaggctggaagatctacagcatatgtgcctggaactgactgtgtgggaccgggagcccctggccagcaatgacttcctgggaggggtcaggctgggtgttggcactgggatcagtaatggggaagtggtggactggatggactcgactggggaagaagtgagcctgtggcagaagatgcgacagtacccagggtcttgggcagaagggactctgcagctccgttcctcaatggccaagcagaagctgggtttatgagtccctgtcctcttctgcaggtccagccctggcgagggcaggtcagaggaagtgaagaaatcaagagtaaagatttataatttaatgtgtatgtgtgtatgtgtgtatgtgtggcagtgtatggtgtgtgatttttattttcttctttggtcatgggggccaaggagaaaggcatgaatcttccctgtcaggctcttacagccacaggcactgtgtctactgtctggaagacatgtccccgtggctgtggggccgctgcttctgtttaaataaaagtggcctgg

SEQ ID NO: 18 - DNA, 1899 bp, Homo sapiens
attcgaaggctcgttttcgcagcttttccacgtctttttccggtcccactgccctccatgctaactcactgggcgtctctagccgttataccaacaatgactgcgaccagtgttgggaaagcgccccctgggcccctccctgacgccagcccatccttgagactccctgcaaggaggcggcccgacccagtgggatagcaaaacctgatctcataaaacctaggtcacaaaggacagccctgcaaaacagaccctatttggatcaagtgagccagttcctggaacctgaataatgactcctgaatcaagggatactacagatttgtctccagggggtacccaggagatggaaggcatcgtgatagtgaaggtggaggaggaagatgaagaagaccattttcaaaaggaaagaaacaaagtagagtcatcgccacaagttctcagtcgctctacaactatgaatgagagagccttattgtcatcgtatttagttgcatatagagtggcaaaagagaaaatggctcacacagcggctgaaaaaattatccttccagcatgtatggacatggtacggacaatttttgatgacaaatcagctgataaactaagaactatacctcttagtgataatacaatatctcgtcgaatctgtacgattgcaaaacatttggaagcaatgcttattacacggctgcagtccggtatagactttgcaatccaactcgatgagagcactgatattgcaagttgtcccacactcttggtttatgtcagatatgtgtggcaagatgattttgtagaggatctcttatgttgtttaaatttaaattcacatataactggattagatttatttactgaattagaaaactgccttcttggtcagtataaattaaactggaaacattgtaaaggaatttcaagtgatggaacagcaaatatgaccggaaaacacagcagacttactgaaaaattgttagaagcaacccacaacaatgctgtttggaatcactgttttattcatcgagaagctttggtatccaaagaaatttcaccaagtctgatggatgtattgaaaaatgcagtgaaaactgttaattttattaaaggaagctcactgaatagccgacttctcgaaatattttgttcagagattggagtgaaccacacccacttattgtttcatacagaagttcgttggctttctcaaggaaaagtattgagcagagtatatgaactcaggaacgagatttacatttttctcgttgaaaagcaatctcttttggcaaatatttttgaagacgacatttgggtaacaaaattggcatatttaagtgatatttttggcattcttaatgaattaagcctgaaaatgcaggggaaaaacaatgatatatttcagtatcttgaacatattctaggattccaaaagacgttattattgtggcaagcaagacttaaaagtaaccgccctagctactatatgtttccaacattattgcaacacatcgaagagaacattattaatgaagactgcttaaaagaaataaaattagagatattgttgcatctcacttctttgtctcaaacttttaattattactttccggaagagaaatttgaatcattaaaggaaaatatttggatgaaagatccatttgcttttcaaaacccagaatcaataattgagttaaacttggagcctgaagaagagaatgaattattgcagctcagttcatcattcacactaaagaattattataagatattaagtttatcagcattttggattaagattaaagatgactttccactgctaagtaggaagagtatattgctgttactaccattcacaactacatatttgtgtgaactaggattttcaatcttgacacggtt

SEQ ID NO: 19 - DNA, 2769 bp, Homo sapiens
agaaggggcaggctggctgggaaactcagcccagacacccctgcccagcccacagctgccagagcccctgggggcaggcctgagcccagggagaaaggagctccagcatgcgacagcaccccctcactctgtggggtgcccactgctacccatgcatgcccccaccacctggatggatggtccctgggtcaacactgggcatcttgagagcttccttggctccgagcagcagatgttcaggagattcaggggatgccagctcaggcctggcccaggggccaagaggacctgaccctccaggggtgccctttcccagccaggctacaggcattctgcccacacacaccctctgcacatgcagacgcacccacagttcaaggaggggagaggctgtgctgacctggcagggctgggcgggcactcgataccccacccggacctcacacacccggcagtgccttggaacctcatctgccaggacacggcccctgctgttctgggtctcaggctgactggaccccactctctggatcgtctctgatgagcagtcacttacaaatgacataaaccccacaggaaaggataggcgtgcgtcatgcggtggggtgacctgctttacagaagacccgctgctggcaggagctgtttggaccaacgcgccctgtcagggaccccatcggggatctcctgctgccccccagtggccatgggaggacatggggaaataaaagtcaacagctgcatggagttgctcatccgcgtctgagtggactctgagggccccacgtggttcccagccagacagttatggggaagcaaggcctttcaactggtctgagggaaggggcttggatcccagcacagatctggagaccacctggaaggtcagctcctcgaaggcagaaccatcgtcagtcacagctgcatccccggatacagtgcccagcatgacatgggtcctcgggaagcatgctacactaatggcccactccccaggctcctgggggtgggcagcgctgtagcaagccctgggcccagctcagagccccatggagaggccgcctgaaggtgagcgggcatctcacatgttgaagcctccaaggcagtgaggggcttgggcttgaggctggacagtagttttcccttgtgacttcaggggttgtgcctatctctgatcccaagcccatagttcctcactgtggttacaaggccctgtcctggctggtgacctgcctggtccctgactctgcaagcccaggtgggacttcctcccagccctcttgctgcctccccagcaagagtcagaaccgagaggccctgcgcctgggtctctggtctcctgtcctcttctagggaaggagcatccgtgctgctgtggaaaatatcccaggcctgacacctctcccaagatgaagaggctgggtgtcctagagaaccccaagatgaagggacctgaacactgcgaggttggtcagggctgtcctggagaagtgcctgggcagtgatggaccaggcagtggcaggcacaccagggctccatccacagtgctggacactggcccctggccctcgctggcccatcttaagcctgaagggcttacgacaaaggggctgccagggcctcagggcaccctccccacctagccctccaaccaaggctagggctgagactttttttttctttaccaaattttcaggggactatgaatcactgagactaactctgaactatcctcacctggatgaagactgtagtccacaccccagaatgtttgttttaaatggagaaagcatactttaaagaaacacacattttagtaacatgttttaccagtttctttgctcaccacctgtattttttaaacctttttattttgaaatacggattcataggaagttttgtttttgtttttgtttttgtttttgtttttatacagagtcttactctgttgcccaggctggagtgcaggggcacgatctcggctcactgcaacctctgccatcaggattaaagtgattctcgggcctcagcctcccaactagctgggattacaggcgtgcgccaccatgtccagctaatttttgttttttttagtagagatggggtttcaccatgtgggccgggctggtcttgaacttccgacctcaggtgatccgcccacctcagcctcgtaaattgctgggattacaggcatgagccactgcacccagccgataggaagtttaaaagtacagagaagtcctgtgtaacattcacccagtttccacctggttacattttccatagctgcagtacaatatcgaaaccaggaatctgacattggtgcagtgtgtatagttctattccatttcatcgggtgcatagatacaggtaaccaccaccacaatcaagatacacagaggtattccatcacaaccattccagagatctccttggagccaccccctttagagtcacctgtccccaccatcgctaacccctggcaaccactaatctgttccccatctctataattctgtcactgtcagaatgttacagaagtggaaccatacagtatgtgaccatttgatacctactgttttcactcaccataatgcccttgagatccatccaagctgtggcaggtgtcagtccttggtcctgttttattgctgagttgcattccatggtacggatgaacccgagcttaacctgtcccctattgacaagaccttttccctagcctttggcaacctacaaataaagctgctatgaacatctgtatatgc

SEQ ID NO: 20 - DNA, 1960 bp, Homo sapiens
cccagctactcgggaggccgaggggggaggatcgcttgagcctgggaggtggaggttgcactgagtagagaccacaccactgcactcctgcctgggcaatagagccagaccttgcctcaaaaaaaaaaaaaaatctgaggcacaaaaaagcaacgccaaatccaggggccctgcttcaggaagcatcaggactaactagattttattggtcaatagatgcaaacaactgatttagagcaaacttcccctccagtaaatcaagctccaaatcaaacaaagctagaggtcaaagcgcctccacgctggttggtcctgctcctagggcagcacagccccccatttccccagccccccatctctccagtttccctcaagaagccagagccatgccccatatgcacctctagtgtaggattatctggagctttaggttcaaaggaaagagtgaggtctcctgctcccttcctccctcccaccctgttcctcaccaactcctggacggtccctgccatgcggttgagaactggggctatgctgggatgtgtccgtgacactgatcatggtggccagagagacaccgagggagactgctctgccactagggagctgacatgaggaaggagccccagactaaaaacataagtctcaggagatttgggaggtggccacagggataaccccaaccctctaattaacgtgcctgagccagtctcctcctacatctggaactttaggagagctgcccacagcagaatgactcggcaaggagaagggcttgtcgggtctagctgggagtggaggtgggccaggctgccagagggaggctttgggtggtgcccttaagagtctccttcatgagctgttttgcactgtgaggtaagcaagagggcaaggaaggccattgctggggaatgggccgcctggctcacacctgcaggcagctgctaagccaagagtgggtgggtgctgctgagggattgggcttctagtttgtttgtttttatttttttatttttttgagatggagtttcgtgcttgttgcccaggctggagtgcagtggtgcaatctcggctcaccgcaacctctgcctcccgggttcaggcgattctccggcctcagcctccctagtagttgggattgcaggcacccgccaccacgcccagctaattttttgtatttttagtggggacggggtttcgtcctgttggccgggctggttttgaactcctggcctcaagcgatccactcatctcggcctcccaaagtgccaggattataggcctgagccactgcgtacagcttgtttttaaataaagcagtttttaaaactactgttgcaaccttttagagggaggtaaactgaatatggtggattttgaatgactatttttttgttttatgaaagaggataataatagaatagaaaatatgagaatgtttggccgggtgcggtggctcgcgcctgtaatcccagcagtttgggaggccgaggcaggtggatcgcctgaggtcaggagttcgagaccagcctggccggcatgacgaaaccccgtctctgctgaaaatacaaaattagccgggcatgatggtgcacgcctgtggtctcagctacttgggaggctgagacaggacaatcgcttgaacctgggaggcggaggttgcggggagctgagatcgcgccactgcattccagactgggcgacagagcaagactctgtctctctcaaaaaaaaaaaaaagaaagaaagaaagaaagaaagaaaatatcacaatgtaatttttgaactttttattgacgtacagcatacctccagagaagtgctgaaagcttgcattcttacaggtagtacacccagcacccagatcaagaaatggaacataaccagcaccccagaaccctaccctaaaaatgtaatttaaaaaaaaagattttaataaatatcttttagcgtgcccttt

SEQ ID NO: 21 - DNA, 2064 bp, Homo sapiens
atatctgctttccgcttcatttcgagttcataaatttaaaaagagacagtgagagaaagaaaaagaaaaaaaaaggcaaggcgccgggagcacagtgggtccagggttccatggagaactgcgcaaagcaagttgccaagaaagcccgctggccaagttcgggacctgtccaccacgctcgcgcgctccgctcagcaggcagattccaaaggcttggggcactctggggtgcgcgccgatcttctcgcaaaaggcgagtgtgtggggttcctccttccctcctttccatctgggggtctcggggaaagctgcacccagcgccttgggcgcccatgaagaccagtccatctcagctcaagctcccagcagcagcaacttcggactcagacctctctctttagaacatgagtgcttgtgtgtgcgtgcgtgtgtgtgtgtgtgtgtgtccgagtgcacttcacatttgggggtgcatgtgctctcaggaacgactctcccggctgcccggaacttagagagtttccctttaagccggagatgctgctcggacacccccccgcgtccaacaggaggcgatgacgtctgtagcctcgttgccagaacagtccccaggctaccgctgccgttcattgacaggagcgggcgctcggacgtcagcagccggacctttggcaaggctgctcccgcggagacggctcccacccccgcacctgccagcccgcccccccggggggtggtcacgaaatcaaagccaccagaggaggggcccggggaggtgctggggctgggggagggggatgactcggatctgccctctttgtcctggagcaccggagtatataaatagtgcagtctccagccagactctctcccagtcttgcacgcccccgcagtccccccaacccgacccccgccccttgtcactacgtgtcgggctcgctctgcctggagggaggctggggtgcggggaagcagggagtgcaaacagacattggttctctttcctcttcccattcatacatttctgttggagtcctagggccgccgcgccgggagtcgcaatgaatggatggatgcccgcgcgctgggaccaccaggtccgcagagatgtcgccggcgctaggggcgctcctcccgcgtggggacaggcgccctcgcctaggcgcagtgtggggggaccccaaaagacccttaagaggccaaaggcctgctctccccgttctccccaacacacaccaggggtcttttctgccccggagaagttgggacgcaaaacgtagggaactgcgctcagtctccgcaccacgaagagtcgagatggggaccgagaccagcacggacggtagcaacagagaggggagcgcccaagtggcgcaacgttgtggctgaagccaagcctgtcgcctccccctgagtaccgctggcggcccaggaccgtgcgctctcccttcctgagcacccagggatgcactgcgcagggaaggagggcacggcgggagggtgcttgcaggggactgctgcgcggattccccatccgcacccggctcgcggggaatccgtgggcttgcactcgccagaaagagctgctgcaggagcagccggatggtgaggcccgttcccgaccctgggtgggaggaacttaaagggctgagttctgaggcgccaggcacagggcgcagcttcataaatgcacccaaaagcttccatggacagacggcacagatgtcgctgaagtgaacctaaggaagtttgctaccccaagacccgggcttcgcgccaggtgacaacagacgtctgggagtgtggtgacacctgcgcagagtccctggtggttcaacctgtccgagaaggttgcaagaagatgccactgtcttacctttctcccctagtgctcatgccccagaaaaggccactgggtcactagatcccaaccccttgtgccatgagagggaagcctgcacaacggcgttggcactcccccataaatcgtctcctgggtccttcccattacgcacacacataatgtcatttctccagggaaaaataaataacaactttcttgac

SEQ ID NO: 22 - DNA, 2843 bp, Homo sapiens
ctcggccaggcctgagatgccgggagggtttgaccctggggctgcatggacagcttagcgctcggccgctggcgacagcggagggcggaggatctgcaggttccgggggacgtgacatgttttgagcgcctgctgtgtctcaagccctgtcctaggcactggagatgagatgaagaaacgatgagtagaggccttgcttacgtttatcctgcaactcatgatgaggcttactctgcaactccagtgctcggctttttacacaacagagtctctgttgcccaggctggagtacagtcgcacgatcttggctcactgcaacctctgcctctcaggttcgagtgattcttctgcctcagcctcccaagttgctgggattacagaaacgggtatgcaggagattagaagccagtgggcatgagcgtggctgccaccaggtgaatgcctgtgccctggcgtcctggggcccagaggaccgggagcttccatcaagaggctgcctcccagcaccaaggccagagagtggccaggggaggctaagtacagggatttctcagaatggtggaaggagctcagcccagccttgcccaagatgtattgcaggggaatctatggagttttgctctcgttgcccacgctggagtgcaatggcatgatctcagctcactgcagcctccgcttcccgggttcaagcgattctcctgcctcagccacccaagtagttgggattgcaggtgtgtgccaccatgcctggcgacttttgtattttcagtagagatggggtttcaccttgttgatcaggctggtctcaaactcctgacctcaggtgatccacccgcctcggcctcccaaagtgctgggattacaggcgagagccaccgtgcccggccatgaccttctttagttctttgaccatatttaaaatggctgaggtgaagtctctggtaagctcatgtctgggctttgtgttctgtttgcccttccaggtcagatccactgcccacctttcctggcatctgcacaggaggccagcctgcatggcttacatccagggggtgccgggggcacctgggctctcccacttccctttgggctcagccgctagggggatttggggcaggcaacaggaggctggagaacgagggcagggtatgtggccatgtcccctggccagtgtcactcagcagcatgtgtcatctcctccttccaggttctggtagccgctgctgccctttatcccttgggtctggcccctgcactgtccctcgcggctcccaggacaactttgtgacaaatccttttgtaataacccctttgtgaggtctcctgttcgcccatgtatctgtttcctgttggggctatgactggtacagaagggtgcacgcccactttcaagtgttgacgcctccaagaaggaagggaggaagatgaggcaagggtgtgacaggtgtccctcggcacagggcacagcaggtgctctaaagacatttcatcatacaaagatgcatgctggtaaagacggatgattgtcttagaggtccaagcttttactgtaggcctttgtagaattctcttgagaagggacagtgttttgtggtagtaaagacgaatatgctgttaaaggaagaaaaaatgactcctctggcagatggtaatggcaggaatcgtcaacatctttaacccacagagggctgctgtcatcctgtcacacaggtactcggggagaagcagagagctagccacagccagggctctgcccattaaggaaaaatggcttcagcaaaaagggaaggagatgtggggtgcagttctctcctcccccagtccacagggatgacttgcagctagatgtaccagaggtgagggcatcaatctgggtgtttcacgtaatggtcccagatggagtgaggtgtgtccctgttggccctgctgtccttccggctccacagagaggtcatggagagcccagcgaggaaggcttccaaaaaggaaagggggacgttttgagggagttcatgcgtggtggcaaaccccacaaagaagccgttgcagtgagagatgaaagaagggctgaggccacacacgtgtgccccaagggtgtggaggagaaggcgctgggcagcaggtgcaaccagaagcagctggccctgggcccttttcatcccaaggttagaagcaaataaaaactccctcttcacaaacatcgttctcttgctccgtggaattgtgttttaccaaaagtggaaaagggttttcccattattgctgatcaaatcacttttcaagcctgaccaaacaggaggcaaggcattttaattgtctgcagtaagactcacagtcgaggcacaatgagcctgatgctcctcgtcagacctgcctctggtggctggtgtgggccatctgtgagtcccagagtctgatgacttgaggtcccactggcccagccccagtctagattggggtcagtacgaggcttctctttgggtgtcactgggggctgcttgctttgagagagacagagacaaactgggacgtgtcaagaagagagagtaggatgatgcggggacttgagatcatgccagggcagaggtttaaatgagcaatttcgaaaggttcctttgtgtctaagagagagtagaatggtgcgggggcttgagaccacaccggggcaaaaggtctaaagagcaatttctaaaggttcctttgtgtctaagattctgggtcttggccagctgcgttggttcacacctgtgatcccaggactttgggaggctaaggcgggtggatcgcctgaggccaggagttctagaccagcctggacaacatgatgaaaccctgtctctacc

SEQ ID NO: 23 - DNA, 2800 bp, Homo sapiens
caagcagcagtcagtcccgccctgggcatgcaggccttgggcctggccactcgtgtctgttctcgcagtgcaagctcccgcctcccttgggttgcacgctgctggaccgtggcgtctctggggcacaggtgtggacttcccaggcccaaaagccacagatgagcattgggttgaaagagcgagtccctgagacctggggaggggaccgaggccatggaggaggtgggaatgcaggtgaggcagtggggagaggtcctcaggccccggggggaggagagtgtggccagaggccgagcggctctcagagaagggagggaggctctgtggagcaggaatcctggacacagctgtgggggcccaggtgccggggggcctggtccaccagcctgagcaccaggagctcctgtgtccaggccacatcagcccaaccagaggcccaaaagtctcaagaagtcaaggccatggcgacccctggggatgttaggaccagacgtctgggcacttgccgcccttaagtcttttctctaataatgccacaaacttgtaaaagtcatttaatcttgacaagaacttgtggggttttgtttggctgttcggttgtttttgagactgagtcttgctttttttgactagactggaggcctccgcctcccgggttccagtgattctcctgcctcagcctcccgggtagctgggattacaggcatgtgccaccacgcccagctaatttttgtatttttagtagagacggggtttcaccatgttggccaggctggtctcgaactcctgacctcaggtgatccacctgcctcggcctcccaaagtgctgggattacaggcgtgaaacactgtgcccggccaagaatggattttatatgacccccgatgtgttgcccttgcaaaatgaaaactcagaaaagggggattccccacagcttctaccaaacctgagctccccagggggagacgctgtctctgggagatgaaggtactcaacaaaaacctccccaaaccctggccctaggagaggctgggtgagctggggtgggatcttcacctcaccaagatgcccgttggcctctgagcagtcaccccgcagtggagacaccagttctgcctacaggagtgagtttgcccaggcactgcttggcacccccttctctacccaggggacgccaccaaaggcacaagggggacccttcagctgacgatgtcccccggggtttgggtcactgctgtgcgacgggtgtgaggctgggcatccggcccagggtctggagaccgtggcccgggaagtggctcttgtgtgtgcccacctcaccctcccgaagctctcaccttctcagcggggacaggaaccatctgggtcccctgggctcacagcatggaaagcaggctcagcccaagggtccgcattagtggctgcatcgtggctgtggccctgtgtcagctccgggctcgcactgccaggctggctgtagcgactctggctctctctggttgtccatttattccctgactctgggctgactgggaactgggtgagtttccaactcacttgtttttcacaatggccgcggaccatcccagcaggggtggggccatgctggaaaaacactgaccattccgtaaagcatcctgtttgtccatcttggaccctgttttcctaaagcttcacctcaagagagaatgtcaccaaagcaggacgagtgaaaaggtttcttagaacaacaacaaatacatggtctgctgactcctcctcagcccctcgtgtctggctgtgctgctggctgcaaatctatccccgtcactggcacgtggttccatgaggatgtgagcagtgacagctccaccactgcacccaggacccgctgaaccctgagcagagtgcgtcacagccacgtcagccctgaacccacaaccagcagaggcagtgtctgcctgccccttcctgaccggcttctcagccccaggccccgaggccccgtgtccgcctgccccttcctgaccggcttctcagccccaggccccaaggccacgtctgtgcttcccagggaaggcttttcttggattctgctttcctctctcaccttcctcccccgattctgactatctccctttcccgccctccatctctctccatgccaaaatggctcctgtttttgttcctcttctgggggatctcagcctctcctggtgtcttgggcaccctttcttgacttccaaagcttcatcctggatgtgcatctcctaaattctaggttcttgtatgtagctgccaaatggacacctccctcctgatgccccacagctctgaccttcaggacacctctgaacaaggccacacctctacaaatacccctgggtgtcaccaacaatatttccatcttcctccagttggcctttccattttgcctgtaacttatgactcatctttcagacctaagtcctcctgtccaatctccctgccatttctctattccccaacttcattagtgttttaaaaataggtacactgcggccgggagtggtggctcacgcctgtaatgccagcactctgggaggccaaggtgggtggatcacgaggtcaggagattgagaccatcctggctaacatggtgaaaccccgtctctactaaaaatacaaaaaagtagccatgggtggtggtgggcacctgtagtcccaggtacttggtaggctgtggcaggagaatggcgtgaggccaggaggcggagcttgcagtgagccgagatggcaccactgcactccagcctggacgacagagcgagactccatctc

SEQ ID NO: 24 - DNA, 2157 bp, Homo sapiens
acagatccacttgcaggttgctgctcccagccatggcttcgcgctgctggcgctggtggggctggtcggcgtggcctcggacccggctgcctcccgccgggagcaccccgagtaggagcagggcgcctttggggctggatgggagcgcggggaggcctgcgagcgctgagtaggggtcggagcagagctggggcagggctggagaagggcttctgccaccatttctccacacaggagaagaccccccagatctgtgtggtgggcagtggcccagctggcttctacacggcccaacacctgctaaagggagctccaagctactggctgtgctcctaagacaggaccacatgcagcacgtttgggacagtggcccttagcttgagtcaggcactgagcacagcatctcgtagcatcctcatgacaacctgcaaagcaggtgtcgtgcctcttgcttcacagcagcacccccaggcccacgtggacatctacgagaaacagcctgtgccctttggcctggtgcgctttggtgtggcgcctgatcaccccgaggtgaagaatgtcatcaacacatttacccagacggcccattctggccgctgtgccttctggggcaacgtggaggtgggcagggacgtgacggtgccggagctgcaggaggcctaccacgctgtggtgctgagctacggggcagaggaccatcgggccctggaaattcctggtgaggagctgccaggtgtgtgctccgcccgggccttcgtgggctggtacaacgggcttcctgagaaccaggagctggagccagacctgagctgtgacacagccgtgattctggggcaggggaacgtggctctggacgtggcccgcatcctactgaccccacctgagcacctggagagaacggacatcacgaaggcagccctgggtgtactgaggcagagtcgagtgaagacagtgtggctagtgggccggcgtggacccctgcaagtggccttcaccattaaggagcttcgggagatgattcagttaccgggagcccggcccattttggatcctgtggatttcttgggtctccaggacaagatcaaggaggtcccccgcccgaggaagcggctgacggaactgctgcttcgaacggccacagagaagccagggccggcggaagctgcccgccaggcatcggcctcccgtgcctggggcctccgctttttccgaagcccccagcaggtgctgccctcaccagatgggcggcgggcagcaggtgtccgcctagcagtcactagactggaggtgagtctcatgtttcccaaagacacccccttcccaggcctctgccacccgcctggtgttgcccacactctccccaacagggtgtcgatgaggccacccgtgcagtgcccacgggagacatggaagacctcccttgtgggctggtgctcagcagcattgggtataagagccgccctgtcgacccaagcgtgccctttgactccaagcttggggtcatccccaatgtggagggccgggttatggatgtgccaggcctctactgcagcggctgggtgaagagaggacctacaggtgtcatagccacaaccatgactgacagcttcctcaccggccagatgctgctgcaggacctgaaggctgggttgctcccctctggccccaggcctggctacgcagccatccaggccctgctcagcagccgaggggtccggccagtctctttctcagactgggagaagctggatgccgaggaggtggcccggggccagggcacggggaagcccagggagaagctggtggatcctcaggagatgctgcgcctcctgggccactgagcccagccccagccccggcccccagcagggaagggatgagtgttgggaggggaagggctgggtccgtctgagtgggactttgcacctctgctgatcccggccggccctggcttggaggcttggctgctcttccagcgtctctcctccctcctggggaaggtcgcccttgcgcgcaaggttttagctttcagcaactgaggtaaccttagggacaggtggaggtgtgggccgatctaaccccttacccatctctctactgctggactgtggagggtcaccaggttgggaacatgctggaaataaaacagctgcaacc

SEQ ID NO: 25 - DNA, 2860 bp, Homo sapiens
aagaatgatcgtgaggactgagattgactgagaccaacaataatgatagctcaaatgaacacgtttaaaattgaatgtgcctgacactgctctaagcactttacatgtatatttttatatttactcctcccagcaatcctgaggcagaaacaattataaatcctactgtacacatgctgaaaccaaggtgcacctattttaggaaatgaggtcacacagctagtaagaggaagggtttgctgggatttgaatacagatctgacagtgaggctcaagcgcttaatcactaatctatatttctgcatttcaaaacagtgcacacacatgctcttcatacctcttacagaaaatgagagtagtcagcagcccattgcctacctgttagaagctggtctcttcacagagacggagggagcagtgcttagcagctttttgtcttgcttgaggaagaggttctggatgaaggtttgccaggctcctgggagttccaagcaccttaaaaccctggaacttgagcccctgttcaacacagttgctccttttgcacctttgaggaaaagcttctgtcctgtgctcaaagaagaagccaaggtgccaagaacgacccccacccccatcagtccactaagccatgttaagagacctgtgtccagccctgtgactatatctgtggaaatcactattccgggaccagaggaagatgctggggttgggatgagggctgggaacccatgaaggggagtggaataaagggagcaacccaggaatgatgacctggaagagtgcagaaagtgaggtgcttcattttttctcgatgcctttgaaccagagaggtgtagattgatcggtggatatgaaggtgttggactgatggggatggggatgaactctaaatgtggctcaaagatccataactgccaagctcgagctgcctccctttccatatgcgcctcatctaagcagcatccccatctcccctctccccacaacagagtactcacctctgccctctggtgcctgagtgcgcattgcctttgcaaacagactttcaggtgggaactatccaggacttccagctgcttcaagaaaccggacctcttctgtacaaccccctgtctgtctgtctgtctgtcctttccttctcagtccccaccccatcggaagcacaatttcccattgtctctgtcttttcccctattgttgaataacagggcccctttctttattctgtgggtaatggcaatgaaatgtcaacagctggggatgtgggatgcaggaccggctggcacataccaccggaaaagggcctgggtggggggcgggctcagaacaggaattgacatccccaagaagaagagaatagggtgaggggcagagaacggatggtgaaaaggttgaaatggaatctctctcaacactccaaattacagggctctaaagagattttgtctgaggccaggggaaaggctgggctccatgagggcagagggagtggctagcattgcaataggagagatggagattagacagcaaggaggatttttctgtccctggggaggaacatgagaatttctgaggatagaaggactttggaaacctctccaaaagagaagttattttattggttccctaatattctacctcttccctcagcacaaatagataacctttttaaagtactcagaaggggatccttaatcttcctggatggaaattcactttctctcaagtctttttttttttttttttttttttttgagacggagtctcgcactgtcgctcaggctggagtgcggtggcacgatcttggctcactgcaagctccgactcccgggttcacgccattctcctgcctcagcctcccaagtagctgggactacaggcacccgccaccacacccggctaattttttgtattttaagtagagacggggtttccccgtgttaaccaggatggtctcgatctcctgacctggtgatccgcctgcctcggcctcccaacgtgctgggattacaggcgtgagccaccgtgcccggcctttttaaaattttttttttaagacaaggcctctatctgttgcccaagtaggagtgcagtggcccaatcatagctcactgcagcctcgaacacctgggctcaagagatcttcccccttagcctcgaaattatctaggactacaggcgcgcaccaccacacccgtctaattaacttttttttttttgagacagagtctggctctgtcacccaggctggagtgcagtggcgcagtctcggctcactgctacctctgctctgcctcccggcttcaagccatcctcctctttcctcagccttcagagcatctgggactacagacgtgcgccaccacgccaagataatttttgtatttttttgtagagatgaggtttcatcatgttgcccaggctggtcttgaactcctgggctcaagcaatccgcccacctcagcctccccaaatgctgggattacaggcgtgagccaccatgctgggcctaattaagtccattttaaaacctttccattgaggtataatttacatacaaaaaagtcatagaaattatgtgtacagctaaatgaatttttacgtgtgtgcatatattgtacacaggtaaaaacccaccagatcaagacatagaacatttccaacaatgccgaataggcccaattgtttttgttttctattaatgcagagggaggactccctccacctgcccctgtaaacagccatgtagaaatgttttgagctttaagttccattttagccttattttctctctgctgtagccccatggaagtagctttgcattattaaaaccatataatttcatgttctgtgagtt

SEQ ID NO: 26 - DNA, 2667 bp, Homo sapiens
agaggctccgaggcggcggcggcgactccctctttccctccctcctcctccgtccgcccgtccgtccgcgcgtctgtccgttcggcccggtccggcccgaagcatggccggcgtcagcttcagcggccaccgcctggagctgctggcggcttacgaggaggtgatccgagaggagagcgcggccgactgggctctgtacacatatgaagatggctccgatgacctcaagcttgcagcatcaggagaagggggcttgcaggagctttcgggacactttgagaaccagaaggtgatgtacggcttctgcagtgtcaaggactcccaagctgctctgccaaaatacgtgctcatcaactgggtgggcgaagatgtgcctgatgcccgcaagtgcgcttgtgccagccacgtggctaaggtggcggagttcttccaggtgcgtgtcaggggccagcgctcttgggggtggggacagccaccagggtctgcgtgctggggtggggatggcgggaggatggtgccgcctgagcactgccgtcttcttgcggaagggtgtcgacgtgatcgtgaacgccagcagcgtggaagacatagacgcgggtgccatcgggcagcggctctctaacgggctggcgcgactctccagccctgtgctgcaccgactgcggctgcgagaggatgagaacgcagagcccgtgggcaccacctaccagaagacggatgcagctgtggaaatgaagcggattaaccgagagcagttctgggagcaggccaagaaggaagaagagctgcggaaggaggaggagcggaagaaggccctggatgagaggctcaggttcgagcaggagcggatggagcaggagcggcaggagcaagaggagcgcgagcggcgctaccgggagcgggagcagcagatcgaggagcacaggaggaaacagcagactttagaagcggaagaggccaagaggcggttgaaggagcagtctatctttggtgaccatcgggatgaggaggaagagacccacatgaagaagtcagagtcggaggtggaggaggcagcagctattattgcccagcggcctgacaacccaagggagttcttcaagcagcaggaaagagtcgcatcggcctctgcgggcagctgtgatgtaccctcgcccttcaaccatcgaccaggcagccacctggacagccaccggaggatggcgcccactcccatccccacgcggagcccgtctgactccagcaccgcctccacccctgtcgctgagcagatagagcgggccctggatgaggtcacctcctcgcagcctccaccactgccaccgccacccccaccagcccaagagacccaggagcccagccccatcctagacagtgaggagaccagagcagcagcccctcaggcctgggccggccccatggaggagccccctcaggcacaggcgcctccccgggggccaggcagccctgcagaggacttgatgttcatggagtctgcagagcaggctgtcctggctgctcccgtggagcctgccacagctgacgccacggagatccacgatgcagctgacaccattgaaactgacactgccactgctgacaccactgttgccaacaacgtaccccccgccgccaccagcctcattgacctatggcctggcaacggggaaggggcctccacactccagggtgagcccagggcccccacgccaccctcgggtactgaggtcaccctggcagaggtgcccctgctggatgaggtggctccggagccactgctgccagcaggcgaaggctgtgccacccttctcaactttgatgagctgcctgagccgccagccaccttctgtgacccagaggaagtggaaggggagcccctggctgccccccagaccccaactctgccctcagcccttgaggagctggagcaagagcaggagccggagccccacctgctaaccaatggcgagaccacccagaaggaggggacccaggccagtgaggggtacttcagtcaatcacaggaggaggagtttgcccaatcggaagagctctgtgccaaggctccgcctcctgtgttctacaacaagcctccagagatcgacatcacatgctgggatgcagacccagttccagaagaggaggagggcttcgagggtggtgattagcggtggcgccagccctaggctacccttgccaaggccgcccacctgcatcagcctctggccagacggcccgccgtgcctgcattcgcagcagctccgcctggcacccactccggattccggccctggctggggacttggccgcttccctacccacagggcctgacttttacagcttttctctttttttaaaaagttgataggagacttgtacagttgactggctttcctctcgttggtagttgagacgctgttgcaaattccacccctccttccctggtccagattgtagctcttagtcctccctgctcagctggccgggttggaggcctcaccctgcttggggcctggcgtggggggagctctggtgggaaaatgtcccccacctcttttcctagttttatgtttcttgggaaaatatcactttgtattctctgtccagggcttcagatattttgcacgaattttaaaacatggcaataaatggctcgtgggctctggc

SEQ ID NO: 27 - DNA, 2087 bp, Homo sapiens
gctggaggcggtcactcacgctgggctaggagctgaggcgagaagggccatgcggacggcgagggagtccagagccttgagcccggtgctcctccctcgcgcagcggtggctctgcggccgctggagtaaacactgcctttgttccctagcgcctcgtctttcgtcgccccgtgccctcacgccgccgggctctggccggcccgccctcggtccttgaaccccatttcggctcgtgccgtgcggatgcagctgccgggcctgggtttgggcattgagcgggaggaggaggaggagcggcggcgcctgggcggcatgcgatggggaactgctgctggacgcagtgcttcggactgcttcgcaaggaagcggggcggctgcagcgagtaggcggcggcggaggatccaagtattttagaacatgctcaagaggtgagcacttaacaatagagtttgagaatctagtagaaagtgatgaaggggagagcccaggaagcagtcataggcctcttactgaggaagaaattgttgacctaagagaaaggcattatgattccattgccgaaaaacaaaaagatcttgataagaaaattcaaaaagagttagccttacaagaagagaagttaagactagaagaagaagcaggtatttattttaataaaggaatggttggtattctagttaatcaagtaattcttttattagcaaggcagaaactagtgtttttctataaacttgaatgttaattgtacaggtgtattttacaatttttgtttaattaaaaaaatgttactatattaataatcaacctggtcaaaacctttcaggtttcttcgtttgagtcagtcgccttgattcagaatgtcacgagccttatgatatcatgctgaggcgccttgcaaatccgacaattaagatcctcctagaccttgaggtgatcagcataagaggccagatcccctcgagtcatctacacctagcttcaccttattctttaaagggcagaaaatttgagacggtgatcgccgtaacagtaaatttggcttacaattggggcccccctccggtttagaaagaggaacaccagattgaccacattcccaactagaaaaatcttcttgcgtcaatcaagcctcacctggctcatttggctgtcagtttgatcgtcgttagattgaagaaaacatctagatgcagcgatcggctatagatacttctagatcgtctagatctactagaccatgggccaaatagggtcgacctgcaaacttgcaaggtttattttaaatacacattacagtgttttatattatgtaatgctaagttgtaattcagcttttaacaaatctttttttaggtagtaaaaaaaaaaaatactcaacaactaataggcccagagtttatttccaaatgagacactaaatttaaatagttttgagatttgatttcagcagaggcacacaaactcttaaaaacgagttattgtctgacattttgttttttctctaacttgaaaaataggtcacggtctagatcacattctcgatccagaggaaggcgatactctcgctcacgcagcaggagcaggggacgaaggtcaaggtcagcatctcctcgacgatcaagatctatctctcttcgtagatcaagatcagcttcactcagaagatctaggtctggttctataaaaggatcgaggtatttccaatccccgtcgaggtcaagatcaagatccaggtctatttcacgaccaagaagcagccgatcaaagtccagatctccatctccaaaaagaagtcgttccccatcaggaagtcctcgcagaagtgcaagtcctgaaagaatggactgaagctctcaagttcaccctttagggaaaagttattttgtttacattattataagggatttgtgatgtctgtaaagtgtaacctaggaaagataattcaaccatctaatcaaaatggatctggattactatgtaaattcacagcagtaagataatataaattttgttgaatgtattaacatcatatggtctgaaaatgtgggtttttatttggcacatttaaataaaatgtttctaact

SEQ ID NO: 28 - DNA, 2355 bp, Homo sapiens
gcggctgctgcagggggaggaagacggggaggaggagccgtgcgccgcggcggcggccgccaggggaaccgagcgcccggcgcggagagcgcgggagcggagcagtagcccgatccggggccgcgggccgagctgccgatctttctcctggcctgccctccatgtcggggagctatcgtcgtcttcaagctacagatgcacatgttgaatggagctcttctggcattgctgtttcctgtggtaaacactcggctgctcccctttgaattggagatttactacattcagcatgttatgctctacgtggtacccatctacctgctttggaaaggaggtgcttacactccagagcccctcagcagtttccggtgggctcttctctcaactggcctcatgttcttttatcacttcagcgtcttgcagatcttcggcctggtcaccgaagtgaatttgaacaacatgctgtgtccggccatctcagacccattctacggcccctggtatcgcatctgggcctcgggacaccagaccctcatgaccatgacccacgggaagctggtcatcctgttctcatacatggctgggcccttgtgtaaatatctgctggatttgctccggcttccagccaagaaaatagactgaaggtgcttattttttttttttttcctccctgaggaagcaagtcgtgacttgacttggagaacacccagttcttgataaaatcatgggagagggcagtaggatgtttggtgtatttctttttcctcctttctgtccctttcttctaccactcttcctttcccagctcttccccctacgatgtctccttgagcctggggtgtagtgctgggcgctggattttcctccttccctttggctctctctctgctcctagtggccttacatggggagattgcagtgagcggctctttcactctgcttgtcggtgctttaacaacagctggttgaggagaaagggaacaacaagtagtagttcttttggcatcgaagcaatgagattgggttgtgtttcatttctccactgccagggacctccaggcttatgctggcgtcccatttagtctccagcacagcccttaccacgggggactgaggccttgtttctataccagcggcaagcccagagccgagggatttcacagctcgtggtcaagacagaaccagccagattctggtcactggtgtcccatgactcaaagtaaacagccaaccagccactccctccaggatgctgcctggggtgggaggtgagagcaccacccagcccaagggctagattccattgagagggttggagatctattgcaatgacaaatccaaagtgaagagggtcaagatatatacagtactaggccagaccctgtgtaagttctgcctgtgagagttgagaactgatgcatatcccaatcagaagtgagcacagaaaactgtgatttgaatcatacactctgttttaggaaaatgttgataatagataccattttaatcttgagtgccccttaaatgtgttccctctccctttccctctccccccactgcccatcctgcccgctttgtggcgggtagagtcagtgacagggaggcagccctccttttgtgtatatagagtgagctgatttgggctcaggaaaacctagtcgcttgttgctctcgtctgtgacatttttgtacactggtttgctactcatggcaagaaacagacaaagccccatgaaaaataaaacaaaacaaaagtcatttcaaacaaagctgttgttttgaaaactcttgctttcttttggtgtccattttgtgttctattttaaagaatctttcatttatattggtgttattgtagtgaagagaatgtgataggctgatctgtaatggtttctgtcaggagcttagcaaatgcctctgcccctcttcccctacccctgtccttcctcagttcccagctgggattgctatgcactgggcagacccgtcactgtctcccctgaacccccacacagtggcttcccttagaaccagtctttgtactctccctaaacagcagcaggcttaggatttttgtcaggctggttcttgcgtgctctgtgcccccaccagtttgctcacctcttggggcattttgtaatgtgttttctctgtcttgtaaaaccttttgattgtaccgaaatggtatctgcagtcgcctttggaaataaatggtcattaatttgtgtacttagcattctgaattttagtctcaggtgtttctgttgttgaagatccttgaatgaaaaggaaccctcaccatggggcttactgttataatgtttcttcatttactgttattaaaagatttatgag

SEQ ID NO: 29 - DNA, 2221 bp, Homo sapiens
ctgtcttttgtaataaaaatcagataaattttaaccatgactcaagtattagtaaacatcatagtactcattttctagaaaactattacaattgtaatgaatgtgaaaaagtattttaccaatcctcaaagcttattttccctgaaaatatccatattcaagaaaagccttacaactctaatgaatgtggtgaaacttctgacccattctcaaagcttactcaacatcaaagaatttatattggagagagctcacaaagatgtaataaaaaatgtataatagtctttagtcaatcacatctaaagggacataagataattaacactggagaaaaatcagtgaaatataaagaacgtggcaaagcttttaccaggggcttacatcttggacatcagaaaattcataccggagagaaaccttacaaatgtaaaaaatgtgacaaagcctttaacaagagttcacaccttgctcaacatcagagaatccatactggagagaagcctttcaagtgtaaggaatgtggcaaagcttttaacagaggctcataccttactcaacatcagagaatccatactggagagagagctttcaaatgtgaagaatgtggcaaagcctttaacagggggtcataccttactcaacaccagagaatccataccggagagaaacctttcagatgtaaggaatgtggcaaagcctttaatagaagctcatacgttactcagcatcagagaatgcatactggagagaaacctttcaagtgtaaggaatgtggcaaagcttttaacagagcttcacaccttactcaacatcagagaatccatactggagagaaacacttcaaatgtaaagaatgtggcaaagcctttaacaggggctcacaccttactcgacatcaaagaatccatactggagagaagtctttcaaatgtgaagaatgtggcaaagcttttatctggggctcacaccttactcaacatcagagagtccatactggagagaaattcttcaaatgtaaagaatgtggcaaagcttttaccaggagctcacaccttactcaacatcagagaattcatactggagagaaacctttcaaatgtaaagaatgtggcaaagcttttaacagacgctcaacccttactcaacatcaaataattcataccaggtagaaaccctgcaagtgtaaagaatgtgctaaaaccctaaactggtgctcacaccttactcaacattagaaaatcaatactggatagaaatcccatatgtgtaatgatttttgaaacatcaaaatgaagattaaataaaaattagaagtgtcactttagaaagaactaaggtgctagcacttccgtaaattactctgaatcagtgtgtttattataacaaataattcaaactcaattagataattaaattgtatgtttaaaaagagggacgacattgatggagaggcataattatattcaatgttcacttatttttgtaatcacagtattcatgattgagaaagtattattgatgtaattaaattcaaattaaccttttttttccccactgtggttgattattgctgtctctgacatgagagtcccttctacgttaggtaggcatcattcacatgtctcattcacatgtcatcattcacatgtctcatgacgtcattcacaagtttcccatggaagactaagagcattggcatataggatgtatgatgaaatctaaatggagttgctctttttgtttgacttacaacactgaatataagtcatatatgagttaggtgttcagaatattattgttctgcattaaagtgtgagacagaaacactctgagttttagatatgaatagttttaccaactacccattaaaaggtcttgctagtccattaatattctaatgtatcttcatagcagcaagttagaagtcctgaatgttactgtgataacaataaagaaatcacaaatatcagagagtggtgcaaataacttctctctggtagaacatagattattaattcaatcctctaaatacttaggctcagtttaagaaaagagagaacacatttttttaacataggtcatggtatcagaataagaatgctttttgaatgtttgcagtctgtaattttgatgattgaggaaactggattttgaaatgctttattcagtctgtaaacttaatttttttttaagaataaaatgaaatgtcttttaatttgtt

SEQ ID NO: 30 - DNA, 2836 bp, Homo sapiens
gttggactggtgggaactgggaacactggagacctgatttctaactgacgctaccgtcgcggccgccggcaagttcctttactgtgttttcttggttcagccttgaagtgagtcgtggacgatcctctctcagcgtccagcctagacggcggtgttgctccggcagcgttcctgggagccgagggccagagactaagttcctgggttctgagcctgccatccaaggaactcaggaggaggagttgacagtctcttcgttcctaaccagtgtgggacgacttcagcatgtctcaggccaccaagaggaagcatgtggtgaaggaggtgctaggggagcacatagtgccctccgaccagcagcagattgtcagggtactcaggaccccagggaacaatctgcatgaggtggagacagcccaagggcagcgcttcctggtgagcatgccctccaaataccgcaagaacatctggatcaagagaggggactttctcattgttgaccccattgaagagggagaaaaggtgaaggctgaaatctcgtttgtgctctgcaaggaccacgtgcgctctctgcagaaggaggggttttggcctgaggccttctctgaagtggctgagaaacacaacaacaggaacagacaaactcaaccagaactcccagctgagccacagttatcaggagaggagtccagctcagaagatgattctgacctgtttgttaacacaaaccgcagacagtatcatgagagtgaggaggagagtgaagaggaggaggcagcctgagactccaggacccaattctccacttgctcagggactggcccctggctcttctgggcttggacattcccagggtgctctgcacatcttcacccctgcatgaggacaaagcagggcacctctctgaactgatcttttgattcagagaattaaacccctggtgggttggtgacttgttctggtgtctgagtggctctctcgggggagggagattgtgatgaagtgaaaaactgctccctatttattagagaccttgtgggtgggtgggctgaatggggaggaaatgggaaatggctggagtctttcccaggtggtttgttctttcttattgggcacttagaaagtgccaggccgtgctctgggccttcttgcatgtgtttaacagctgggagcactcctgcttccttgcctgcttgcagttcataccaatttaagcattcaggatgacagccctaggacctaacacccacctgcctctaagagacgctcaggagcccatggtgcctcgtgctgctctccccacctttctagtcaccctgtgtacgggagtgctcacctccagctactgtgtccatccccacatacgacctcatctctcccactctgcaccatctatcacttccagaaggtggctggcaaatctctctatccttaactttgttttgaatggtccatccatctcctgactttatttgaaacctgattattccctgaggacattgattgtcttataaccttttaaatagaggctgcttttccaccctcacccttcattcttctaaccagccctgacattctcatgagtaaccttctgccttcacttccctcttgtgtagcatcaattccgtagtccaccctacacccctctgtctccctccattctgttccgctagtaaaaccctaaccctgggtaaacccaatcattcacctctgtgcccaaacccaagtcaccatcattaggtgagaaaacagccagcctggccaccagttgtaccttacgtttatcattacaaacctcagatggacactaagcactgcccagcagatctactctgggatgtctgtttcaaaacttctgtcttatctatcaattcccccttgtggtagttaccacaacacatgcctcattaagaaacagcaaccatcagagggaatgcctgcctccctgttaccagctctgcagatgtgcacatatcttcctgtcgtaagccaatgggacttaaaccttacctcttgtgttttggagactatctttttttttttttttttttttttgagagagtgtctccctgtgttgctcaggctggagtgcagtggtgtgatctcggctcactgtaaccttcacctactgggttcaagtaactctcctgcctcagcctcccgagtagcttggactacaggcgtgcaccaccacacctggctaactttttgtatttttagtagagacggggttttgccatgttgcccgggctggtctcgaactcctgaccttaaatgagcctcctgcctcagcctcccaaactgctgggattacaggcgtgtgccaccatgcctggctaatttttatattttcagtagagacgaggttttgccatgttggccaggctggtctcgaactcctgacctcaagtggtccacccaccttggcctcctagagtgctgggattacaggtgtgagccactgtgcccagcctcttttgctttcttaaagactttggtcgggtatttgtgttgttgagtattgtgtctgggtgtgggtatttgattctttttttgttttgtgtttttggctgtcctgtctattggatgtgatatgttatggatgtgatgtgttagtgtcgagcgtgctgtagaatctcccatctctgaaacaggcgtgaaaacctgtactgattcccacgtcctccagctaccacttcatttgtctgtttctcatttacttcctcttatagcgtggctttaaacatatatacatttgtatatatgtatatatgaatataatgtataaaatgtatgtagatgtatatacaaaaaataaacgagatgggttaaagat

SEQ ID NO: 31 - DNA, 2405 bp, Homo sapiens
ctaagccggggagcgcatcccggctactgcgggtcctgggtcttcacctgcggagccttacggcagctgagcggtgggaggcgagtccggggctccctgatcttccggacctgagccgcggcgctaggatgggaaacagtgcgctccgcgctcatgtggaaacggcgcagaaaactggtgtctttcagcttaaggaccgagggctgaccgagttccccgcagacttgcagaagctgacgagcaatctcaggaccatcgacttgtccaacaacaagatcgaaagcctaccgcctttgctgataggaaagttcactctgctgaagagcctctccctgaacaacaacaaactgactgttctgcctgatgagatatgcaatctgaaaaaactagagacgctaagcctaaacaacaatcaccttagagagctgccgtctacctttgggcaactctctgccctcaagaccctgagcctctctgggaaccaactgggagcattacctccccaactttgtagcctacggcacctggatgtgatggatctctctaagaaccagattcgaagtatacctgactcagtgggagagctgcaagtcatcgaactcaacctcaaccagaatcagatatctcagatctcagtgaagatatcttgctgtccacgccttaaaattcttcgcctggaagagaattgtcttgagctcagcatgcttccccagagcatcctcagtgattcccagatctgtctgcttgctgtggaaggcaatctttttgaaataaagaaacttcgagaactggaaggctatgataagtacatggagaggttcacagccaccaagaagaagtttgcgtgaagttctccaggactatggaaaccttacaggatactgacttagaacctctgttggaatgtggctgagtcaaagcctcctgttgttgttaggggtatctacagtaaggagatgatacttcaggagattatatttcactcaatgatcttttctcatttcagggctcttctcaaataagctaaaagaaaaaggatcaggagacaggaaaagtcttccgttttgagtcatgagtagggcaatagacaaggttctcttcaaaaccatcattagtttggctttaagaaaccagtagctagctgctatttatatggtgagggggtgctgcctggtaacagaatagctccacaccacagcttgagattttgtttagtttcactgtgtgagctttcataaagtctgttgccattccatctctgtgttaacacttcatatttttatgaaattcagataatttgtgagaggctggcatggatctaaggatttattatttttattctagtccatcagttcagtcgcagtttttatactaggactttaggatgtacataaatgtgtgactgtttgtcttgattaaaagtgcactttggcctgggcatggtggctcatgcctataatcccagcactttgggaggccaaggcgggtggctcacttgaggctaggagttcaagactagcgtggccaacgtgaggaaaccctgtctctactaaaaatacaaaaattagctgggtgtgttggtgcatgcttataatcccagctacttgggaggctgaggcaggagaatcgcttgaacccaggaggtggaggttgcagtgagccgagattgtgccactgtactccagcgtgggtgacagagtgagactctgtctcaaattaaaaaaataaaaaataatttttttttaaaagtacgctttgttggctgggcacggcgactcacgcctgtaatcccagcacattgggaggccaaggcaggcagatcacgaggttaggagttcgagaccagcctggccaacatggtgaaaccctgtctctactgaaaatacaaaaattagctgggcgtggtggtgggtacctgtaatcccagctacttgggaggctgaggcaggagaattgcttgaacccaggaggcagaggttgcagtgagccgagatcatgccattgcactccgactctgggcaacagagcaagactctgtctcgggggaaacaaaaaaaaagtgtgctttgtcaagagaagcaccagcagacctctaagaactgctctctaaggctgcggtagcaaattatctactattgcaggtgccttattggtagagggctctgaagagccaaaactgtatatgcaacacttgtaagataaaagggactttaataatcaagattttcttgaagatttgttagaaataatgtcttatttctggtaacctttccctttttgtatttataactctaccaaccaaattacctatcaataaaccattactataatattttaaaacaacctatgtttatcaagcttactctctgagtgacagaatatactaaataaagaattttttaatg

SEQ ID NO: 32 - DNA, 2403 bp, Homo sapiens
agtcacccctgtgataacttcatctgggaggatgcctgggaaaggggtcactcttcagacctggtacagtcaccacccctgtgatgacttcatctgggaggatgcctgggaaagggttgctcgctcttcagacctggtacagtcaccacccctgtgataacttcatctgggagggtgccttggaaagggttgctcttcagacctggtacagtcaccacccctgtgataacttcatctgggagggtgccttggaaagggttgcttgctcttcagacctggtacagtcacccctgtgataacttcatctgggaggatgcctgggaaaggggtcactcttcagacgtggtacagtcacccctgtgataacttcatctgggagggtgccttggaaagggttgctcttcagacctggtacagtcacccctgtgataacttcatctgggaggatgcctgggaaaggggtcactcttcagacgtggtacagtcacccctgtgataacttcatctgggaggatgccttggaaagggttgctcttcagacctggtacagtcacccctgtgataacttcatctgggaggatgcctgggaaagggttgctcgctcttcagacctggtacagtcaccacccctgtgataacttcatctgggagggtgccttggaaagggatcgctcttcagacctggtacagtcacccctgtgataacttcatctgggaggatgccttggaaagggctcactgttcagacctggtacagtcacccctgtgataacttcatctgggaggatgccttggaaagggttgctcgctcttcacacctggtacagtcaccacccctgtgataacttcatctgggaggatgcctgggaaagggttgctcttcagacctggtacagtcacccctgtgataacttcatctgggaggatgcctgggaaaggggtcactcttcagacgtggtacagtcacccctgtgataacttcatctgggagggtgccttggaaagggttgctcttcagacctggtacagtcacccctgtgataacttcatctgggaggatgccttggaaagggttgctcttcagacctggtacagtcacccctgtgataacttcatccgggaggatgccttggaaacggctcactcttcagacctggtacagtcacccctgttgtcactggatccataactagggtcaaatcttagcatgttacagtgggacataaaactcagataactaactcagaaggaaatcacttacacaccaaaagaatggtaagattttgctaataaatattggaagaaacctgggaaacatgtcgagttgattctaagagtgttagatccaacagggtaggctatcacactccatttgtttaattcattgatatagatgcacttaccagagagtctggatttcatggtttagcttgagcagcaggaggtgactcaacatttgcctacatttgatgaggtggagatgtcagagcttccctgctatgatttgggggagagaatccaaagatgtagggagacaggaatgtcacagtggatttatcatgtgtgacttacacgtctaccaccaagcacccattcctaaccatgagaaggcccagaagacacttctttactaagacattgagaaatagaatagtgaggggagcatctgcctctctaaaagctctgtgcttgctttcctacgtaggcaggtgtgaccctaaggatgttgtcattgagatgagcttcctggtatcagtggggtgatgggatcctgaagtgcctccggataattgggagcacttaattgtcagagataaggtgggcacatttaccacgaagggcggcagagatgtaatcagaatgcctttggccactgggattcttggcaatggctaatgaatgatggtatctctaggaacaaaattgttgggctgcctactcaagtataacagaaaaaaattctgggtctggtagccagaaacctgatttgaatcaccacagcagagagtcacggcctctcccctagctcttaggactgagtcagttcacagccccagggcccctttatgaactggggtgtgagggtgtggggggatttcccccaaagaatgaactctgcagccctgctgcaagtacctactgtaagtctccctctaggccctactcagaagacctgtgctatttacagagtgactgtgcactggggaaagcaaactacccaggccttctgagatgactgaagcattggctctgaattgatgttcatgcacggggacccaaagtgacagcgtggccactagtcaaaatgggagattaatggtggttaggtgacagataccttactaaaagttttttttgttgttttgttttgttttcctaatctggatgcgtactcaattaggg

SEQ ID NO: 33 - DNA, 3667 bp, Homo sapiens
atttttttccttttctccagcggcctcaggttcttgttacaactgagtccgggttggaggaggtgtggggccgctgccgccaggaaaaactgcactggaggcaatgtttctataactcaaagaagagacagtgtgagaatgtcagccctcaactggaagccgtttgtgtacggggggctggcctccatcactgctgagtgcggtacatttccaattgatttaaccaagacacggctccagattcaaggccagacgaatgatgcaaaatttaaggaaattagataccgaggaatgttgcacgcattagtgaggataggcagagaagaagggctgaaagcactctactcggggattgcccccgcgatgttacgccaggcatcctatggcaccatcaagataggcacttaccagagcttgaagcgactattcattgaacgcccagaagatgaaactctaccgataaatgtgatatgtggaattctgtctggagtcatatcttcaaccattgctaatccaactgatgttttgaaaattcggatgcaagcgcaaagcaacaccattcaaggaggaatgataggcaacttcatgaacatttaccagcaagaggggacaagaggactgtggaagggtgtgtcccttactgcgcagagggctgctattgttgttggtgtggagctgccggtctatgacatcaccaagaagcatcttattctctcaggcctgatgggagacactgtgtatacccacttcctctcaagcttcacctgtggtctggcaggggccctggcctcaaaccctgttgatgttgtgaggacacgtatgatgaatcagagagtgcttcgagatggcagatgttctggctacacaggaaccctggattgcttgttacagacatggaagaatgaagggttttttgctctctgtaaaggcttttggccaaattggttgagacttggtccttggaatatcattttctttgtgacatacgagcagttgaagaaattggatttgtgacaagccaaggctgcatgagacatctttctgaaaatggtaacttctgaaacagcaaagcttcctgtgtttcactctgcttctcactgcttggctcatcacagattctgggatgtgagcaacagatgaagactgggttagttgagattgctgtgtgttggcattggatgctcttcatcaaacgtttaatggcataaactaacatccaaacactagtctttaccactgaagtgcccttcaacatcaaagataatatgtgaaatgcatgtttcttgctaaagaaaacttgcaagaaaatcaggagcgatgtattgttttattcagggagagtagctcctgatgcatctcagctcatgactgagaatcagactgctctagaaaagctcactggaaccatggaatggagcctccgagaaggtgttatggtttctgaatttctgggagattttgctccttgtcaactgaagaaatttcatgtatggagacctggactgttcaaccccaggtataaacggtgcaggaaatggatcctaggaatatcacactgctttatcatttcctattttggcaggatcttccacttataataagtgattttaagctttgaagacttgacatttgtgagaaattgttacaaagtaataatctctaaattcgtggtggtgttatgtgttggctttgaaggttgcaaggtctgtattggtggggggtgttttcaagcagcttaggttctgtcttaggtcatgttagtaattagctttatgatttttagcaaagcatatgtatttctcaatgagtaaaatggggataataacgtctattgatgtagagggtcaaatgaagaacaaatagtagctgctgctacttgactggaaaggtaaatgtgtttacatcatgctgtggaacagctctaaacagtctatgtagaagaggggcatgttctcatgggcttctcatggtaattgtgaatgaagccctttgttaaggtcttgttgaagaaagaacactgtataagttcaggctttagtacattttccttagcaaaatgttggtagtgaatcaaagagttgatttttccaggtttccagtttttactttagtttatgttgtgcctgtcttggactttctgtttagtttggatggaaaatacctgcttgaaattttaaaaatgatttctttagtgcatctatttagctagtttctgataggtggtatgtaatattttccctttttctttccttctgtagacacaataagtcattctccctcttctttttttctttttctattttcttattctttactctaacctgcttcagagaaagagccctcttccttcttgtcttcatcttagtcttttcaaaataaaagatgactgtgagaaccccaagaacttccacttctgggaggcagccacaggacagggaacatatttatttgggtctcttcagttccccctttgagaacagcattaaatacatgttagctggggctccagggcattctccttccacagtagtgcggccaaattcccagtctggccagtctctttgttgagactgaatagaaggactgcagttttttttggaggatgagataatttttcctcgcaggcatttttcccttgccttccttatgcatgaatggtccctttgaatattatttccaaaagtgagagctaagacaaagtcatcaaaaagagaggataacagaaggtgggggcgggggcggggtgcagtggggtagggttacctgttaattgctgagactcagatgaaagtccagctctccctgggcaaccctagagggcagcagaggaccccagagctcattcaggccttgctgcttgttctaaactacaccttaggattttttcttctttccaaaacattccattgattttataaagactttctatagagaggctttcacttttgagttctttgagtttaaagattgcttttcttgaaacgctctttttttaatgtagaaaaattttactttttcaaatatgcatacaatttttaaaacagtagaagcaaattcattttaatgaccatgtaaagagcgaatgtcagacagtattattaccagtttattcaaattacatacatgttcctaccaaggtggaaagaaattcaaacctcatggtaaaacttaagcacgatttaagataaaagcatagtatttcttcagtgtagacttattaagtgccttattgaacaggatcttaacctgctttttctgtttttttgaaagagttaatgcaattgttgaagcttctaaccaagaaacaacttaaggaattgggagacttggtcccctcgttgtcagggttctggctataagtacctccccacctttgggttttcttaaatatgccaaaaggaattctagtttttataaccaatgggtttttttgtttgtgtgcttatggatttgtgtaatcattgatgcttaatgttgtggattcataatataaaaagtggctcctgtcctttatatttattcatgtgctagaaatagtatgcattatataaagagtatgaagttttcataagcctttatatttcaagctctttatttaaacattgttggaatatgtggcataagccttgtttcatttatttaataaactggagtaatatataataat

SEQ ID NO: 34 - DNA, 2984 bp, Homo sapiens
gcatttctccccgagatggcgggtctgacggcggcggccccgcggcccggagtcctcctgctcctgctgtccatcctccacccctctcggcctggaggggtccctggggccattcctggtggagttcctggaggagtcttttatccaggggctggtctcggagcccttggaggaggagcgctggggcctggaggcaaacctcttaagccagttcccggagggcttgcgggtgctggccttggggcaggcgctgggcttggtggtgtcccaggagttggtggcttaggagtgtctgcaggtgcggtggttcctcagcctggagccggagtgaagcctgggaaagtgccgggtgtggggctgccaggtgtatacccaggtggcgtgctcccaggagctcggttccccggtgtgggggtgctccctggagttcccactggagcaggagttaagcccaaggctccaggtgtaggtggagcttttgctggaatcccaggagttggaccctttgggggaccgcaacctggagtcccactggggtatcccatcaaggcccccaagctgcctggtggctatggactgccctacaccacagggaaactgccctatggctatgggcccggaggagtggctggtgcagcgggcaaggctggttgcccaacagggacaggggttggcccccaggcagcagcagcagcggcagctaaagcagcagcaaagttcggtgctggagcagccggagtcctccctggtgttggaggggctggtgttcctggcgtgcctggggcaattcctggaattggaggcatcgcaggcgttgggactccagctgcagctgcagctgcagcagcagccgctaaggcagccaagtatggagctgctgcaggcttagtgcctggtgggccaggctttggcccgggagtagttggtgtcccaggagctggcgttccaggtgttggtgtcccaggagctgggattccagttgtcccaggtgctgggatcccaggtgctgcggttccaggggttgtgtcaccagaagcagctgctaaggcagctgcaaaggcagccaaatacggggccaggcccggagtcggagttggaggcattcctacttacggggttggagctgggggctttcccggctttggtgtcggagtcggaggtatccctggagtcgcaggtgtccctggtgtcggaggtgttcccggagtcggaggtgtcccgggagttggcatttcccccgaagctcaggcagcagctgccgccaaggctgccaagtacggagtggggaccccagcagctgcagctgctaaagcagccgccaaagccgcccagtttgggttagttcctggtgttggtgtggctcctggagttggcgtggctcccggcattggccctggtggagttgcagctgcagcaaaatccgctgccaaggtggctgccaaagcccagctccgagctgcagctgggcttggtgctggcatccctggacttggagttggtgtcggcgtccctggacttggagttggtgctggtgttcctggacttggagttggtgctggtgttcctggcttcggggcagtacctggagccctggctgccgctaaagcagccaaatatggagcagcagtgcctggggtccttggagggctcggggctctcggtggagtaggcatcccaggcggtgtggtgggagccggacccgccgccgccgctgccgcagccaaagctgctgccaaagccgcccagtttggcctagtgggagccgctgggctcggaggactcggagtcggagggcttggagttccaggtgttgggggccttggaggtatacctccagctgcagccgctaaagcagctaaatacggtgctgctggccttggaggtgtcctagggggtgccgggcagttcccacttggaggagtggcagcaagacctggcttcggattgtctcccattttcccaggtggggcctgcctggggaaagcttgtggctggaagagaaaatgagcttcctaggacccctgactcacgacctcatcaacgttggtgctactgcttggtggagaatgtaaaccctttgtaaccccatcccatgcccctccgactccccaccccaggagggaacgggcaggccgggcggccttgcagatccacagggcaaggaaacaagaggggagcggccaagtgccccgaccaggaggccccctacttcagaggcaagggccatgtggtcctggccccccaccccatcccttcccacctaggagctccccctccacacagcctccatctccaggggaacttggtgctacacgctggtgctcttatcttcctggggggagggaggagggaagggtggcccctcggggaaccccctacctggggctcctctaaagatggtgcagacacttcctgggcagtcccagctccccctgcccaccaggacccaccgttggctgccatccagttggtacccaagcacctgaagcctcaaagctggattcgctctagcatccctcctctcctgggtccacttggccgtctcctccccaccgatcgctgttccccacatctggggcgcttttgggttggaaaaccaccccacactgggaatagccaccttgcccttgtagaatccatccgcccatccgtccattcatccatcggtccgtccatccatgtccccagttgaccgcccggcaccactagctggctgggtgcacccaccatcaacctggttgacctgtcatggccgcctgtgccctgcctccacccccatcctacactcccccagggcgtgcggggctgtgcagactggggtgccaggcatctcctccccacccggggtgtccccacatgcagtactgtataccccccatccctccctcggtccactgaacttcagagcagttcccattcctgccccgcccatctttttgtgtctcgctgtgatagatcaataaatattttattttttgtcctgg

SEQ ID NO: 35 - DNA, 3364 bp, Homo sapiens
agcattttccctctgtgcatctccaacatggatgcttttcagggcattttaaaattcttccttaatcagaaaactgttattggctacagcttcatggctctgctgaccgtgggaagtgagcgtctcttttctgttgtggcttttaagtgcccctgcagcactgagaatatgacctatgggctggttttcctctttgctcctgcctgggtgttactgatcctgggattctttctgaacaataggtcgtggagactcttcacaggctgctgtgtgaatcccaggaaaatctttcccagaggccacagctgccgtttcttctacgtcctcggccagatcactctgagctcattggtggctccagtgatgtggctttctgtggctctgctcaatggaactttctatgaatgtgccatgagcgggacgagaagttcaggactcctggaactgatttgcaagggtaagcccaaagagtgctgggaagaacttcacaaagtatcttgtggcaaaactagcatgctacctaccgtcaatgaagaactgaaactctcccttcaggcccagtctcagattctaggatggtgcctgatttgttcagcgtctttcttctctctgctcaccacatgttatgctcgctgccgatctaaagttagctaccttcagctgagtttttggaagacatatgcacaaaaggagaaggagcagttggaaaatacatttctggactatgccaacaagctgagcgagaggaacctgaaatgtttttttgaaaacaagaggccagatccttttcccatgcctacgtttgctgcctgggaggctgcttcagagctgcattctttccaccaaagccagcaacactatagcaccctccacagagtggtggacaatggtctgcaacttagccctgaggatgatgagacgacaatggtccttgtgggtactgcccccaatatgtagctcatccaccatcaatgactcatggtgttgagtggcatgctcattctgtgatcctcctaacgtatcaccagcaacctgtgtgtctctgtattttcttacatttggagtatgtttacaagacaataacacaaaggaaactgctttgaagctctcaagtagaacatcaggatgtgctcaaattgatgctgaggggtgacaaaggtgctcttgcattggtggagaggggctcagtaggcctaaatgttgctccaagatctaagattttatcattcaacagacagactcatgtgagagggctcatcagtctctgtaaatattggttgcagaatttaggggcagaagcaatggcttgtgagtgagcaagttactcttaacataggttgccctacacagtggctcctgcagtgtgatcagcaggagtctctgtcctacaaatctacacttttaaggatgtatgaaattgtggaattcattccctcaggatctgaagatctcagttctcaaaaatcacaagttgcaagaatatgatacctaaaattgaaagtttttcacatgttttcactgtatactgaaaatactcccctggaagcagggctgcatcataatttttgtgggctttatgtacttttgcctttgcgaaccatttcctacattcaaaatagtagtaacaaatatatatatatatatacacacacacacacagaaatatatatttataactgcattgataaaaggtgaatatattagcattttcttcaacctaaaagtttatgtattttcttctgattttaaaagaaattaaaaacattttagtgggcccttacaagtattatggtccttaggcacagtgcttactaggccgtgggtatgtcttagtgcgtttgggctactataacaaaatatcatagataggtggcttatacaaaatagaaatttatttctcacagttctggaggctgggaagtccgaggtcaggctgccagcatgctcaggttctggtgagagcaattttccaggttgcaaactgcttgctgacttctcagtgtccttccatggtggaaagtgcaaataagctcccttgagcatttttataaggcactaatcccattcctggaggctccaccttcatgacccaattacttctcaaggctctgcttcttagtactatcagcttgggggttaagatttcaacatatgaaattgggggagacacaaacattcagactatagtagggtaaattgaccttggctaaaggtctggggacactgtccaaagcagtactggcataaaactgcattgcagtcttacatttatcagaaataatgcaaatcttgcattctacaatgtactatatccatgttagtatgtacatatatatgtgtatgtatatatgtacataaattctccttaaatctctgagaagaattgtgctttaaaaaagaactatgttttgtgctgtggctcataccttacagtggtagtctatgtctcttagtttgagaaagctgaatattaacttcttattaacatgagacatgatggcaaactgaatcctacaagtataggacccagaacatatctatgttattgtcatttacaagaagaaatatgtatttggtctttcttcctattcctggtgcagagctcctaaaacctttgggacctcccaagtgatgtgtctggtagtacgcgaatgagatgactgatagttaggggcttctgaatggcctcagaatagggtctggttgccacgggaaccaaccatgtgtttagagggttggaactttcagccccactcccagaccttggggaaggaagaggggctgaaggttgagtcgatcacaaatggataatgatttaatcaatcatgcctaagaataaagcttcccataaaaatctaaaggacaaggttcagagagcttctgcattgctcaatacatgaggagtggtgagcccaaaggggccgtggaagctccgtgccccttcccccaaacctgttcctgtgcctccatctggctgtttctgagttatattattttataatagactgatgatagtaaataaagccctttcctgagttctgtgagctactctagcaaatggtgaaatctgagaaggaaatcatgggaacctctgctttgtagccacgtcagatagaagatgtgagtaactttggaacctactgcttgtgactggtgtctgaagttgggggagatcttatgggactgagctcttaacctgctggggatctgcacttaatgccgattaatgccagaattgaattgtatgatatccagttggtattggagaattggccagtgtgggagaaaacccacacagttggtggcaaggagtgttcagtgttgagtgtgaatgtcaataaaaaaaggtttgttttttctacgt

SEQ ID NO: 36 - DNA, 2654 bp, Homo sapiens
gtccgcgcgcctcgctgcgatggcggcggcgccgagcacagtcaccccgctggcggcggagtcttcccctcaggaagctaccgtctctgccgcctcctcctcctcctacaccgcctgcgcggcagcggcggcggcggcggcggcggcggcagtaattgttcctgcctcctccgccacctccgcccctgcctgcccgcctgccggtggctgtggcgacggcggcggcggcggctttggcggctccactatggcggcggcggggagggggggcagtagttttaaagtagacacccgcccttgcctcagagaagacgccatttggaatgaacaggaaaaggctgaactttttacagataagttttgtcaagtatgtggagtgatgctacagtttgaatcacaaagaatttcacattatgagggtgaaaaacatgctcaaaatgttagtttttattttcaaatgcatggggaacaaaatgaagtgcctggtaagaaaatgaagatgcatgttgagaattttcaggtgcataggtatgaaggagtggacaaaaacaaattttgtgatctctgcaacatgatgtttagctctccacttattgctcagtctcactatgtgggaaaggtccatgctaaaaaactgaagcaattaatggaggaacatgatcaggcatctccatcaagatttcaaccagagatggcaggagtgcctcttactacttctgcagagtcaacattcctgaagccccttcctgtcaagcctcctacaggcaccttctcactactagtgtattttattcccctttcatattctctcttccacccacttcttttcctccactcactattatttttcagttctttctttacccagcctttctccttcatgtgaaaatgttcattcttctctcctccttgaagctctattctttgtcatatgtaactctttatgctctggttcttctctatttctgtttcttttttgttttctctatgggctctttttttattcattacctaaatgtaggtattcccatggtttcatccttgaccttactctacaaacacgatttctatttccctgatttcatttctcatctgtatgcttatgacctttctgtcaagtattagattcacatatccaaatggcagctactgcttcacctggatgccccatagccatttcaaatccacctagtcattcaaagtagaaacccacagctcagatcttattagcacaggaatggctaccataacgatatggaactaaaaattttgctttcagcttttatcctgagagtggggctcactgaacctctctcctttctaaaatctgtggaaattacttttggtaactaaggcactgcagtgatctcagcatttagtatgagaacctatgtttgccatatttgtagtattgcttttacatctttagatatgttccggtcccacatgcaaggaagtgaacatcaaattaaagaatccattgttatcaatctagtgaagaattcaaggaagacacaagactcttaccaaaatgagtgtgcagattacatcaatgtgcagaaagccagaggactagaggccaagacttgtttcagaaagatggaagagagttctttggaaacccgtagatacagagaagtggtcgattccagacccagacatagaatgtttgaacaaagactcccatttgagactttccggacatacgcagcaccatacaatatttcacaagcaatggaaaagcagttacctcattcaaagaagacatatgactctttccaagatgaacttgaagattacatcaaagtacagaaagccagaggactagatccaaagacttgtttcagaaagatgagagagaactctgtggatactcatgggtacagagaaatggttgattctggacccagatcaagaatgtgtgagcaaagattttcacatgaggcttcccagacctaccaacgaccataccatatttcaccagtggaaagccagttacctcagtggctaccaacccattcaaagaggacatatgattctttccaagatgaacttgaagattacataaaagtgcagaaagccagaggactagagccaaaaacttgtttcagaaagataggagatagctctgtagaaacacacaggaacagagaaatggttgatgtcagacccagacatagaatgttggagcaaaagctcccatgtgagactttccagacctattcaggaccatatagtatttcacaagtagtggaaaaccagttacctcattgcttaccagctcatgatagcaaacagagactagattctattagctactgtcaactcaccagagactgtttcccagaaaaaccagtacccttgagccttaatcagcaagaaaataactctggctcatacagtgtagaatctgaagtttacaagcacctctcttcagaaaacaatactgctgaccatcaagcaggtcataaacggaaacatcagaagagaaaacgacacctagaagaaggcaaagaaaggccagagaaagagcagtccaagcataaaaggaaaaagagttatgaagatacagatttagacaaagacaagagcatcagacaaaggaaaagagaggaggatagagtcaaggtcagttcaggaaagcttaagcatcg

SEQ ID NO: 37 - DNA, 1868 bp, Homo sapiens
agttgggagagcgtctgtagcttccttgtgtccggccgtcagctgcagcccggggagccaggtgcagaaacggaagatgaccactctgtgactgaagggcctgcggatgagggcattcgaccacggccgcaggggtcttcacctgtctacgaatacacgactgaggctgccgactttggactccaggaagacgcccccggcaggcaaggttctgctgggagacggagatcctggtggaagcgagattcaggggactcacggacatttttcaggatgagtcgtccagaggctgtccaggaggcaacagaggtgacgctgaagacagaggtggaggcaggagccagtggctacagtgtcacaggtggtggggaccaggggatcttcgtcaagcaagtgctgaaggactcctcagccgccaagctttttaacttgagagaaggggatcagctgctcagtacaaccgtgttctttgaaaacataaaatatgaagatgctctcaaaatccttcaatattcagagccgtacaaggttcagttcaaaatcagacggcagctccctgccccacaggatgaagagtgggcttccagcgatgcccagcacggcccacagggcaaggagaaggaggacacggatgttgctgatgggtgcagagagacccccacgaaaactctggaaggagatggggaccaagagagactcatctccaaaccaagggtggggagaggcaggcagagccagagggagaggctctcttggccaaaatttcaatccataaagagcaagcgggggccgggaccccagaggtcacacagctcgtcagaggcctacgaacctagggacgcacatgacgtgtcccctacaagcacagacacagaggcccagctcacggtggagcgccaagagcagaaggcagggccgggcagccagaggaggcggaagttcctcaacctcagattcaggacaggctcgggacagggcccttcatcgacaggacagccaggcagggggttccagagtggggtgggccgtgctggggtcctggaagagttggggccctggggtgatagcctcgaggagactggggctgccacaggcagcaggagagaggagagggcagaacaggatcgagaagtgatgcctgctcagagcatgccattgcccacagagctcggtgaccctagactttgcgagggaacccctcaggaagggggactcagggcagccaggctccatggaaagaccctggaggggcaggcacaggagacagcagtggcccagaggaagcccagggcccagccaactcctggaatgagccgggagggtgaaggcgagggactgcagagcctggaaatcgggatcgccagactgtccttgagagacacaaccgaaggaggcacacagattggcccaccagaaattagggtgcgagtacacgatttaaagacaccaaaatttgcattttccacagaaaaagagccagaaagagaaaggcgccttagtaccccacagcgagggaagagacaggatgcgtcctcaaaagcgggtactggcctgaagggtgaggaggtggaaggagccgggtggatgccgggcagggaaccaaccacacatgcagaagcacagggggatgaaggagatggagaggaaggactacagaggacaaggatcactgaggaacaggacaagggcagggaagacacagaaggacagataagaatgcccaagttcaagataccctccttaggatggtcgccaagcaagcacacaaagacaggcagagaaaaagccacagaagacacagagcagggaagggaaggagaggccacagcaacagctgatagaagagaacagagacgcacagaggaagg

SEQ ID NO: 38 - DNA, 2755 bp, Homo sapiens
ctttgttgtgacgggcaggaaggaggatgtggccatggctcggagggagatcatctctgctgccgagcacttctccatgatccgcgcctcccggaataagaacacggcactcaacggcgcggtgcctgggccgcccaacctgcccgggcagaccaccatccaagtgcgggtaccctaccgcgtggtggggctcgtggtggggcccaaaggcgccacaatcaagcgcatccagcagcagacgcacacgtacatcgtgacgcccagccgggataaggagccggtgttcgaggtgaccggcatgccagagaacgtggatcgcgctcgagaggagattgaggcgcacattgctctgcgtaccggcggcatcattgagctcacagacgagaacgacttccacgccaacggcaccgatgtgggcttcgatctgcatcatgggtccggcgggtccggcccaggcagcctctggagcaagcccacccccagcatcacgcccacccccggccgcaagcctttctctagctaccgcaacgacagctccagctcgcttggcagtgcttccacagactcttatttcggcggcgggaccagcagcagcgcagcggctacccagcgcctggcggactacagcccccctagccccgccctgagctttgcgcacaacggaaacaataacaataacggcaatgggtacacctacacagcggggggagaagcctcagtgccatcccccgacggctgccccgagctgcagcccacttttgacccggctcccgctcccccacctggggcaccacttatctgggcccagttcgagcggtccccgggaggcggacctgcagctccggtatcttcttcctgctcttcttctgcatcttcgtctgcttcttcctcctccgtggtcttccccgggggtggcgccagtgcgccctccaacgccaacctggggctattggtgcaccgccggctgcaccctggcaccagctgcccgcgcctgtctccacccttgcacatggccccgggggcgggagagcaccacctggctcgccgggtgcgcagcgacccgggtggaggaggcctggcctacgccgcttatgccaacgggctgggggcacagctgcctggcttgcagccgtcggacacgtcgggctcctcctcttcgtccagctcctcctccagctcttcatcctcttcctccgggcttcggcgtaaaggcagccgcgactgctccgtgtgcttcgagagcgaagtgattgccgcgctggtgccctgtggccacaacctcttctgcatggagtgcgccaatcgcatctgtgagaagagcgagcccgagtgcccggtctgccacaccgcggtcactcaggccatccgcatcttttcttaaaggcagcgggcgctgctagtgcgcaccgtgctgggggaagggggaacccctccccatcctctttccccagcgctcgcctgcctccctgggtgccccccctctcccttctccttcccggccccaccaacactctgagatccgagaggagcttggaaagctgtagtatccgctcatttttaaaatttaatttttaagtaaaggaatttgccaggatatctgcatcaagagtactgtagcctgggaaacctgaacacctgaaatgcatgctctataaataataggaacggcgacattctagtaatgatagtttttacactgtacttaataggaagcttccaaaagaagaaaaccccacaagttttccattttcttaaagtaggaaaaaatgaacagtaataattatgatgaagatgatagtagtgctatgggatgtgtggactgtttagtgtgttcccctttgtgggtgggttcctatgatacttattatagaacacagtggatcctttttgaatgttcgtggaagggccaggagttcctgtgaaaccaggatactgcagctttattaaagttaaagaaactgtaacatatctcttatatattaaaaacgtttaaaagttttaaagagaaattgcattaatacagattgaagtattttattcttttttgacttgaaaaattatatttcatattgcaaagatgtttacaagtattttaatttaagttcagtgaacttttttgtagctgggttaaatctttttattttagtatggccttatggcaaagaacactgtattattttaataatcacacaattgtgacggaattacaaccataaaatgtgtaatgttttgaacagtattctgttgggatggagattttataggttcagacaaatcttctagatctgcttcacccagcatattttctattcagtgatataaagcatattttattctatattattacaaaaacggaaatgtataaacatgtcaaaaagaactgttgatgctttctaacatttgtataaatagaattcagtgcaagttacaaaaattctgttgcaccactctagttttagtatttctattttaatacatttgtttaccacttgtttatgtatatgtaggtgatgttacttgagcttaaatgtactttactgagcaaagttttaaaaaacaaagtatattttattttatgataaagggcctttaacctcatggtcaaatactaatattatatttgctgagacaagatttgaaattgtatcaagagttttatttttctgacatttaaagttctacataataaaggtaaaacttaagtaatggtgctacttcattttttaagtatttctatataaataaaatattgaag

SEQ ID NO: 39 - DNA, 1955 bp, Homo sapiens
ttttaattgtatgaccttatatatagactttcttaaaaataacataaggtaacatattagtgggagaatgcatcttcttcactcctaagggtttcattcatttggagtgttttccttagggtaggctgtattttgctacaggatcaaacaatccccaaatctcaatggtttagaaataatatctgctttttttcacttcccgtaacagtaagttaaagaatctgcctgtgtcattctcactccaagggcctaggttttctaaacagccaccctcctgagtgttgtcaggcattatggtagagagaaaggggctctggttttcctatatctgtatttaaattctatggctcagaaactctgctcatcacttctgctcacaactcactggccaaaatgactcacacagtccctcccaaccataaaggggccagaaagtctaatcctactatatgcttggaaagaagaaagccaaacactctctgttatttatttatttctccctgtctgttttctcttctgtctgcttctggcacttctcttagaccttctgaatgcatcttcatacctcttagcttctcccatgttttccagtctttcggtattttaatgatacctcctgagagatgtcctcaactctttcttccacattatcagtttggccttccgatatgtccttctagttattcaacctgtttatttaacatttttagttagcaatatttttaatttcaggaactcctctttttttgccctttgaatgtgctattgtcttagcaaacttacatatttatgaatgtacctacacgttttgaaaacttcctttaaaagtctttttaaaaacagaattatctcttttaactgatggggaatatgctatttgtttatgagaatcttcttacactattggcttttttccctcaaaatgtctagtgaagtttggttgttggaacatatttgtaagtgaatgtccaggtgggttagatgggtcaggggtgtgggtgtcctctgtgtttgtgtggtctgtccaaagagacttctagggagggcatggcagctcttcatcagcaacagtcttctcagtgtccttcccacctctttgactgtagctcttgtccttatgcttgtaaaatggctgatgtacctttgcaaatccaggtaagaagataaggcagaatacaaagcacaaaagttggaaaccaaataaatctgcccacttttaaagagctatccagaaatccgaaccagcaactttcacttctgttttattggccagaactgtgtctcatggccactgcgatatatagggaagtctgacacactgccatctcaaacaaaatcagagacattgttagtaaggaaaaaaagggcagttgggcaatcaaaagtgattcccattacaagtaatattattcttattttaaggaagataaatctctaattcatagaaattaaaattattctattacaaagtagctatatgggctaaattgtatttctcattgattcatatattgacatcctagtccccaggacctcagaatgggactgtatttggagagatggcctttgaagaggtattaaggtaaaataaagttgtatggatgggctgtaatccattatgactggtgttcttagagaaagaggagattagaacacagacatgcacttgcaggtagaagggtccattgtgaggatacagagagaatatagctgtctgcaaggcaaggagagaggtctcaggagaaaacagtcctgctgacaccttgattttggacttttctcctccagaaacgtgagaaaataaatttccgttgtttaagccacgcagcccgtgttattttgttatggcagcccgagcaactgagtacagtacgggagccagaattcggtcccagctctgacttcagaggccatgcatttaaatattaggcatgcttctacaatatgcctttggc

SEQ ID NO: 40 - DNA, 2208 bp, Homo sapiens
aatgcgcaggcgcggcgtcgccccgcccactccggctcggcggctctgggcctgcggcgggcgctgcgggttggagctcgggacgtggtcgtgggctgtagcaaggtgctgctgaggccacggacgtcggaggaggtgtcccacatcctcaggcactgccacgagaggaacctggccgtgaacccacaggggggcaacacaggcatggtgggtggcagcgtccccgtctttgacgagatcatcctctccactgcccgcatgaaccgggtcctcagcttccacagcgtgtctggaattctggtttgccaggcgggctgcgtcctggaggagctgagccggtatgtggaggaacgggacttcatcatgccgctggacttaggagccaagggcagctgccacatcgggggaaacgtggcaaccaacgctggaggcctgcggtttcttcgatatggctcactgcatgggactgtcctgggcctggaagtggtgctggccgacggcactgtcctggactgcctgacctccctgaggaaggacaacacgggctatgacctgaagcagctgttcatcgggtcggagggcactttggggatcatcaccacggtgtccatcttgtgtccacccaagcccagggctgtgaacgtggctttcctcggctgcccaggctttgctgaggttctgcagaccttcagcacctgcaaggggatgctgggtgagatcctgtctgcattcgagttcatggatgctgtgtgcatgcagctggtcgggcgccatctccacctggccagcccggtgcaagagagtccgttttacatcctcatcgagacttcaggctccaacgcaggccatgacgctgagaagctgggccacttcctggagcacgcgctgggctccggcctggtgaccgatgggaccatggccaccgaccagaggaaagtcaagatgctgtgggccctgagggaaaggatcacagaggcgctgagccgggatggctacgtgtacaagtacgacctctccctccctgtggagcggctctacgacatcgtgactgacctgcgcgcccgcctcggcccgcacgccaagcacgtggtgggctatggccaccttggagatggtaacctgcacctcaatgtgacggcggaggccttcagcccctcgctcctggctgccctggagccccacgtgtacgagtggacggccgggcagcagggcagcgtcagcgcggagcacggagtgggcttcaggaagagggacgtcctgggctacagcaagccaccgggggccctgcagctcatgcagcagctcaaggccctgctggaccccaagggcatcctcaacccctacaagacgctgcccagccaggcctgacggccactcctgctgctgccaaggcccactgggggtcggcgggtggctctcgggcgggggtgttgcggtggctctgagggatgagccggcagcgggcaggggaccaggcacctggttgaagggactgggagcccgcactggggaactgccggacgcaggccctcgggcaggagcatctggcagagtggggggcgtggcaggcaccctcctttgcagggcgaggtggggcctctgcagccatcctggacaggccggggtggcggcagctttgcccacgtggaagcggggtgggtctcacttgcgtggtggcccctggccccatcttgcctgctgcggcctggggagcaggcgctgggtggtggttctgcctgcttgctgctcgttccccgggcatgcgtgggcagcggggggcatgcgtgggcagcagggggcgtgggcagcgggggcacgggcaggaccacgtgggccgtgatcgtgggttgccgagaggacctgagcgctgcggctctgctgaatggagccgggtccctcaggccgtggacgccctcgggaggggggtgactgtggcttgtgtctggacaggaatgtgtcatttcccacatcttctagagggctgccagctgggaagacagttatcagggcaagctgtgctctgagttttgggttctgctcctacaaagaacgtgcggtgctgcgggcgagggccccggcacggacaagggccactgcagagtgtgtttctgctcgtcagctgccctgggcagcggatgggctgggcgatgcagctggatgcacatctcgttctgtcatgaatgtccagtaaaaatctgaattggttgc

SEQ ID NO: 41 - DNA, 2804 bp, Homo sapiens
agagcccgaggctgctgcgccgggcggctgcagcctccgctccagcgcccgcgccgtgccctgcatcccgggagcccggctggacccgcggcggctcggccggtgttccccctcccctccccggggcagcagccaccatgttctcgtgtgtgaagccctatgaggaccagaactactcagccctgaggcgggactgccggcgcaggaaggtgctcttcgaggaccccctcttccccgccactgacgactcactctactataagggcacgccggggcccgccgtcaggtggaagcgacccaagtacagtggccattcgccggcccctcacaggcctggctggggagatgcacggagaatggagaatgtccccaggcctgggagctcagggtgtccgtcctcctcgctcagggcccgggacctgggcatctgcgaggacccccgcctctttgtggatggcatcagctcccacgacctgcaccagggccaggtgggcaactgctggtttgtggcagcctgctcgtcacttgcctcccgggagtcgctgtggcaaaaggtcatcccagactggaaggagcaggaatgggaccccgaaaagcccaacgcctacgcgggcatcttccacttccacttctggcgcttcggggaatgggtggacgtggtcatcgatgaccggctgcccacagtcaacaaccagctcatctactgccactccaactcccgcaatgagttttggtgcgccctagtggagaaggcctatgccaaactggcaggctgttaccaggccctggatggaggcaacacagcagacgcactggtggacttcacgggtggtgtttctgagcccatcgacctgaccgagggtgactttgccaacgatgagactaagaggaaccagctctttgagcgcatgttaaaggtgcacagccggggcggcctcatcagtgcctccatcaaggcagtgacagcagctgacatggaggcccgcctggcgtgcggcctggtaaagggccacgcatacgccgtcactgatgtgcgcaaggtgcgcctgggccacggcctactggccttcttcaagtcagagaagttggacatgatccgcctgcgcaacccctggggcgagcgggagtggaacgggccctggagtgacacctcggaggagtggcagaaagtgagcaagagtgagcgggagaagatgggtgtgaccgtgcaggacgacggtgagttctggatgaccttcgaggacgtgtgccggtacttcacggacatcatcaagtgccgcgtgatcaacacatcccacctgagcatccacaagacgtgggaggaggcccggctgcatggcgcctggacgctgcatgaggacccgcgacagaaccgcggtggcggctgcatcaaccacaaggacaccttcttccagaacccacagtacatcttcgaagtcaagaagccagaagatgaagtcctgatctgcatccagcagcggccaaagcggtctacgcgccgggagggcaagggtgagaacctggccattggctttgacatctacaaggtggaggagaaccgccagtaccgcatgcacagcctgcagcacaaggccgccagctccatctacatcaactcacgcagcgtcttcctgcgcaccgaccagcccgagggccgctatgtcatcatccccacaaccttcgagccaggccacactggcgagttcctgctccgagtcttcactgatgtgccctccaactgccgggagctgcgcctggatgagcccccacacacctgctggagctccctctgtggctacccccactggtgacccaggtacatgtcctgggagctgctggcctcaaggactccccaacaggggctaactcttatgtgatcatcaagtgtgagggagacaaagtccgctcggctgtgcagaagggcacctccacaccagagtacaatgtgaaaggcatcttctaccgcaagaagctgagccagcccatcactgtacaggtctggaaccaccgagtgctgaaggatgaatttctgggccaggtgcacctaaaggctgacccggacaacctccaggccctgcataccctccacctccgggaccgaaatagccggcagcccagcaacctgccaggcactgtggccgtgcacattctcagcagcacctccctcatggctgtctgacacctgcccacctacctggctctgaccgttcccaccaccatctgcatgtccccactgggcctgagtctagcctgggagccaggatactggggtccttttcccactcttccactgacttgctgtgtgaccttaggaagtctctgcccctctctcagcctcagtgtcccgagggccccgaagcattccattctcgtggaggagtttccttgctgagatttcaaatagtcctccccacctcaactgtcaccactgctaagggactctatccattgagcacattttcctaaggccctgctgtctgccgaggagcgccaagaagatgtcacttgtttacacacgaactgccacatccccaagctccgttcttgcccctcgtgtcctaggcccaacccagcctcccagacctcactttccccatcagcaatacctggtgttctcccaccttgaaaggactcttggctcctgccgggttcctgctcaggctggaattgggaaaatatgcaggtgacatttgttcattctctaatcccatcctctcacccatccatttcctcactcagtggagatttgccaaatgaataaacgacacctttgaggccccaggtgaagcggggccctactccgg

SEQ ID NO: 42 - DNA, 2621 bp, Homo sapiens
cctttgtggctgagccctgttcccacgctgtgcgagcactcccggcccagcttcaggcctgaggggtgggggtggcctgagtctccatggtgacatcagctgagctgcagactctgatgggtggcagctgtttagggggaagcccacccctgggcctgcaccgagcgggccttgccctggcctttggtggctcccctggcctctggaacccacagatggggctgcctcaagtcccaggttgaccaggggccctgcagaccgacctctgcctgttgcccccaagccctggtggggagtgctgtgacctgcatggtgctcccctgccaggtctccacgtgcagacgagctggtttggaagggctgcgtgggacgggccctggggtggctgactgcgcgtgtgcagggctgtggggcgcccgggggctgtgatggtcccctctgttgctgcttctacttcctctccccttgtcctgacgctggcacaggaaatgctgctttgggacctcccaccctctctccttagcgtccccagctgtgggtctggcttggagttggagggtgagcctctgctcttgggagcagtctgtttgcaaacagggacttcccccacgtcacggagtctccgcagctctcctcggttacgagggctggtttcaggctcccgctcttttagagctgaggcccgtcgggcggagagcgtcttgcccctgcctacctggaggcacaggggtggctgctggtggacactagggtgggcagagccgattgcctgcccaacccccgggcactcatgcaggagaggcctgtgtcggggtcacgtgcaggccttcccagcgtcctccctgcccgctcggtggatggcagcagtaagcagagccctggggaggctcgcagggctgctgtccctctggtcaggagaaggctggttctcggaggccacgtcagggccagggcctggcccagccccacatccagcagccccgtctgtgtcctcccagactccgccgtggtcatggaggagggaagtccgggcgaggttcctgtgctggtggagcccccagggttggaggacgttgaggcagcgctaggcatggacaggcgcacggatgcctacagcaggtcgtcctcagtctccagccaggaggagaagtcgctccacgcggaggagctggttggcaggggcatccccatcgagcgagtcgtctcctcggagggtggccggccctctgtggacctctccttccagccctcgcagcccctgagcaagtccagctcctctcccgagctgcagactctgcaggacatcctcggggaccctggggacaaggccgacgtgggccggctgagccctgaggttaaggcccggtcacagtcagggaccctggacggggaaagtgctgcctggtcggcctcgggcgaagacagtcggggccagcccgagggtcccttgccttccagctccccccgctcgcccagtggcctccggccccgaggttacaccatctccgactcggccccatcacgcaggggcaagagagtagagagggacgccttaaagagcagagccacagcctccaatgcagagaaagtgccaggcatcaaccccagtttcgtgttcctgcagctctaccattcccccttctttggcgacgagtcaaacaagccaatcctgctgcccaatgagtcacagtcctttgagcggtcggtgcagctcctcgaccagatcccatcatacgacacccacaagatcgccgtcctgtatgttggagaaggccagagcaacagcgagctcgccatcctgtccaatgagcatggctcctacaggtacacggagttcctgacgggcctgggccggctcatcgagctgaaggactgccagccggacaaggtgtacctgggaggcctggacgtgtgtggtgaggacggccagttcacctactgctggcacgatgacatcatgcaagccgtcttccacatcgccaccctgatgcctaccaaggacgtggacaagcaccgctgcgacaagaagcgccacctgggcaacgactttgtgtccattgtctacaatgactccggtgaggacttcaagcttggcaccatcaagggccagttcaactttgtccacgtgatcgtcaccccgctggactacgagtgcaacctggtgtccctgcagtgcaggaaagacatggagggccttgtggacaccagcgtggccaagatcgtgtctgaccgcaacctgcccttcgtggcccgccagatggccctgcacgcaaatatggcctcacaggtgcatcatagccgctccaaccccaccgatatctacccctccaagtggattgcccggctccgccacatcaagcggctccgccagcggatctgcgaggaagccgcctactccaaccccagcctacctctggtgcaccctccgtcccatagcaaagcccctgcacagactccagccgagcccacacctggctatgaggtgggccagcggaagcgcctcatctcctcggtggaggacttcaccgagtttgtgtgaggccggggccctccctcctgcactggccttggacggtattgcctgtcagtgaaataaataaagtcctgaccccagtgcacag

SEQ ID NO: 43 - DNA, 1989 bp, Homo sapiens
ctgggtgtcattcctgggcttcgcctctccctggtggatgtggccgcacgccaggatgggtgacagtggcacttgctcatgccgtccctccactgttgactccacccctgttcctgcgtgtcctcgaatgccagccctgagcagagtgcagagaggaagctgcagcgtccccctgcttggccatgtgtgtcttcaggggaggcagacagtgaagccgtgttttcatttaggatctatgggagggagagcagcccctagtgatcaagagagagacacgagggaaacacgtgcgggaggccacacatgcagggaggccagggaaagtggagagagactggaacccccaggccgaccctttattgggtccagggcgttctgcacacaggtttcccttggggagttttaactggtgggtttaatacaagcgggcacgagccccgtggggccacgctgtgactgtgggggactccgtggtgtggctgcacagtccatgtggggcgtggggtccgtggggacatggggggtggtcaccaggggacagtgcgtagggcgggcgtctgggtggatcagctcgaggaagggggatgtgaactgaaaattgttgcgggtggcagccccgcttctggtcagagaaagtccagcctagattcagagtggatgccgaggcggcctaagatgatgagcgttcctgcaagatgtaaagcactcgaggggcaggggtgctgcatcctacacagggtgggtctagagcagaagagcccgtggcgatttggggactcgcattggggcagggctgtgcacagggagcccgagggaggacagaggccagtgctcctcaaacctgatggcatgcacacgcatacacacgcatgcacgtgtcctgatggcacgcacacacatgcccacgcccatgcgtcctgatggcacgcacgtgcacacgcgtcctgatggcatgcacatacacatgcacacacacgtgtcctgatggcatgcagacacgcacatacatgcgtcctgatggcatacacacacacatgcacacaagtgcgtcctgatggcatgcacacactcagacacgcacacacgtgcgtcctgatggcatgcacacacatgcacacacgtgcgtcctgatggcatgcacacacacatgcacacacgtgcgtcctgatggcatgcacacactcagacacgcacacacgcgtcctgatggcatgcacacacacgtcaacgcatgcaggtgtggccagggagtcctggcttgtgcacttgtggtcctctggttggggttggccccaagctctgaatttccaaccaactccaggtgcagcctgggcagccagcgtgtgggcctcgggctggggcggggctgccatgaggcagctcatagagggcctgggagcagggccaggggaagccacacagggtgtgcggctctagattgatttgaaggtggggccaacaggatttgctcatggagtgggtgtgataccaggaggatggagttgccaagttgccatttggtggaagtggccggatttctgtcctggatgggggcgtctgggcgctgtgctgtggacggtcagtgtagtggcctggagtgtgcacagggcccgtgggtgcagggtgggggaagtggctgagcagccattgcagggctcctgatgggaggccgtgaaactagggcgaccccaggaggatgccaggactgagaggagagcaccctgtgcttgggtgggcgaagaggggctggctggagtgggaagagggggtggggagtggaggagctagaccagggtggggctttggagaggcggagccaggagtggccccttataaggctatgccgttgggtggtcagaaaccagtgggatggctgggcgaggtggctcacgcctataatcccagcaccttgggaggccgaggcgggcggatcatgaggtcaggagatagagaccatcctggctaacacggtgaaaccccgtctctact

SEQ ID NO: 44 - DNA, 2117 bp, Homo sapiens
ctttctcagcctccttagtagctgggattacaggcatgtgccaccataccctgctaattttcgtatttttagtagagatggggtttcgccacattggccaggctgacaggtgatccacccgccttggccttccaaagtgctgggatgacagatgtgaccaaaagccagccccactgtgagttgaactctttcgtgttgaccggccactctcctgtgctctggatgatgtcggaacacgacctggccgatgtggttcagattgcagtggaagacctgagccctgaccacccagttgttttggagaatcatgtagtgacagatgaagacgaacctgctttgaaacgccagcgactagaaatcaattgccaggatccatctataaagacaatctgcttgcggttggatagcattgaagccaaattgcaagccctggaggctacttgtaaatccttagaagaaaagctggatctggtcacgaacaagcagcacagccccatccaggttcccatggtggccggctcccctctcggggcaacccagacgtgcaacaaagtgcgatgcgtcgtcccccagactacagtaatactcaacaatgatcggcagaacgccattgtagccaagatggaagaccccttgagcaacagggcaccggattccctggaaaatgtcattagcaacgctgtgcctgggcgtcggcagaacaccattgtggtgaaggtgccgggccaagaagacagccaccacgaggacggggagagcggctcggaggccagcgactctgtgtccagctgtgggcaggcgggcagtcagagcatcgggagcaacgtcacgctcatcaccctgaactcggaagaggactaccccaatggcacctggctgggcgacgagaacaaccccgagatgcgggtacgctgcgccatcatcccctccgacatgctgcacatcagcaccaactgccgcacggccgagaagatggcgctaacgctgctggactacctcttccaccgcgaggtgcaggctgtgtccaacctctcggggcagggcaagcacgggaagaagcagctggacccgctcaccatctacggcatccggtgtcaccttttctataaatttggcatcacagaatccgactggtaccgaatcaagcagagcatcgactccaagtgccgcacggcgtggcggcgcaagcagcggggccagagcctggcggtcaagagcttctcgcggagaacgcccaactcgtcctcctactgcccttcagagccgatgatgagcaccccacctcctgccagcgagctcccgcagccacagccgcagccgcaggccctgcactacgcgctggccaacgcacagcaggtgcagatccaccagatcggagaagacggacaggtgcaagtaggacacctccacatcgcccaggtgccgcagggggagcaagtccagatcacgcaggacagcgagggcaacctccagatccatcacgtggggcaggacggtcagcttctagaggccacccgcatcccctgcctcctggccccatccgtcttcaaagccagcagtggccaggtgctgcagggtgcacagctgatcgccgtggcctcctcggaccccgcggcagcgggcgtggatgggtcgccactccagggcagcgacatccaggttcagtacgtgcagctggcgccagtgagtgaccacacggccggggcacagacggccgaagccctgcagcccacgctacagccggagatgcagctcgagcacggggccatccagattcagtgagcggtgcccatggcaccaggagcccctcgccggctccgcctacggcccggcccccacgcgccctgctctcacggcctcggcacaggcagcggctgcacgtgttctgctgaagtgcgtctgaaggccgctgcctccgcggggaacagcatcctatcaactgaaagagcagccgccgccgcccccagccggagacccctttcgtttgagtcctgctgttggtgtcggagcacgaggggaggcacggtgcggagagcgtcgcatatgcgcgggaaatcaggaactatgatatttttctgtttaaacagctttttttaatttgctatggtgtttataac

SEQ ID NO: 45 - DNA, 2516 bp, Homo sapiens
agtttcttgctcttcttcactataatggggtttgtcatcagctccccaaaatatgggaagcacagagcaggtggtggctgaaggtggggtatcctgtgaaaccatatttaagatcagagcccttggtccattgtgttgtaatcagctggctcaggaaagaacacctggctgtccagagctctacacctactgcactgggtgtgaaaggaggcctgagaacccatgggtcccaaacccaccccactccaaattatcatccagtattgagaactctgacaccaaattctcacggagcatatgtttatgcagttttacatttaatttctcattacattacaattgggaaactgaggccccagaagaggcagagactggtccagatctcaggaggtgggcaggctccagagcattagagagggctccagcttcctaggccttggctccgtcccacttatcaggtttgttttcgaaattagagtctgtagctacacattcaggagcacagaaaatgagcagattcagggttctgttcacatgggacctctccatgtcagtttcaagataacaggactggggttctgcatccagctctgagggcaactggaagtaaaatgagctatgctccacctcagcctaatgtagacagtgcctacaggaaagcctgttttcttcctcataaataggggtgcctgaagtgggtgaccttgatgatttcacatactcataagtgtctgccagcctggattcttgctctgagactgcaaaaatgcacccactctgcagatccttcaaatcagagggaggcatggccacttgagaggcatcttgggtagatgaagatgagacagagttaaatgtgccagagcactggactctgaggctgaggtccacggaaaatctcagctactgttgcgttcttaaggtcctcatttgaaagtggtagaaaataatttcactggataaggggaggatacctcatgagtaaatagcacaaccaaaaaggtggaggcaaagagagggcaaaacgggattcctaggtcactcattatacttggggccttcagatcctgctactttatcccctaggaccttgaagaaccagtgtcttgaggacagaaaaatcaaggtatcagatttgttcagtagtgctcctgcttggggctgtagggttagtgatggccaggaggtggttacagcctactgtgtttctgatgcccactgagctttgctggagcagctggaacaagtaacagtcacacacctcatgttgttatcagtgatgtccacattatcatgtggtcaaaaggggaagggatattagagatcccccatataatcacttagccagtcttttttcccttgcgctcaccatttgccagcgaccctggtgggtccaacatgtggtacagaaaactattacatcatgtctgcaccccccaacccaggaccaaacagtctgaggaccgctggacaaaagcactaaagcaagtatatgtgaaagaaaaaagcaaggactataatataaagtagattattgagaagaaaacctggaaaattattgcatgggaggacctcaggcctcactgaggtgacttttaatccatgatgaggatgacagcagggaggcatctgcacaagcatgtgtcagggagaagccacccttagtgaaaagactcataggtgtgagtttggcagaggtaaaaagggactagtttggctgcagacagcctgagaaagagataagcagagggatggagaatcctagggcctgggagatgaggttagatatctgctcctttctgacaacattgccctaaaagtcagcattttcaacaacatataatatctcataatgtgtgtggaccagaatctggacacagttcagctggctacctctgccttcaggtcttttatgagactgggggctgtggtcttaactgaagctggactgggaaagcatgagcctttaagctgactcatgtgaaaattgacagggtttagtgtggacagagagcctgactttccttctctctactcatctgagcaccgcctcaccctttgttatgtgggtctctacacggagcatctcatagcattggagcttgcttcctgtgtttgaggaatacaatagacagaattagacaaaaaggtttacacaaaaagagacagaaagatcgagggcgcaaacgagaaaaacccagtaggagaaaaattagagctttaaaaacatcttgacagggtgcggtggctcacacctgtaatcccagcactttgggatgctgagacgtgtggatcgcctgaggtcaagggtttgaaaccaacctggacaacatggtgaaaccaccgtctcttctaaaaatacaaaatgagcctgatgtggtggcgcatgcctgtaatcccagctacttgggagactgaggcaggagaatcaattgaacctgggaggcgaaggttccagtaagccgagatcacaccactgcactccagcctgggatacaagagtgaaactgtgtctc

SEQ ID NO: 46 - DNA, 3024 bp, Homo sapiens
atttcagtgtgcgatttcaattttccgtagcaaatgtatatatagaaaaatgttaaaatagatgtatttgaataccttaaaaaatacaagaaactggaagaaagataatattgcaaagcatctacatatatcctaggccttttgtgtacaaggttatttgtgacaattgtaaggtattatgaaggcaggtaggattatctccgttttacagatagggaagctgaggcctagaggtggaaacttgcccagtgatgtaagattcatctcccggttatgccctcctggaaagcccttcccaacatattatgttgtccatagagggaaaaatgagcaaagacagatggcttaactctggtgtgtgactaagatataggaaatttatagaggaggttctatcaatgtgccgacttactttgtgttttatgttctgagaacgattaccagccatctcaaattctgtggttgtcaaagctcccctggggttgttgctggttggcccccacttgctttgagactttgatgccagggcaggttgagaggaactgacttcagctgagtttgatcttggatctgggaaagagaaatgctttgaaaatcacggcaactctgggaagtttaaaagatattaatgcatcctggagagtttgaggctttgcagaaacttattggcagagcagaatgattctgaaaaatgctacatcagtgaggggatatttgataaggtattttctgccaactcgggtattcacttagcattgtttatcctttaagatatgtatacacatacttcctctgtgagtttaccctactaacaaagttttatccccagcctcaaccttgctttgggtctccaggcccaagtttctcaccatctcttggatgattgctccagcccactctgctgccacctgggatccaacatgttcaaacccagctgtgaacttcacagagtattaaaagaaagagcctttgcttcagcagtttatgttattaagacggaggcttgggtcatgttatctctctccaccaatgtgtaaggtgaaagtcctattaggtaagagtttttggaagacccgtgttttgtgctttttgggtttcagtatagggttttttcctacagggctagagggaaagtaccccagcatttccaaccagtggggtgcaaaattatttgggtctacagctttacctattcctttcaagaacatttttgaaaaaacacatctgttaagttgaaccatgtgtaactgctgaatgctgatgtttggccgttttctacttaaaaaaataggccagcagtttgtaaattcaagctaatatatgaactttttgaaaaagttgttcttggacactaaaaggtaagacggacgccagatttccagagcaaggggaggagagacccgagcaacatcacttccctgaagacctagctcctgcgcgcggccggggactgtgactccacatgccggcgttacttacccgggcccgcgcctgactcgccacacctcattttgcggccgccgtaaagcgcggatgcgcggcgtggccacgccccttcagtgcttgtgacgcaggcgccctgggctttttgggcgcgaaaaagaagcagtcctgggttgtacccggcgcagctgggagcggctgcttcctccggggtcgtatctccgcccggcatggggctgctggacctttgcgaggaagtgttcggcaccgccgacctttaccgggtgctgggcgtgcgacgcgaggcctccgacggcgaggtccgacgaggctaccacaaggtgtccctgcaggtacacccggaccgggtgggtgagggcgacaaggaggacgccacccgccgcttccagatcctgggaaaagtctattccgttctcagtgacagagaacagagagcagtgtacgatgagcagggaacagtggacgaggactctcctgtgctcacccaagaccgagactgggaggcgtattggcggctactctttaaaaagatatctttagaggacattcaagcttttgaaaagacatacaaaggttcggaagaagagctggctgatattaagcaggcctatctggacttcaagggtgacatggatcagatcatggagtctgtgctttgcgtgcagtacacagaggaacccaggataaggaatatcattcagcaagctattgacgccggagaggtcccatcctataatgcctttgtcaaagaatcgaaacaaaagatgaatgcaaggaaaaggagggctcaggaagaggccaaagaagcagaaatgagcagaaaggagttggggcttgatgaaggcgtggatagcctgaaggcagccattcagagcagacaaaaggatcggcaaaaggaaatggacaattttctggctcagatggaagcaaagtactgcaaatcttccaaaggaggagggaaaaaatctgctctcaagaaagaaaagaaataatggaatttttctcttcaaaggtccttaggtgtaaattgatgccatcgtaggcaaggtgcaggcaggatttgaaggcaaaagtcaattcagctcttgagaaaaggtgtctttccagcctgaatttttcagattgactagaccaagcagaatctctcaacctgatcttagtatttcctagaaagcacttgacattgtgtgaggtctcacctgaaggaacttggtggtgacatttgggagggtggagggaggcagtgtccttcctgacagcacttgcctccatggatcttctgtacacagaactcttatctaggatgtggttctgttcatgctgctttctgcgatgtgcgtgtctgttagaataggctctctacccagctagaacaccttccagacacttgctggacagctatcttccacatacttcccagtttacatttggtcttaatgatcttgaatagatcctctcttcattttactcagccaggttttgtactgatgtacaggtgttaaattacttcaagcatttttgtaagaggtgtatataattcaataaaaaaggtaaaacatg

SEQ ID NO: 47 - DNA, 2714 bp, Homo sapiens
gagaaattaatggaatgacaggtttaaatggatctatacaacaaataacggtgatatcgccattttcttttagtattggtgacaccacagaactggaaccatatttacatggaggcatagctgtccaagttaagactcctaaaacagttttttttgaatcactggagaggcagttaaaacatccaaagtgccttattgtggattttagcaaccctgaggcacctttagagattcacacagctatgcttgccttggaccagtttcaggagaaatacagtcgcaagccaaatgttggatgccaacaagattcagaagaactgttgaaactagcaacatctataagtgaaaccttggaagagaagcctgatgtaaatgctgacattgtgcattggctctcttggactgcccaaggctttttatctccacttgctgcagcagtaggaggtgttgccagccaagaagtattgaaagctgtaacaggaaaattttctcctttgtgccagtggttatatcttgaagcagcagatattgttgaatcactaggcaaacctgaatgtgaagaatttctcccacgaggagatagatatgatgccttaagagcttgcattggagacactttgtgtcagaaactgcaaaatttaaacatcttcttagtagggtgtggagccataggctgtgaaatgttgaaaaattttgctttacttggtgttggcacaagcaaagagaaaggaatgattacagttacagatcctgacttgatagagaaatccaacttaaatagacagttcctatttcgtcctcatcacatacagaaacctaaaagctacactgctgctgatgctactctgaaaataaattctcaaataaagatagatgcacacctgaacaaagtatgtccaaccactgagaccatttacaatgatgagttctatactaaacaagatgtaattattacagcattagataatgtggaagccaggagatacgtagacagtcgttgcttagcaaatctaaggcctcttttagattctggaacaatgggcactaagggacacactgaagttattgtaccgcatttgactgagtcttacaatagtcatcgggatcccccagaagaggaaataccattttgtactctaaaatcctttccagctgctattgaacataccatacagtgggcaagagataagtttgaaagttccttttcccacaaaccttcattgtttaacaaattttggcaaacctattcatctgcagaagaagtcttacagaagatacagagtggacacagtttagaaggctgttttcaagtcataaagttacttagcagaagacctagaaattggtcccagtgtgtagaattagcaagattaaagtttgaaaaatattttaaccataaggctcttcagcttcttcactgtttccctctggacatacgattaaaagatggcagtttattttggcagtcaccaaagaggccaccctctccaataaaatttgatttaaatgagcctttgcacctcagtttccttcagaatgctgcaaaactatatgctacagtatattgtattccatttgcagaagaggacttatcagcagatgccctcttgaatattctttcagaagtaaagattcaggaattcaagccttccaataaggttgttcaaacagatgaaactgcaaggaaaccagaccatgttcctattagcagtgaagatgagaggaatgcaattttccaactagaaaaggctattttatctaatgaagccaccaaaagtgaccttcagatggcagtgctttcatttgaaaaagatgatgatcataatggacacatagatttcatcacagctgcatcaaatcttcgtgccaaaatgtacagcattgaaccagctgaccgtttcaaaacaaagcgcatagctggtaaaattatacctgctatagcaacaaccactgctacagtttctggcttggttgccttggagatgatcaaagtaactggtggctatccatttgaagcttacaaaaattgttttcttaacttagccattccaattgtagtatttacagagacaactgaagtaaggaaaactaaaatcagaaatggaatatcatttacaatttgggatcgatggaccgtacatggaaaagaagatttcaccctcttggatttcataaatgcagtcaaagagaagtatggaattgagccaacaatggtggtacagggagtcaaaatgctttatgttcctgtaatgcctggtcatgcaaaaagattgaagttaacaatgcataaacttgtaaaacctactactgaaaagaaatatgtggatcttactgtgtcatttgctccagacattgatggagatgaagatttgccgggacctccagtaagatactacttcagtcatgacactgattaatacaagttgtcttaacgttactccaggaccacttgattttggaaagagtgcacttaattcagaagctaaagaaaatcagttcataatactatggatttctctttcattaagccttaattttaagggaaacatcagtaagaaactgcactgaagaattataaaacattttggggcatagcatacacttgtctaacggttcacacgtggctatgatcacaagcaactttgaactggaatgctatttacaaaagttttgtgtattaatctgtgtattaatctctctggataaaaaaaagg

SEQ ID NO: 48 - DNA, 2454 bp, Homo sapiens
atttgaggccgttaggaaaagctgatgttgtgcagtgccaaactaccacacgcttcctccttcggatgaatccctggaaagcagagaggcagctcgctacgtgaccatcatgctttttacctcactgagctgttgtcaagagagggcggggatggcgggcagctcacgtcgtgccctccgcagcaataaaaactggagcgggagaagaaatgcaagacatcgctgtctgttttgcaagcctctggctgctctcagcaaactctgcccggcgcggctggtgactttgcggtgtgaacgcagccggtcgtgctcgggataatgggaccgagctggcggcatcgccctcccgtgggcccctcttgccacacagatgcgcagctctccaaaaggaaaatgtggcccagcaaccctcgcctagccctagtcctaggaatgcatgcctggggcctttggaagcctctcaaagggctggggggcggggggggggatataatgggccgaacctctggattcattttggggaagaggagacaggttcttgccccactactgaggcaaggccaacagcaccctgccctgctgctccaccgcctccccgcgggtcaagtctcagccgagtgtcgctgcccacctgaaggtgacacctgtccattttagtcagcatcacatgcgccttccctttctcccctttggggtctgtccgttttctcctcctgtcctaaagagccagcttggaactgaaggggccgggtagcagctgtttgtgcctcttgcccgtgcagactcgagggtctccgcagccacttcctcctttaacacgcgaggctttcaggcgtgcagaaggggaccgccgggtcaggcaggtattaggctctccaaggacacttgtggacatcactggagtttacctattgtttggactttattacatctgctttagcaaacggaggcatgagcggccttcaaacccagttgctgccccggctgcaacctctcccactcaagagaccctaggaacgatgaggaacggggtagaaatgaccaggggagccaaatctcaggtaccgagaccttccagctcacccctcaggctcaggaaagccaataacccacatatgcccaaaaggagcttatgtctcaactgagaacagcaaataggtgatgggccactttagaacagaggctaaaggctggtagccactgagcaaaacccaaattctaggcacctgaggtgtttcccttacacaagtgccttcacaggtagcaagcaattaatctgcaacagtgaacaacactaaaacttaaattttacatggaagtctctcaagtagacaaagttattattgggtggggttttccccccactggcaaaaaaataacttatcccttggctgttagattgagggaactataaaacaaatattttaattcgatcactgacaaagtcataaaattcaatgactgtttgtagaggaaaacatgctttcattatcttaattaaagcaagataagcctctctcaatgtgcatgcattttggagccactgaatggactggtgatgagacgaagcaacctttaattgggaccatgcttctccagtacattcgtttgtattccatggtgtaaaccgggccttacgcgtggctccgaccttcggtggaaatgcatttgcgtagcaccacccaggggctcccttgctttggctagagcctcataaaagaccccaggttttgcgaaggattttgaacaccagcgtcttttaacatgtggaactttcggttttggtttagctctgtgaacgtatttaaaacttgctacattattccacagtgaaagttggaacctttttaagagttatcatagagtgccttttaacatctgtcatattttctataaacaacttttcagtgagaagcgtatacagtgtactcgaggtaggcattagctgctggcaaggtttatgatacaatagtgacactacaggacaattttttagtcaaacaacacccgttagatatttcagggtccagcttatatgttaacttgtaaatataggttaaaaatataggtatcaagtgactaaattcagtatcagacaaattgaacatctttttatttcccagaagtgccctactctttctcctccctttggtgacctcttagtctggaatgctctgcatccggggcccctggaacacatagtttttaaagtacctattagtgatactctcctcccgttggcagtgcttccactgtgttttctgcatgtaataaaggatggcactgttttttgcataggtctttcctaatagctgagcactcttggagtgtaggggctcaaccttatgcctctttggacacacaagcctagcccatgggctggcatataggagctgctcaataaatgtttgttgaacgaatgagtggatacacgaataaaatattttcattgtc

SEQ ID NO: 49 - DNA, 2961 bp, Homo sapiens
ctagaggagtcacgctacagggcaggtctctcttcctctcctgctttaacaaccgatgtattctttctcctcctatatttaactacttaagggagtatttattcaaagcgattaaaactggctcaagaaaaaagaaaagaaagaaagaaactccttccccaattccaaaagacggaaacttggtgcgactgagtcggtttgggaactcctgagctccggacacaaatgagggccagctggagactcccggaaaaggtaaaaccacacgaacttaaatttcttcaatgaaagaggcggacctacagcggctatttcaccgcccccaagtccccacgccctccagggctgtactgcaggaggcactggcaggccgcgcccctagctgccccctccccgcgccgccgtccaggccccaaacgcctcccccgaaaaccccggttaacagcggctcccgcccaagcaggggtcggggaggcgggcgaggccggcaagcgggggcagtgcaaccattttcaccagccataaacatcctgggactaggaggcgctgccaattccacgctctggctggccgaccggtcggggcctcagctccccgccttcccgcctcgagcagtgaaacccggccgcagctttttctcggtaggggccgaaggctacgctgcccctcccccgcagcggacactaaggggtcaccggctagaggcagacccgtgcaccggcgcgggagtcccaagggagggcaccgacccttcccgtacatattctcgccccgcctgccctgcgctcctcagaagcccaaattccgcctccgagaccacacagcgggccagcgagagcgggaaacacactcatccagggggtcgccggaagcccaaccccgcccctcctcaagccgccagcgagacccaccttcctcttcctttagcagctgggaaattgggggcgtttatggcgccccgggaagaaggctcgcaggctgaaagtcacctctgaggcgcccttctctctctctctcttccctcacacatgcacaccttgagcccctccctaacggtcgcagcccagctgctaacccccccttgtccacccgtcagccggctcccgacacccacagcccctactttctcctaaacacctcccctccccctccattcggagcagccccttcaatgcggaaatgtccctgccgcacggaccgacaggcgcagccgccagtcaggagccgaggcggacgcaggctctggccaatgagacgtgtggaggtggcaaggggcggggcgttgcggcacttgagagcccgtcggagttgggcactgagcagtacgcggggataccgcgcgtgggagcagcacttacggcggcgttgcggccagggaagcctcgccagtatatctcagtgagggagagcacctgagcacgactggttatttttccaatcagtaaaaatattcccgctgactagggactaaagaaagccctgcggatagagccggagctccccaccgcagctgccccgagggagcccagacgcttctcaggggacgcttgctcccctcatcacatctggttgggggagggtgaggatgcgttagggagtaggcattggcctgtgtgggccagctaacaaaaggagggtttaggcattgaagaaagtgacaagtgaaggctccctcaccggaaccaccaccatccccattgccccggttcctaatcctgtagagctgctgtgataggcgtttacttttctcttcaacgtggaactggcctaagttactcctcaagagatgcttttcttttggtagattcttgaagtcctcaaggaaagaggatgttacacggaacttgacactagcctggggactgttacagggccagcccacggcttgtcaaatcacacctggtaccgtcaaccccacctgcatctaagactcagtgtgcctggcagcgagtgcatttcagactttgcatttccactttaagactcaaatagcccgcaccagggcagatgatttgccagcgccttctcttaagtgccttcaataaacaagtacggtaattacagaagagtttgaggctttgggcagcactaatcaaccaaggtaaagtgagaattttttaatgactcattgtctaaacaaaggaactttgattttttggttctacgtctttatatggaaatgttattagaacaaacaacacagaaaaggctagtgaaaaattgttatactagagaatgacaaccattggtactgtgtttcttacatgaaatccaaaaagattacactcaaaaacctctcggccgtaaaacgaattttccccagacaaaacaagtgtctaaaatccagatgtctacagtttaataacagcatttggagactgaagatcttaacaatctctacatcctttgtatacagtacaaaaattgttccagcactgaaaaagcagtctttaccaatgagcattagtaccaaaataaaatactaccgaaagatttgggccacgtagggttacttagcctgcaaaagatgaaggacaatgaagagatttatttgttgttgttgttttgtttttgtttttgttttgagacggagtcttgctctgtcgcccaggctggagtgcaatggcacagtctaggctcactgcaacctccgcctcccgggttcaagcgattctcctgccttagcctctcgagtagctggggccgcaggctcgtgccaccgcacctggctaatgtttgtatttttagtagaggcggggtttcgccatgttggccaggctggtctcaaacccctgaccttgtgatccgcctgcctcagcctcccaaagtgctgggattacaggcgtgagccaccgcgcctggcgagtttttaattatacaaggtttattataagaaacgatgatcagttactgtattttctgccttcatggaagattaaaaaggaaatgggttttaattgc

SEQ ID NO: 50 - DNA, 2171 bp, Homo sapiens
attggaattcggaaggacaggcaggccgggcggactggagacggcggctcgccttgggaccctctgagcttgcgggccccgctgagcacccaaaggccggccctagagtccaggagaagagcgcagcggcgcggagctcccaggcgttccccgcagcgcgtcctcggtcctggaaccaccgcgccgcgcgtcctggcttccacatctgccccatttgcccgcggatcttgactttttcttggcgggcaaggcctcggtctcctccccgcagcagggctgcccgcggctgcgggaccctcctggtcctgatgcctggcagaatcgaaggggtgctggaccagggactgagcgtcccccggagagggtccggtgtgaccccgacaagaagcagaaatggggaagaaactggatctttccaagctcactgatgaagaggcccagcatgtcttggaagttgttcaacgagattttgacctccgaaggaaagaagaggaacggctagaggcgttgaagggcaagattaagaaggaaagctccaagagggagctgctttccgacactgcccatctgaacgagacccactgcgcccgctgcctgcagccctaccagctgcttgtgaatagcaaaaggcagtgcctggaatgtggcctcttcacctgcaaaagctgtggccgcgtccacccggaggagcagggctggatctgtgacccctgccatctggccagagtcgtgaagatcggctcactggagtggtactatgagcatgtgaaagcccgcttcaagaggttcggaagtgccaaggtcatccggtccctccacaggcggctgcagggtggagctgggcctgaactgatatctgaagagagaagtggagacagcgaccagacagatgaggatggagaacctggctcagaggcccaggcccaggcccagccctttggcagcaaaaaaaagcgcctcctctccgtccacgacttcgacttcgagggagactcagatgactccactcagcctcaaggtcactccctgcacctgtcctcagtccctgaggccagggacagcccacagggtctaggtgctggagcgcgcacggaggccgatgtagaggaggaggccctgaggaggaagctggaggagctgaccagcaacgtcagtgaccaggagacctcgtccgaggaggaggaggccaaggacgaaaaggcagagcccaacagggacaaatcagttgggcctctcccccaggcggacccggaggtgggcacggctgcccatcaaaccaacagacaggaaaaaagcccccaggaccctggggactccgtccagtacaacaggaccacagatgaggagctgtcagagctggaggacagagtggcagtgacggcctcagaagtccagcaggcagagagcgaggtttcagacattgaatccaggattgcagccctgagggccgcagggctcacggtgaagccctcgggaaagccccggaggaagtcaaacctcccgatatttctccctcgagtggctgggaaacttggcaagagaccagaggacccaaatgcagacccttcaagtgaggccaaggcaatggctgtgccctatcttctgagaagaaagttcagtaattccctgaaaagtcaaggtaaagatgatgattcttttgatcggaaatcagtgtaccgaggctcgctgacacagagaaaccccaacgcgaggaaaggaatggccagccacaccttcgcgaaacctgtggtggcccaccagtcctaacgggacaggacagagagacagagcagccctgcactgttttccctccaccacagccatcctgtccctcattggctctgtgctttccactgtacacagtcaccgtcccaatgagaaacaagaaggagcaccctccacatggactcccacctgcaagtggacagcgacattcagtcctgcactgctcacctgggtttactgatgactcctggctgccccaccatcctctctgatctgtgagaaacggctaagctgctgtgacttccctttaggacaatgttgtgtaaatctttgaaggacacaccgaagacctttatactgtgatcttttacccctttcactcttggctttcttatgttgctttcatgaatggaatggaaaaaagatgactcagttaaggcaccagc

SEQ ID NO: 51 - DNA, 2269 bp, Homo sapiens
ctatcgcacgtctgctgcagcagtctcctgtttctcctcctaccttctccatttttctagtccctgcagggcataattggaatatcatttggagaaagtgtcatggaagttctgcgtccacagcttataagaattgatggccggaattacaggaagaatccagtccaagaacagacctatcaacatgaagaagatgaagaggacttctatcaaggctccatggagtgtgctgatgagccctgtgatgcctacgaggtggagcagaccccacaaggattccggtctactttgagggcccccagcttgctctataatctcattcacttgaacacatcaaacgactgtgggttccagaagataactttggattgtcagaatatttatacttggaagtccaggcatatagttggaaagagaggggacactaggaagaaaatagaaatggagaccaaaacttctattagcattcctaaacctggacaagacggggaaattgtaatcactggccagcatcgaaatggtgtaatttcagcccgaacacggattgatgttcttttggacacttttcgaagaaagcagcccttcactcacttccttgcctttttcctcaatgaagttgaggttcaggaaggattcctgagattccaggaggaagtactggcgaagtgctccatggatcatggggttgacagcagcattttccagaatcctaaaaagcttcatctaactattgggatgttggtgcttttgagtgaggaagagatccagcagacatgtgagatgctacagcagtgtaaagaggaattcattaatgatatttctgggggtaaacccctagaagtggagatggcagggatagaatacatgaatgatgatcctggcatggtggatgttctttacgccaaagtccatatgaaagatggctccaacaggctacaagaattagttgatcgagtgctggaacgttttcaggcatctggactaatagtgaaagagtggaatagtgtgaaactgcatgctacagttatgaatacactattcaggaaagaccccaatgctgaaggcaggtacaatctctacacagcggaaggcaaatatatcttcaaggaaagagaatcatttgatggccgaaatattttaaagagctttgccttgttgcccaggctggagtacaatgatgcaatctccgctcactgcaacctgtgcctcccgggttcaagtgattctcctgcctcagcctcccaagtagctgggattacaggtgtctctgatgcatattctcagagcctaccaggaaaatcctagaatcgagaagggcttgggacacagagagctagtggttgtttgagaacttctactttggctccctaaagctgaattcaattcacatctctcagaggttcaccgtagacagctttggaaactacgcttcctgtggacaaattgacttctcctgaggtggatcttggaaagcactagaaactaaacatcttcaccaggtgctgaagaaaagtgtcttcgttttaattgccaagcagggatgtggacatttggatggtgacttccctgggtggttccccatagattcaccattgcctctaatggtgtctacacccgtcatactaccagctgagatggtggtgggcataaggagaatttgtgcctataacccttagtgtgttctggttttttttcttttaatttttaaattgtcgtaaaatactcataaaacatactgtcttcaccatttttaagtgcacagttcagtaacgttaactgttaatacattcataatgctgtgtggccgtcaccgccgtccatctccataggcttctcagcttgtaaaatggaaactgtacccattaaacagtaattcccactcctcccagcccccgcagccaccattctgctttctgtctctctggttttgactattctcagtatctcatataagtggaatcatacagtgacttgtctttttgtgactggcttatttcacttagcataatgtcctcaaggttcatccatgttgtgtcaggtgacaggatttccttcctgtattatacatataatggaatgttccgttacatgtgcgtaccacactctgttcctccatcagtgaacacttggcttgcttcctcttgactattgggagtagtgctaatacagacacgggggtgcaaatatctctttgagactctgcctttaattcctttaccacccagagttttatctttagcaaaataaccattaaagttgtttgcctttt

SEQ ID NO: 52 - DNA, 2577 bp, Homo sapiens
tatattccttgggagcagagatgatactaatttatcttactatctccagtacctagcacagagtgtgtactctaaaaaaaatgtttttgatgtactaatatgtaaattagtacatattagggcaaggttgttttttttttttcactgatgaatccatagtccagaatagtgtctaacacttaataggtgctcagtagacatttgttgaatgaatgaaatcaatgaataagtaaatgaaggaatggagaaaatttaaatctttgtggcaaatatcagtagcccagagaaagaaaatatatgctagtttgaatagaaattatttttcctattatgtccaatttacagaatgatcaagtctcggcctctggattatacctttgttcctcgaacttggatctttcctgctgaatatactcaattccaaaattatgtgaaagaattgaagaaaaaacggaagcagaaaacttttatagtgaaaccagctaatggtgcaatgggtcatgggatttctttgataagaaatggtgacaaacttccatctcaggatcatttgattgttcaagaatacattgaaaagcctttcctaatggaaggttacaagtttgacttacgaatttatattctggttacatcgtgtgatccactaaaaatatttctctaccatgatgggcttgtgcgaatgggtacagagaagtacattccacctaatgagtccaatttgacccagttatacatgcatctgacaaactactccgtgaacaagcataatgagcattttgaacgggatgaaactgagaacaaaggcagcaaacgttccatcaaatggtttacagaattccttcaagcaaatcaacatgatgttgctaagttttggagtgatatttcagaattggtggtaaagaccctgattgtagcagaacctcatgtcctgcatgcctatcgaatgtgtagacctggtcaacctccaggaagcgaaagtgtctgctttgaagtcctgggatttgatattttgttggatagaaaactaaagccatggcttctggagattaaccgagccccaagctttggaactgatcagaaaatagactatgatgtaaaaaggggagtgctgctaaatgcgttgaagctactaaacataaggaccagtgacaaaagaagaaacttggccaaacaaaaagctgaggctcaaaggaggctctatggtcaaaattcaattaaaaggctcttaccaggctcctcagactgggaacagcagagacaccagttggagaggcggaaagaagagttgaaagagagactcgctcaagtacgaaagcagatctcacgagaagaacatgaaaatcgacatatggggaattatagacgaatttatcctcctgaagataaagcattacttgaaaagtatgaaaatttgttagctgttgcctttcagaccttcctttcaggaagagcagcttcattccagcgagagttgaataatcctttgaaaaggatgaaggaagaagatattttggatcttctggagcaatgtgaaattgatgatgaaaagttgatgggaaaaactaccaagactcgaggaccaaagcctctgtgttctatgcctgagagtactgagataatgaaaagaccaaagtactgcagcagtgacagcagttatgatagtagcagcagctcttcagaatctgacgaaaatgaaaaagaagagtaccaaaataagaaaagagaaaagcaagttacatataatcttaaaccctccaaccactacaaattaattcaacaacccagctccataagacgttcagtcagctgccctcggtccatctctgctcaatcaccttccagtggggacacccgcccattttctgctcaacaaatgatatctgtgtcacggccaacttctgcatctcggtcacattccttaaaccgtgcttcctcctacatgaggcatctgcctcacagtaatgatgcctgctctaccaactctcaagtgattatactggcacaatgaaataagaccccctccaaatatctgtattctttcaaatttaagagtgagtctttgcggcaactgaaaacaaaagaacaagaagatgatctaacaagtcagaccttatttgttctcaaagacatgaagatccggtttccaggaaagtcagatgcagaatcagaacttctgatagaagatatcattgataactggaagtatcataaaaccaaagtggcttcatattggctcataaaattggactctgtaaaacaacgaaaagttttggacatagtgaaaacaagtattcgtacagttcttccacgcatctggaaggtgcctgatgttgaagaagtaaatttatatcggattttcaaccgggtttttaatcgcttactctggagtcgtggccaagggctgtggaactgtttctgtgattcaggatcctcttgggagagtatattcaataaaagcccggaggtggtgactcctttgcagctccagtgttgccagcgcctagtggagctttgtaaacagtgcctgctagtggtttacaaatatgcaacttttataccagagtaaaatttgtattt

SEQ ID NO: 53 - DNA, 2500 bp, Homo sapiens
aattcaacctcagacataaacaccccatttctgtaaacccaaattatatggtttcttctgcgaaagagtaaggtgtgtgcttttttttttttgcaatatggccccgtctctctgaagtgggacattcggacggatggagccctcagcgtgtcttttcagcaggagcagaaccgatgagagccgcccttaccgttggtctccggatcccccagtcccatcccgccgttttcggctgtcttcctaaccgtcctgtcttctcttggcgctctttccttccacctttcccaagagtcctggttgcacgttttaagtcatatattttcgtccccctgaaaatgatggcaagcccagtttctcctgagcattcagacccccaggccccagcacttggcgttttcaggaggccctgttcttagagcccctgacaaaggcagcacttatttcctgggctggtgcgccccaaaacacggccccgacacttagtgtggccccaggccccagcgagcctcgccctcccagttttgctctgcccagcagtgttggtgcccagagatgacaagggccagggagcctggcccgggtgtgagaattcagagattctggcctccagctgtcaccacaccgtaacggggccatgtaactgtgcagcatggacagggatgcgacggggcagctggctgtgtccatggccaggtggccagggtcagggctgcaagccaggggtccagggcccttccgttcagcccaaatgctgccccaatgctaactccttggattgtcaacccccatcccccaaatggagattccgaaggaggcctcctcgcacctgccctccgctgctcctcagaccccagcccccagcgagccgacgtccccacccgttcctgctctcatccccaggttgggcacgtggggttcctcctctgtgggcctggcagacccttcatgagtgggacccaagatatcactgacttcaacccagaggatcgagcccctgcaccctgcctggggccctggggtgtggagcagtggctggggtgggcgtggtgtggcctgagagactgcctagctggagaggccttcctttacaaggccacgcgtgcagctgtcccatccagaccccgactggccaagacctccacgtccccagagtccagccctggaaattccaagggccctggcgtcctctgccttccccgcttccccgtgagcgtctgcaaaacacttgcctgaatacatatcacgtattttagactcgaagcctcgaagcactggattgtggtcccctgccccctctgtcccgtccccctgcccaagtgactgaaacctactgagctatattcactgtgctgtcctagggggagggagagcagagctcgcccctgcactgcagccttgtgggggagggcaaggctctcctcccagccagggacgccaggacatagctgctcctggtcagtggaggtcagccgggtatcaaaagccatgaaactgtgtctctgtagcaatgagtgatactgtgacaaaaccatccttgcattcttcctagaagagttcctctgctccttccattccatttttgtgtttgttttgttcttttctgtcactgatccgtattaccacttttggaaaaaaataaataaataaataaataaaaggcagcttgagtttccaaacgtgtgattcacttgtgaacaaaagtcattctaacaattgccttcagcgtcacgtgcattgccactgcgctttcggcacgagggatgctgagccctggtgtcagagtcgtaatttaaagcgtgtgtgtatatggactttgtcccttaaggtcgatataaagaatcctcgcagaatcacagacctgtgccgcccgccaccttctgccattgttacattacagatttggtttagtttcgttttgttttgttttttctcttagaactgtatagtattgaaaaagaaatcaaatgtaaatgtctggttttcatataatgtttaaaaagaccattgagaaggaggctggcgctcgccccatgtcccccttgattgtaaattgcttctgttctgtttataagtaaactgtgcatgactcctgcttagcggtcattatcgtgtctgttggtgaaatttttattaaaaggaaaattctgtagatgcacttattgaatatgtgattaggatctacgtctgagactaggagtcctgaactgctgacgcgaaagaggcgcagttcccaattaatacggaaatcgctgtgggagaagaatgaaataagacgtgaagtgtaggaaatcatgaaaagaacaattttgcaaattgcattctgatgcttgtgatgaacacaaatgtacttgtgtagagacatttccttaagagaaagcctaggagaagccgatttggaggttaatgctgtagaataggactgtataccaaatgtaatctttccaatgctccaatgaatttatacatgagattgatatgcaataaatctgtgtgcttttct

SEQ ID NO: 54 - DNA, 2506 bp, Homo sapiens
ttttccggcctgggggcagggcctcgggttcctgcatcgggcctgagcagaactaggcgcgccgcggcccggcacgcgcaggcgtacagagctccccgggggtgccagttcctctccgattccctgcttctgtcaccttcctcacggaccttggtcacggccgcaggtgaccccttagcccagctccagtgggcgggtggcagggtcatggaggacgctggcggcggcgaggagcaggggttgctcttccaggaggaaaccatcgatcttggcggagatgagtttggatccgaagagaacgagaccgcatcggaaggctcgagtcctctcgcggacaagctgaacgaacacatgatggagagcgtcctcatctctgactcccccaacagcgagggcgacgcgggcgacctgggccgagtgcgggacgaagctgagcccggaggggaaggcgacccaggcccggagcccgcgggcaccccgagtcccagcggcgaggccgacggcgactgtgcccccgaggacgcggcacccagtagcggaggggccccgaggcaggacgcggcccgcgaggtcccaggcagcgaagccgcgcgcccggagcaggagcctcccgttgcggagccggtcccggtgtgcaccatcttcagccagcgcgcgcccccagcctccggggacggcttcgagccgcagatggtgaagtcgcccagcttcggtggcgccagcgaggcctcggccaggacaccgccccaggtcgtgcagcccagccccagcctcagcacgttcttcggagacacggccgccagccactccttggcctcggacttcttcgactcctttactacctccgccttcatttccgtcagcaatcccggcgcgggctccccggcccccgccagcccgcctcccctcgctgtgcccgggaccgaggggcgccccgaacccgtggccatgcgagggccccaggcagctgcgcccccggcgtcgccagagcctttcgcgcacatccaggcagtgtttgcagggagtgacgacccctttgccaccgccctgagcatgagcgagatggaccggaggaacgacgcctggcttcccggcgaggctacgcgtggagtcctgcgggccgtggccacccagcagcgcggcgccgtgttcgtggacaaggagaacctcaccatgccgggcctcaggttcgacaacatccagggagatgcagttaaagacttgatgcttcgctttctgggtgaaaaagctgcagcaaggagacaagtcctaaatgccgactcagtggaacaatcttttgttggattgaaacagctaatcagctgcagaaactggagggcagcagtggacctgtgcggacgtctcctcacagcccacggccagggctacggcaagagcgggctgctcaccagccacacgacagattcactgcagctctggtttgtcaggctggcactactagtgaagttgggccttttccagaatgctgagatggaatttgaacccttcggaaatcttgatcagccagatctttattacgagtactacccgcacgtgtaccctgggcgcaggggctccatggtccccttctcgatgcgcatcttgcacgcggagcttcagcagtacctggggaacccacaggagtcgctggatagactgcacaaggtgaagactgtctgcagcaagatcctggccaatttggagcaaggcttagcagaagacggcggcatgagcagcgtgactcaggagggcagacaaggctgctcttaccttgtagcctctatccggctgtgggggtcacgtctgggccgggtgatgtactccatggcaaactgtctgctcctgatgaaggattatgtgctggccgtggaggcgtatcattcggttatcaagtattacccagagcaagagccccagctgctcagcggcatcggccggatttccctccagattggagacataaaaacagctgaaaagtattttcaagacgttgagaaagtaacacagaaattagatggactacagggtaaaatcatggttttgatgaacagcgcgttccttcacctcgggcagaataactttgcagaagcccacaggttcttcacagagatcttaaggatggatccaagaaacgcagtgcagatgctgtcggcctcgcatcctacaggaaaggaaccatcgccaaaagacgctgaggaacatcccgagggtcacagggacagtgcagagccaggaccagcccggcccatggtcccccagcgtgcaccacctggcccggcactgtgtgctcagccatgaggactgggaagagtcctgcccacagctcaagtgtctacaccgcactgccatccaggctgtgagccgctgctgagcatggggagtgtggctgctgcagagacgttatgaaacacttctaaaagaatgtaaaagatctcattaataattttgagtacctgttaaaatgatagtaattttggatctagtagattaaataaaacatattatt

SEQ ID NO: 55 - DNA, 2638 bp, Homo sapiens
agctatatgtcctctcatgttgaaatggacaaagaagcttcatttggcctctttcataagtgcactaatcccaatcaggttggctttgccattacctttcaaaggtcccaccccttaattctagtgcattggagactcggtttcaacaggcacattttgcagggggtccggcagggaacagatattcagactgtagcagaagagttctggagtcttacgactgggcctcattgtttaagtgagtctctgcttttggactatgaacttcacatgtgtttctctgtttttatcttcccctttagggatgactggagtaggctggagttgggaatttcccttccagcaggtcatttaggatctggttatatgagagcaggttaggctgaggttcagtaatttctcctgaggataagccttgttaagaacaggttgctctggcatattttaagatggttttcctttttccttcccaaaggtggaagcaagaagcaagttttctcaggtatttgccacaggagcctggtggagctccaggaggtaaattttacaatattatgctccctcataactggatctccctggtgtttttacctccttgagttgtccatatggaaccttcagcaattcaccagttatagttcaagattttctactccagcactggttcctaaggtagtttcagtagtgagtctctgttcctgtaagccataaattcccatattcacttctctatctctccaatcttgggggcagtggtttgccctatgtcctctcttcacattcaaatccaaaaaggattgttgatttttcagtctcttcagcttttgttttattaaaattttttttttagagttgggggtctcactatgttgcacaggctggtctcaaactcctggactcaagggatcctcctgctttggcctcccaaagtgctgggattacaggcatgagccaccacacctgaccttttcagcttttcatgtgttgttaagatggactgattacttccattcttttttttttttcttcctttttttgagatggactctcactttgttgctcaggctggagtacagtggtgcaatctcagctcaccttaacatctggctcccaggttcaagtgattctccctgcctcaacctcctgagtacctgagattacaggcacccaccaccatgctggctaatttttgtattattattattttattttttaattttttgaggcagagctcactctgtcatccaggctgtagtgcagtggcatgatcttggctcactgcaacctccacctcccaggttcaagcaattcttctgcttcagcctcccaagtagctggtactactggcacacaccaccacacttcgctaatatttgtatttttagtagagatggggttttgccatgtgggccaggttggtctcaaactcctgacttcatgtgatccacccacctcaagctcccgaagtgctggggttacaggtgtgagcctccatgcccagcctaatttttgtatttttagtagagacagggttttgccatgttgaccaggttggtcttgaacttctgacttcaggtgatctgcccacctcagtctcccaaagtgctgggattacaggcatgagccactgcacctggctacttctaagcttcttacatgcagaaatcagaacctggaatctgtttctaagacttatcttcttaatgcctatgtggacaattaaaggatttttctcctcaggactctgaatatgatgaattgtattagtagactttctaatattgagcttttcttaatttgtgaaataaactcagaaagttccttcttggttttaacagtctatttctgtttgtaaatattagtatttctgtggattctgtacttgttccttgttatcctttcattctcttaggttcatttggtctgatggattcaggtaccattgaaattctgatagtttcaaaatcttttatctccaggtttgatctctcttgtgaactctggaactgtattcccaattgtcaattggacatccctacgtatgggacctcagatatttcaaacatgatgtgtccaagtctgtatcacttctggccatcatattgttcttttatttttccaaatttcacatcaccagtaacaaactagctgtgatcatggcagatagcctggaaataaaactcccctttttaccctttgcacagcaaattgacatcaaatcctgtttctactttttttttttttttaactattgcttccctattctgtattctcactgctccatcttctgatgtaggaggtcatctgttttcctcttttcctctcctctgactcttaagccctttcccattctctttctcaggaatggctgttaaaatgccaatatggtcttgtaactttcctgtacttagtgaacctccttatttacaccctgtttgtgaagtggctgtgttcaccctgggtggacacggaatgtttttggcatgtacaaagagaattttatgctgcctgtgtacagttattaatctgtaagtacactcagctttttgtatctgtaggtttaatatctgtgtatgtaagcaaacttggatgcaaaatatttgaaataaaatcagatgcttgcatctgtagtgaacat

SEQ ID NO: 56 - DNA, 2205 bp, Homo sapiens
agttccttctgcgctttgttcaagatgtgggtctggcgctttcgtgactcaagaccctcttaggaacttcttcactgaactcaaggaggagatcaggcaagatctgtgctgtgcagatcctttggattgaggctgctgtgcacaggaatatggatggtgaaactgggactgaggaggagttaattccaaagcatcattcctgaaaaatcagaatcatacatactttcaagagaattccacagagacattgcccaggaagtcaaaatttagaaggctcctctgaagggaaagagaagactagagaggacactggtatgttccaagcaggagaaaatgaggagaaagacaagaaatttcaaacataagacagttaaagacaataaagtactcacagaagggagtgaccaagaatctgaaaaagacaatagtcagtgctgtgaccctgcaacaaatgagagagttcaggctgaaaagagacagtatgtatgtactgagtgtgggaatgcctttagtcagagtgcaaacctcacagtacatgagcgaatccacacgggagagaaaccctataagtgtaaggagtgtggaaaagctttcagtcatagctctaaccttgttgttcatcggagaatccacactggactgaagccctatacatgcagtgaatgtgggaaatctttcagtggaaagtcacatcttattcggcaccagggaatccacagtggggagaaaacttatgaatgtaaagagtgtgggaaagcctttagtcggagttcgggccttatatcacatcacagagttcacaccggagagaagccctattcttgtattgagtgtgggaaagcctttagccgtagttcaaaccttactcaacatcagcgaatgcacagaggaaaaaaagtttacaaatgtaaggagtgtgggaaaacatgtggttctaatacaaagattatggaccatcagagaattcacactggagagaagccttatgaatgtgatgagtgtggaaaaactttcatcttaaggaaaactcttaatgaacaccagagacttcatcgtagagagaaaccttacaaatgtaatgagtgtgggaaggcttttacttctaatcgaaaccttgttgatcatcagagagttcacactggagagaaaccctataaatgtaatgaatgtgggaaaaccttcaggcagacttctcaagttattctacacttgagaacccacactaaggagaaaccctataaatgtagtgagtgtgggaaagcctatcggtatagttcacagcttattcaacaccagaggaaacataatgaggagaaagaaacctcataaataacaaatattgtgggtagtagggctgactgctgcttttctaaaaagtagttctttagtatcaactttaattctacttctaagaatcatactctacttctaagaaaataattagaagtagacaaagattaatgaaagggatgttcatgacagcatcatatacgactgaaagaagaaaactagattttcaacattacagggttgaaatgaatgatgagctatccatatgatggttctgcagccattgcaaacatttttaaagacaatttaatgccatggggaaatgattggataagacggaagataatgacatacaatccaaaatttaaaaaaatatttttgcataggaaaaattgagaaggaagtaaaccaaaatgttaacagtgatcatctctgggcgataggattataggtgatttctattttcttctgtatacttttctatgctttctagattatctacatgagaatatactaattttatatgcaagaaaaaaagcacagtattttttaaatgcaatgaagacgtgcttattttcactcagcagtgttatgaaaggcacgtagtatatagagcccaaagccctgggattgcaccctgacactggcatttagcagcagtggaaccgcgagcaagtcccttccttttagagcgtgtttcctgttaagtaaaatcataaacaccgatcctttgtcctttttagttttaagacaagctgactttagagttgtcaacaaaatatataataacactgttaggttaaaagaacacagcaaaaattcactgaaccctcctttcccacagttctggaaggatctgcagatgatggagaactacctaggcttcatcttttcaacatatgtctacacaaccag

SEQ ID NO: 57 - DNA, 2281 bp, Homo sapiens
aagaaaatgaaacagaattgaaaatggtcttgtaaaattccacttggggtggcgatgctttgtggcttgaagtgtaagggatgagaacagcatgtgaattccaagaaagcaacacagaatggaaaatggatttacaatgtgtcagacagggaggcaacatcctgtggcatgtggcttgcatctcagcggtgggaaagaggatcttaatgatttaagaatggagggagtaacaaccctggtaccttctgggagcaaatttaaccaaggccgtcctacttaccctgctgagcctcaggccaaggtcacactgaacatctgttccaggtgtgccaggcttcaaggagacaacctggaagaaaggacagaagagtcactaccaatactccattctccagatgaaaaaatcccagattcattcgattccttgcctgggactgaagaagcactaatggaggagggtgacgaatttgagaaagcatctaaactaacaggacctggagaagcctccagtggagtaggacactcactgaaaaactacatggaagaagatgaatccttaaagcaattgcaggtagttcatcaaccatggatcttgccaagtgacacagaaagtgaaggagtggaagcagaacaagagaaacacctactaaatcagaatctctgtggctgggactctgaattctgcatttttcatactttggcttctttcctcatctataaataagtttgaatataaaatgtgagtctggagaaaaaggaaggctaaaatttgaagaaatatacatggagaagacatgcaagacagtgtattagtcggttttcacactgctataaagaactgcctgagactgggtaattgtaaagaaaaaaggtttaattgactcacagttccccatgtctggggaggcctcaggaaacttacagtcatggcagaaggaaaaggagaagcaagcactttcttctaaggagagagagagagcagtgaaagccacacatttttaaaccatcagctctcgtgagaactcattatcaagagaacaacaagggggatatctgcccccatgatccaactacctcccaccaggcccctcttctgacacatggggattacaatttgacatgagatttgggtggggacactgagccaaataatatcagacaggtcctccagactgtgggttcaatgcttacaaaatcaaaacacaaaacatttagaatcaatttagccagtaccctctaattacattttagatttttaaaaacacaaataaataagctaaaaacacacaagcaaacaaacaaccaaaccaaaccaaaccaacaaaacaacacaaatgtcccaaataaagaaataatagccaaagtcacagatgaaagctaatgctgtcataaaacattaagacttccccacttgggtttgggtcctagttcttcctgaggtcttaatgtctgtaacaataggtaatttggccctgggtctccttaaggcagggagattgagatgatgacacggtatagagcctgtcacctgcaaggactgactcaggtataaaaagggaaataaaatacctgtactctctaactgtggaacaagccatgaaatttgctattggtattagactttgaacgaaaaatgtaaagatacacatagggaatcaaactctcagctctgtactttggttattcggttcaaacttaaactatctgtattgtcagaaaccccacattataataacaattggccagcttcattaaaattcacagggtcctctcatgtgtaaatgtaagaactggggcatttagaactcccaaagatttaaatatcaactcctgctgaagacgagctctcaatcaaattacaagctgcctgaaaagttatagtaaaacaacagagtcagcaaatgctaaaaacactagaattagaatgatgagaaaggaaagaaataagacaatcagaaagagaccatattaaaagtatgcttaagatatttaaagatatagatcaggcgcaatggctcacgtctgtaatcccagcactttcggaggccaaggcgggcagatcacgaggtcaggagatcgagaccatcctggctaacacggtgaaacgccgtctctactaaaaatacaaaaaattagtcgggcgtggtggcacacgcctgtaatcccagctactcgggaggctgaggcaggagaatcgtttgaacccgggaggtggaggttgcagtgagccgagatcacaccactgcactccagcctgggtgacagagtgagactccatctc

SEQ ID NO: 58 - DNA, 3636 bp, Homo sapiens
cccaaccaggaagtctgaattccagtatctgggatggatctgaagttctgaggcgaatccgaggaccactgcttgctcaggaaatgcctacagtgtctgtattagaatatgctttgcctcagaggcccccccagggtccagaagatgatcgggacctttctgaacgagcattaccaaggcggtcaacttcacctatcattggcagtcctcctgttagagctgtccccataggcaccccacctaaacagatggctgtacccagcttcacccaacagattctgtgtccgaagcctgtccatgttcggcccccaatgccacctcgttatcctgctccctatggtgagaggatgtctccaaaccagctctgcagtgtcccgaactcttccctcctgggtcacccttttcctcctagtgttcctcctgttctcagccccctccagagagcacagcttcttggaggagcacagctacagcctggacggatgtctcccagccagtttgcacgggtccctggatttgttggtagtccacttgctgccatgaatcccaagttgctacaagggcgagttgggcagatgcttcccccagcaccaggcttccgtgccttctttagtgctccaccctccgctacaccacctccacagcagcaccctcctggcccaggaccccacctgcaaaacctaagatctcaggccccaatgtttagaccggacacaactcacctccatccacagcaccgtcgactcttgcatcagagacagcaacagaatagaagtcagcatcggaatctcaatggtgcgggagatagaggaagtcaccggagcagtcatcaagatcatctccgaaaggatccatatgccaatctcatgttgcagcgggaaaaggattgggtctctaaaatccagatgatgcaactgcaaagcactgatccctacctggatgatttttattaccagaattactttgaaaaactggagaaactgtcagctgctgaagaaatacaaggtgatggccctaagaaggagcgcaccaagcttatcacccctcaggtggccaaactggagcacgcctataagccagtgcaatttgagggctctttgggaaagcttaccgtttctagtgtgaataatccccgaaaaatgattgatgctgttgtgacatctcggagtgaggatgatgagacaaaagaaaaacaagttcgagacaagaggagaaaaacccttgttataattgagaaaacctacagcttactccttgatgtggaggactatgaaagacgttatctcctaagtctggaagaagagcgacctgccctaatggatgacagaaagcacaaaatttgtagcatgtatgacaacttaagggggaaattgcctggacaagagaggcctagtgatgaccactttgtacagatcatgtgtatccgaaaagggaagagaatggttgcccgtattcttcctttcctctccacagagcaagcagctgacattctcatgacaacagccaggaacctccctttccttatcaagaaggatgcacaagatgaggtgctgccatgcttactgagtcccttctctctccttctctatcatcttccatcagtgagtatcaccagccttttgcgacagctaatgaacctacctcaaagtgcagctacaccagcactctccaatcctcacctcactgctgtgctccagaacaagtttggcctgtcactgctcctcatcctcctgagccgtggtgaagacctacagagttcagaccctgctacagaatcaacacaaaataatcagtggacggaggtgatgttcatggcaacacgagaacttctgcggattccccaagcagccctggccaagccaatctctatacctacaaacctagtgtccctcttttctcgctatgttgaccggcagaaactgaacttgctggagacaaaactgcagctagttcaggggatacgataaaagatctccaaatgtgtcctgtacctccttttggctgccacctgcactgctgccatcaccaatggagtgtttttaatgagggaaggaaggtagctttttccccaaagcaaagtcttgtgggatcgattcctgtttacaggggttgtctctctaaatgtcagatatttccccactgctctatgaaatttggctgggtgatacttctgctggtttctttaccttctgtgttacagttctgcatgtcctacttttactcagttctgttttgcattttctttgccctagagacacaagtgtaatctctccctttatccctccactactccacctcagagtagattgtagcctgccaaaggattccttccctcatcctattgaagttgttttttcattgccccatattaatatgactatagaagagccaattaagtagaaatcaagatatacacacacacatagatacacacacacacaccccatacatgtatttatgtggtcttcagagggtccttaaagaatgaattttagattgaaaaatatttagttgtctcattacctcttctaaacacaaaccagctgatgtattttaatctgtttctgttctatcttgtaattaatttggtgggttctacttgttttaacataaataaagagtatgcagcacgtttaataaaatcagaactcttaattggcttatgcccaggtctaggctgagaagtcctttttcttcttcccacctttatttccttagtttctgtccaccttaatcgaaacaacacatggttatgtctttttcctgctacaactacagggtacttgagcctttcccctcaagtgcattcgaagtcacccaggatgatcctcactagtagcctgctttggcagtgtggctttttgcacacttgccctgtcttcctgagactacttcagtaagccatgcttccttcttccccacttttatttggtgtcatgaatagaaacttccaaatgtaaccatggaagctaagtttggcctgctttgctttttagtctccacaccatgggcagaactgctgtctttactacttcatctcacccaagtcccgttcccaggcagccaggggcctgggtttgaataattgcagggccagcctgccatgatctttctcacttactcctctcccattcagcaatcaaccagactaaggagttttgatccctagtgattacagccctgaagaaaattaaatctgaattaattttacatggccttcgtgatctttctgctgttcttactttttcgaatgtagttggggggtgggagggacaggttatggtatttaaagagaataaacattttgcacatacatgtattgtacaacagtaagatcctctgttaaaaccagctgtcctgttctccatctccatttcttcccatgctgtaaccccaggctccaccagctgttccccagtgatgttacctagcttccctctaccgttgtctactgaccatttccactacatgcctttcctaccttcccttcacaaccaatcaagtgaatacttgattattatctcttccttactgtgctttatcttttttgtttggattggttctaattaatgaaaataaaagtttctaaatttacatttttatagggtattgtaaataaaaacaaattgtatactt

SEQ ID NO: 59 - DNA, 2915 bp, Homo sapiens
ggatgagaacatagatttgggtctctttaaatatgaataggttacaaattgcctttttaaatattgcttgagatcaagtggtagtggttatatatggagtcaagcagctgggatattcattcaaggcgtgtaattttcttcattctttggacaaaacacaagcaggtttttaattttgaataattgatcttccctcccatactgtgggcaggtgttgatggttccccaccttgttagcctgaagcctgttcatccctggaccggccatgacatgcccagtgcagtatcccccacggtggggctggcagcagcccctccacactatgcacagagcattctgagtctggaatcgtctcttcagccttacagctgttccatctgttattttctccaaactcctcttccctgcatttccaagcagcgtcttctcatgattacagtcactttcagagatgagctcatgctgatacccaatgaagaacccagttcagaattttctttttttttcttttttgtttttttgagacagggggtcttattctgtcacccagactggagtacagtggcatgaacgtggctcactgcagccttgacctccccggttcaagcaattcttctgcctcgccctcctgagtagctgggactacaggcatgcaccaccaagcctggctaatttttaaactttttgtagagatagggtctcactctgttgcccaggctggtcttgaactcctggactcaagcagttctcccacctcagcttcccaaagtgctacagctgactataagcgtgagccaccatgtccagcccagaattttcaaattaaacaaaactaaccctccaacatgtttcagtacagtggcctcaatacactattcctcatgcaaagccttcagttgaaagtgctgggtaacttggatttgcctgtgtgttgaccatcagttgctgcctaacagattatctgcagctctgtgggctaaaaccacagggatgtatgaccttcctatttctgtgggtctcgagtccagcacagcttctgggtcgcactggctcaggtctgtcctgaggttgcagttaagatggtgaccgcagtgtctcacctgagggctcagctggggctggagaactgggctccgggaggctccgtcatacacccgctgagttctgctgctgttggtgagaggctgggttcctggcctcatggttctttctgtagggcttcttgtgcgtctcacagcatagcagctggctccctgcagagagggagggaggaggaggaagccacagtgccttgcacggccgggtctcagaggtctctatgtcccctccacctggttctttttgtcagacgagtcactaagtccaggccacacgcaagggatgggaatgagactctgccttttgaggagtgctcaggaatgcatggccgcatttaaactgccacactgtggccggtcagctgggtctgttccacttcaggatccacaggcctctcctggccctgcaggacaggctcccctgcctccactccagcccgtcctggtggttgtgagccgcacttaaccctgccaggatgcggcttgtactgggaggcccatgggctccgagaggacttcccttcaacctccaggcaccttgaaactgcccagcagccaaacctcagagctgtggaagctcctggacgtttcaaagacccacttaatatttaatagtcagtgcagcattaatttcattgctccccgatcccacatatcgaaacctttcacagtttagtacagggatgatggtgaaagagaaaccacagggaaaatccgaggcagtggaattgtttaatttctggttgcttctcctcttatttgtaattaatatccattcagcatctttaaagcttacaaaatgcttcaagtacattctcattggagttccatgatttgtaaaacaggcatgtgaaaaaatgggaagctaaggaaataggaattcagaaaaggtacactgaaggtacgctgaaggtcagcctgaacttgaacccacgtcttctggcaccggacatccctgttcttgtcactgcggcactttgctctgtgtgtggaaagcgtgaagggcccctgcaaatggacatgatgctgcctcctccacaggtttatttttgtgaaatcaaacagaatactgtttgtgcttaaaaaccatcctgcgcccccatctgtaaaatacatcgtccccggtacttcccagcaggcgctaagcaccacccacactgccggcgcctgaccagacagctccatggagctcctgacccagcttcaacccgtcgggaacagctcccagggaatgtgcaggaaggtgcctccaacacccggccctttctgcccctcggcccctgtggtcactctgccctccacagtccttctgcccctgtggctggtcgcttactgctctgtgcatcttcctgaagcacttggcactgttgcctcatctctgtcctcttcctcctatgccctcgcctgggccctcagcagcttccagcagggagggtgtgggtgcagtgatttggatcatgcccctactcctcagagcctcttcccaaacgaaccgggtgtggcgtgctgggcctttattcttctgggacacaaacacgggactgctgattggtctctgatatagaccctggagtctgctccttttgtctggggcaaaaggaaccaaggaggaaattccagccgcaccacatttgcaaacgacactctgtcgggctttttttgcaataactgcatttcctaaataattcagtctttggattgagaacgtgtctgtcactttcctttatagaaataaccttttgtaaattaatgtactgttactttataaagccagacaactgtctctagatagacagcaataaaagctaccaactgtg

SEQ ID NO: 60 - DNA, 1677 bp, Homo sapiens
atggctttcttcctgaagtgtgcttggccggaaaagaaagcaggagacctcaagggctaataatctagcagtggctgacactgaaatgatgcatggaagaaaggctaccaagcaagggaggtggagagcagtttgaagcaactggggtaaagtccggagaagaagctggtgagaaagagacaggagccagatgctgaatgacggtaaatcgaatcctggagggaaccaaacaaaaccctgaaaacctccaggaatctcaggttggccaaatccttggtaatgtcctgccactccccaggactgccacactgtacacaccctatctaatggcaacctactgcaggggccaaggaaaaacgtctcctttgtcctctggaggttcactgaaaaatcaactggcggaaagcaaattaacaggtcaaaagatatacatgtattattataaaaagacgtaaatgtattattgggcatgtgggggaaccacagagtaattactccacctctcagtgggctcagaagcttatatacccctcctgaggttacagaaagtttgggggctcagagaatggtggtaaatcaggatttagtggcaagacagaaatggaaacttggctagcaaaagtcatttcattatgtagattggggtccccaaactttgggccatttacactgtggccatttacattcctgttaggaatagggccgcacagcaagaggtgagtggcgggtgagtgagcaataccgcctgagctctgcctcttgtcaggtcagcagctggtattaggttctcttaggagcaagaacgccgctgtgaactgcacatgcaagggatctaggttgcggctccttatgagaatctaatgccgatgatttaaggtggaacagtttcatcctgaaaaccatccccctgccctggtccatggaaaaattgtcttccatgaaacctatccctggtgccaaaaaggttggggaccgctcatgtagatgaaacctcacaggtagtagccattggaaagaatagatggttgatgtttctttcagacctttaaaggtgtcagactgtccattaacctttcctatatctggacgagggaaaacctcagagagcacctggctgcatcaatgcagattttctctgtatattgcaagcctctctcacacacacacacacacacacacacacacacacacacacacacacaccaaacagcttcgtaggactacttccgcctgcaggtcctctgaacagccatatctcaaaatatgtgaaagaagtatattttggggtaaaattttttggtttccttcactacacatctcaccttgggtgttattcttgccactggtttcatgttctcagactcacgaagctgaaaaacagttggggatgcagaatttgatgtgcttcatcctttgtgggcttgaagagtctcttgttcccaaaattattccctggggccctctgcttcacaggcaaataaaagcaaaaagaagcttgctcagccttaagtgaggaaatgactcacaggtttaaaacaaaaaaggaaaagatggaggcattttgtaggtgaaagggcgagagtcttctgatgcaaagtaagaggtcattagagcagggatggattatcaataagcagagcaaacatttgcttagggaacaaacagcgccggaacacg

SEQ ID NO: 61 - DNA, 1665 bp, Homo sapiens
catttgtaggttgtgtctggggcactcgctcggcctcaggaagagggaagaacggggacgactttgtggcagcaaagccacctcccttccgtgttttccgcagcccaaagcgatagaaccgcatggcttccgcagtctgggggagtgccccctggtggggcccgccgcccccggccccagctcggccgctcacggacatcgacttctgctccggggcgcagctgcaggaattgacccagctgatccaggagctgggtgtgcaggagagctggagtgacgggcccaagccgggagccgatctcctccgggccaaggactttgtcttctctttgcttggtctagttcaccgccgggaccctcgctttcctccccaggcagagctcttgctgcttcgtggtgggattcgcgagggctccctggatctggggcatgcacccctgggtccctacgcccggggacctcactacgatgccggcttcacactcctagtgcccatgttttcactggacggcactgaactgcaactggacctggaatcctgttacgcacaggtctgcctcccagagatggtgtgcggaacccccatccgggagatgtggcaggattgcttaggacccccagtcccaggagcacgtgattcgatccaccgaacggagagcgaagaaagttccaaggactggcaaagctctgtagaccagccgcacagctacgtcactgagcacgaggcgccggtgtctttggaaaaatcgcctagtgacgtttcagcgtccgagtcgcctcagcatgacgtcgtcgaccttggctctaccgcacctttgaaaacaatgagtagtgacgtcaccaaggcagccgtcgaaagcccagtcccaaagccgtcggaggctcgggaagcgtggcccacattatgttccgcccaggtggctgcctggttctttgctacgctggcggcggtcgccgagtctctgatccctgtcccgggtgctccgcgtctggtgcacgcagctcgccacgcgggtttcaccaccgtcctcctggctacccctgagccccctcgccgcctcctgctcttcgacctgatcccagtggtgtccgtggcgggctggcccgagggggctcggagccactcgtgggccggtccgctggcctctgagtcggcttccttctacctggtgcccggtggcggcaccgagcggccgtgcgcctccgcctggcagctctgttttgcccgccaggagctggcgctcaaagcgcgcataccagcgccgctgctgcaggcgcacgcggcggcccaggcgctactgcgcccgctggtggccgggacccgggcggcggcgccctacctcctgcggacgctgctgtactgggcgtgcgagcggctgcctgcgctctacctggcgcggccagaaaatgcgggcgcctgctgcctcgggctgctagacgagctcggccgagtgctcgaggccgggacgttgcctcactattttctgaacggccgacagctccgtacgggggacgactccgctgcgctgctcggagaattggcccggctccgcggggacccggcccgggccctccgtgccgcggtggaggaggccaaagtggcccgcaaggggggcggtttggcgggcgtggggggcggggcccattaaagacgctgttcctacc

SEQ ID NO: 62 - DNA, 2278 bp, Homo sapiens
gacaacaagatggcggcgctgcgggacggctagcggccctgcgtgggagttcctgacagctggattctagaagtagaactatgagctcacctttggcctcccttagcaagacccgaaaagtgcccctgccctcggagcctatgaatcctgggaggcgaggaatccgcatctatggagatgaagatgaggtggacatgttgagtgatgggtgtggctcagaagaaaagatctcagtcccttcctgctatggcggcataggtgcccctgtgagtcggcaaggggactcattggcgccccctgaggtggactttgacaggctgctggccagcctgcaggatcttagtgagctggtggtagagggtgacacccaagtgacaccagtgcccggcggggcacggctgcgtaccctcgagcccatcccgctgaagctctaccggaatggcatcatgatgttcgacgggcccttccagcccttctacgatccctccacacagcgctgcctccgagacatattggatggcttctttccctcagagctccagcgactgtaccccaatggggtcccctttaaggtgagtgacttgcgcaatcaggtctacctggaggatggactggaccccttcccaggcgagggccgtgtggtgggcaggcagctgatgcacaaggccttggacagggtggaggagcacccaggctccaggatgactgctgagaaatttctgaacaggctccccaagtttgtgatccggcaaggcgaggtgattgacatccggggccccatcagggacaccttgcagaactgctgcccattgcctgcccggatccaggagattgtggtggagacgcccaccttggccgctgagcgagagaggagccaggagtcacccaacacgccggcacccccgctctccatgctgcgcatcaagtctgagaatggggaacaggccttcctactgatgatgcagcctgacgacaccattggggacgtgcgagctctgctagcgcaggccagggtcatggatgcctctgcctttgagatcttcagcacattcccgcccaccctctaccaggacgatacactcacgctgcaggctgcaggccttgtgcccaaagcagcactgctgctgcgggcacgccgagccccgaagtccagcctgaaattcagtcctggtccctgtcccggtcccggtcccggccccagtcccggtcccggtcccggccccagtcccggtcccggtcccggccccagtcccggtcccggtcccggccccagtccctgtcctggacccagtcccagcccccaataaagcacccgccccctcaacccgctgctccgccaggctcttgggtgggccatctcgccaggcacgtaggaaaggcctgggaccagctgggccagggagggggcggtgccgacccgccccttggtaactcgagccccggctggcgggcctggctgctgggtctttgtcttctaggttcctctttctcccaagaagggctaagtggatcctgtgaagggagggatgcagtggggggaaggagctggccccagctgggtttacattctcagctgggacagcagagcctcactgtgtatgtgtgcagccagcagatacctgtgcacaggcacagacccaccaactcgtggggacacttcaacaccgcacaaagccattttgccactagacccatgcccccaaattagcagaactgcagctgggtacccacctcccatgatacactcattcttagccattgtgctccaacacaggcgcatgggatggccacactcactgacaggcatggagatgtgcactacacaccaaggcacaagcatgatatggacacatgcatgtgaactggagggtggcccacccagacatctccagaaaccactggtccatacaggtatttgtgtgtcagacatatccaaacacatgcactaacaaacacagaggtgacagtcacaagagaacagctcagccacccttcccacagagcagtctcagcacagtcacaactaccaaccttgcccagggcagggacccaggaggcccaggccacaaccaaccagacacagtgccaatggaacaggacatcatttaattgcctctagggtcctcctgggagagggactgcggggcctttggcagagctctggctgatggaaccaacagaggtgcccatcagccagtgccaggcaggatggcggccccaatgcttggctgggggcagccagcatttggggctgttgcttaagacaatttctgagact

SEQ ID NO: 63 - DNA, 1684 bp, Homo sapiens
acttgatgggaatcatggcagcatccaggccattgtcccgcttctgggagtggggaaagaacatcgtctgcgtggggaggaactacgcggaccacgtcagggagatgcgcagcgcggtgttgagcgagcccgtgctgttcctgaagccgtccacggcctacgcgcccgagggctcgcccatcctcatgcccgcgtacactcgcaacctgcaccacgagctggagctgggcgtggtgatgggcaagcgctgccgcgcagtccccgaggctgcggccatggactacgtgggcggctatgccctgtgcctggatatgaccgcccgggacgtgcaggacgagtgcaagaagaaggggctgccctggactctggcgaagagcttcacggcgtcctgcccggtcagcgcgttcgtgcccaaggagaagatccctgaccctcacaagctgaagctctggctcaaggtcaacggcgaactcagacaggagggtgagacatcctccatgattttttccatcccctacatcatcagctatgtttctaagatcataaccttggaagaaggagatattatcttgactgggacgccaaagggagttggaccggttaaagaaaacgatgagatcgaggctggcatacacgggctggtcagtatgacatttaaagtggaaaagccagaatattgagttatttcttaacaagtttcgagagagaagggagcaagacaagagcaagcaacggctattaaatgtcacaatcctttaattagaaaccatttattggccggacgcggtggctcacgcctgtaatcgcagcactttgggaggccgaggcgggcggctcacgacgtcaggagatccagaccatcttggctaacagggtgaaaccccgtctctactaaaaatacaaaaaattagccgggcgtggtggcgggcgcctgtagtcccagctactctggaggctgaggcaggagaatcaattgaacccgggaggcggagcttacagtgagctgagattgcgccactgtactcctgggcaacagcgagactccgtctcaaaaaaaaaaaaaaaaaaagaaaccatttattttaaaaatgattagattgctatgcctcaactcatagaggatgaacccttcaagaaaacgtgaagtagaacgggtgggccagaaatgaaaacaggcaagtaaagtatttcttcggaaaacattttatcaaaccaaatgttaaaaagactttccttttgtaaaactggattagagaagacttttcagtgggttatctctaggatgatcagtagttcagcacttaaaaactgcagagaaaactgaaagttatgttccagataactttccgttgtttaccaaattttcttagatttggtcatcatcaggaagcatttgtaaaaataaaaatctccacaaattactggcccatctcggacttgctgaatcaatttgataggattaatctccagtgaagctgtgtttacagggcattccaagtgattcttatcaggaaatgtgaaaaacactcctgtacataatcggttaatttaaaattttacttaataagtgaacaagtaatgaagatttcacctgtttacttagggtatctacccagacccatcgattctgagttcgggagatgattttgaaattactgttttccaaataaaggtgctcccttct

SEQ ID NO: 64 - DNA, 1983 bp, Homo sapiens
gaaatgcaagagagccccttataagagctaccgaaattcttcctatgaaaatgcgcgagaaaacagtcaaatgaatgagtctgcacctggtacctatgttgttcagaatccacacagctctgaattaccaacgctgaatttccaagatactgtaaacaccctgaccaacagtccagccatcccattggaaacatctgcatgtcaggacatacccacttctgccaatgtacaaaatgcagagggtaccaaatggggagaggaggcattgaaaatggatcttgacaataacttttattcaactgaggtgtcagtttcttccactgaaaatgctgtcagttctgacctccgggcaggggatgtacctgttttatctttgagtaatagcagtgagaatgccgcctctgtgatcagctacagtggctctgcaccctcggtcattgtacacagcagccagttttcatcggtgatcatgcacagcaatgccattgctgccatgaccagcagcaaccacagagccttttcagacccagctgtcagtcagtccctgaaagatgacagtaagcccgagccagataaagtgggtaggtttgcaagcagacccaaaagcattaaggagaaaaagaaaactacatcacataccaggggagaaataccggaggagtcaaactatgttgctgatcctggaggatcactgagtaaaaccacaaatattgctgaagaaaccagcaaaattgaaacctacattgcaaaacctgctctgccgggaacctccacaaatagtaatgttgcacccctttgccaaataacagtgaaaattggaaacgaagccattgtgaaaaggcacattctaggatctaaattgttttataaaagagggagaagacccaagtatcagatgcaggaggagcctttgccacaggggaatgacccagaacccagtggagacagcccactcgggctttgccaatccgagtgcatggagatgagtgaagtgttcgatgacgcaagtgaccaggattccactgacaaaccgtggcgcccttactacaactacaaacccaaaaagaaatccagacagttgaaaaaaatgaggaaagtcaactggaggaaggagcacggaaacaggagcccgagccataaatgtaaatacccagcagaactggattgcgccgtggggaaggctcctcaggataaaccctttgaggaagaagaaactaaagagatgcccaagctgcagtgtgaactctgtgatggagacaaagcagtgggggctggaaaccaaggaaggccccaccgacatcttacttctcggccatatgcctgcgagctctgcgccaagcagttccagagcccttccacactcaaaatgcacatgagatgtcacaccggggagaagccataccagtgcaagacctgcggacggtgcttttcggtgcaaggaaacttacagaaacatgaacgcatccacctgggcttgaaggagttcgtctgtcagtattgcaacaaggcattcaccttgaatgagaccctcaaaatccatgaaagaatccatactggagaaaagcgttaccactgtcagttctgctttcagagatttttgtatctctccaccaaaaggaatcacgagcagaggcatattcgggagcataatgggaagggctatgcctgcttccagtgccccaaaatttgcaaaacagctgctgcccttggaatgcaccaaaagaaacacttattcaaaagcccaagtcagcaggagaaaataggtgacgtgtgccacgaaaactcaaatcccttggagaatcaacatttcattggttcagaagacaatgaccaaaaggataacatacaaaccggtgtggaaaatgttgtcctttgagtggcaagaattagaaaaatcttcaaaaatatagttggtggtttttttagttatgatttaagtttagtttcattttgtccatgtgacagtcatgaaggagtgaaatt

SEQ ID NO: 65 - DNA, 3349 bp, Homo sapiens
gtgccgcggcctttgtctcgcagtcaggaggagcagggccagccgttcctgccagaagccagggcatgacccctggggtgcgcgtctccacagacccggtgagaatctcggcctccttgcgcgtgtcctccacctcgtgcccggcctcctcgcgcgcggccttctcacgcccggcctcctctttgcaccccgtccctactcgcgctcagcctcctccttgtgcccggcccctacttgcgtgcccggcccctactcgtgcccggcctctactcgcacaactggcctctactcgcgcacctggcctctactggtgcccggcctctactcgtgcccggcctctatttgcacatctagcctctactcgtgtccggcctctacctgcacacccggcctcctaaagtccgcgccaagctccccaaccacagcctgcctctgaaaggaccgcccacgccgcgctggaggagcaagtgacgtttgaggacgtggtagtgggcttcagccaggaggagtgggggcagctgaagcctgcccagaggaccctgtaccgtgatgtaatgctggacaccttcaggcttctggtctctgtgggacattggttaccgaagccgaatgtcatctccctgctggagcaagaggcagagctgtgggcggtggagtctagacttccccaaggcgtgtacccagacttggaaactagacccaaagtcaaactgtcagttctaaagcaaggcatctctgaagaaatatccaacagtgtcatcttggtagaaagattcctgtgggatggtctgtggtactgcaggggtgaggacactgagggccactgggaatggagttgtgagagtctagagagcctggcagtgccggtggccttcacgcctgtgaagacgcctgttctggagcagtggcagaggaatgggtttggggaaaacataagtctgaaccctgatctcccacatcaaccaatgactcctgaaagacaaagcccccacacatggggaacacgtggaaaaagggagaagccagacctaaatgttttacagaaaacctgtgtaaaagagaaaccctacaaatgtcaggaatgcggaaaggcctttagtcacagctcagcacttatcgaacaccaccggacgcacacaggagagagaccttatgaatgtcacgaatgcttaaaaggcttccggaacagctcggcacttaccaaacaccagagaatccatactggggagaaaccctataaatgcactcagtgtgggaggaccttcaaccaaattgccccactgatccagcaccagagaactcacacaggtgagaagccctatgaatgcagcgaatgtgggaaatccttcagttttaggtcctccttcagccagcacgagcgaactcacacaggcgagaagccctacgagtgcagtgagtgtgggaaagccttccggcaaagcatccacctcacccagcatctgcgaatccacactggggagaaaccctatcagtgtggtgagtgtggcaaggccttcagccacagctcatccttgaccaaacaccagcgaatccacacaggggagaagccctacgagtgccatgagtgtggaaaagccttcacccagatcacaccactgattcagcaccagaggacccacacaggagaaaagccctatgagtgtggtgagtgtgggaaagccttcagtcagagcacactcctgaccgagcatcggaggattcacacaggagagaagccctatggatgcaacgagtgtgggaaaaccttcagccacagctcctcactcagccagcatgagcggacacacacaggagagaagccctatgagtgcagtcagtgtgggaaggccttccggcagagcacacacctcacccaacaccagcgaatccacacaggggagaagccctatgaatgcaatgactgcggcaaggcattcagtcacagctcgtccctcaccaaacatcagcgaatccacactggggagaagccctacgaatgcaaccagtgtggcagagccttcagccagcttgctcccctcattcagcatcagaggatccacacaggagagaaaccctatgaatgtaaccagtgtggcagagccttcagccagagctcccttctcatcgaacaccagaggattcacaccaaggaaaagccgtatgggtgcaatgagtgtgggaaatccttcagccacagctcctcgctcagccagcacgaaaggacgcacactggggaaaagccctatgagtgtcacgattgcggaaagtcctttaggcagagcacccacctcactcagcaccggaggatccacacaggagagaagccatatgcatgcagggactgtggaaaggcctttacccacagctcctcccttaccaagcaccagagaactcacactggataaacccactccacatgtgctggggacataggaagaccttaagccatagctcatccctttctagatttgacccaatcatacacatgagaaacgtacgttcatacacaagccttttcacacagcactcccctcagacaccctcagagagttcacactgatgggaaatgaccatgggaccaccaagctctaggtcatccatctctgcatccaaatagtagggaaacgtggagataatcaacactcaggaccttcagccttgaacgcccattagtgctatgttatagaacctacaaaaaagaaatggaacaaatgtagtggatccagggaacgcttttgtccaaggattcaccgtattccaaaccagagatgttcaaattggtgagaaacccaacaaatgcctttcatatatacgagaaccaaatgaagtcagaatttgccattattgcacattacatttttgggggggaaagtgcttatgaatggtgcaggttgactctgatattcattcccaaatgacagtatggcagagtgttccagaaatgagagtggcatctttatggaatcactatggatactgactgtctcagtaaacagctgtcttgtctgtgtgtatattgtttgatcagggtacatggcagccagtcacagattggaattacatatgacaaagtatcagtgtactataaacaggtttttagttatccctgcattatttttgcaattaatctttatatgcaatgagattgaaaagctttgtatgggaagactcaaaatgtaaagctgcttccgtagagtctcactgattctgagatggcttttgctgctctgttctccctctacatttctctgcagaactcgcgttagaaacacagatatttgttttacaaaaagggagatttttcctttgttaaaccatcgtcttataagcaatagcaaattcatgttag

SEQ ID NO: 66 - DNA, 2247 bp, Homo sapiens
aaaccacttcttcccccctaccccccgccacgcgaggctgcggcgcacgattgaagaatgtcccggattccactggggaaggtcctcctgaggaatgtcatccggcacacagatgctcacaataagattcaggaggaatcagatatgtggaaaataagagaactggaaaaacagatggaagatgcttaccgggggaccaaaaggaaaatgctacccagcagttcaagccggatgcgcagtgatggttttgatgaagaaagtcaaagatactattggaggccaaagaatgaaatttctgggacactggaagatgattttcttaaggctaaatcctggaataaaaagttctatgattatgaagcaaacatgccagacaggtttgtgattaattcctgtgagcattaatatttggcctgagaacgtgtacttatcaaaattaattgtccccacaaaaaacttgtgtacaaaagttcataccagcattattaataatggccccaaaaaataatggccaagtaatccaaatgtctgtcaactgatgaatgggtaaacaaaatgcgatatatccatacaatggaatattatttggcagtaaaagaaatgaagtacagatacatgttacaacgtggccttgaaaacatcatgctaagtgagaaggaagaagccaagtcacgaaagaccgcatattgtatgattctatttatgtactatgtccatacataactgtatgattccatttatgtggtaggcaattccatagagacagaaggcagattagtgattgccctgggctggaggcactacactttgaatgccatgatatgtgaattatacttcaataaagttgttatttaaaaaaaataggccaggtgctgtggctcatgcctgtaatcccagtactttgggaggccgaggcgggcggatcacgaggtcaagagattgagaccatcctagccaacatggtgaaaccccagctctactaaaaatacaaaaattagccgggcgtggtggcatgcgcctgtagtcccagctactcgggaggctgaggcaggagaatcacttgaacccaggaggtggaggttgcagttgagccgagattgcaccactgcactccagcctggcaactgagtgagactctgtctcaagaaaaaaagaaaaaaataataataaggctgggcgcggtggctcatgcttgtaatcccagcactttgggaggccaaagcgggcagatccatgaggtcaggagtttgagaccagcctggccaacataatgaaaccccatctctactaaaaatacaaaaattagccaggcatggtagcatgtgcctgtagtcccagctactcgggaggctaaggcaggagaatcacttgaaatcgggaggcggaggttgcagtgagctgagatcacgccactgcactccagcctgggcaagagtgagactccatctcaaaaaaaaaaaaaaaaaattgtccccatgtagacagcatgatattatgaagtgtttttggaaaagtgcttcatagctaaagagcagagagtaagagttcgttagtgtttcttaaggaaagcaatggcaagttctcttacaaatggacaaaataatcttgtatgtctgaagtgatagtgtacagtacaggaaatgtagctgttactgagctataatgggggcttggttctaccatatctctactttgtgtttatgtttgtgtatgcatgtactccaaagtctttctaatgttgctttaatttccaaaaatgtatgcattgctttaacaatacatgtgatgtgtcatattacagatggggtcacagtggttataaagagttataccctgaagaatttgaaacagacaggtaaggaaaataggcttactgaaagaaactaagatggtacaaaatctgtattataaattgatttcttaacttttacgaagaatatacttgccatcaaaaatgtagctagagaaacaataggtgatttagttaggaggtgatccctgttttcccattctctggttgatgtttggcatgtctgtaagcattttggtttttatatatagtattccatacagtaactcagtatggcagcttagaatttttaccttcattttaaagatgaggaaacaaaaactcaatgagaatattaaagtgttaaagtatacattaaagtgcttatttaaaattcagatgttaacctcaattttttaatctagaatgcaaaatattaaaataatacgctttttttt

SEQ ID NO: 67 - DNA, 2086 bp, Homo sapiens
gatggttatggccgcactctcgctggtggcggcctgttggggtagagcggccgcggacgagtcagttcagcttccggcggctccagggagcagtgtcagggccagggagacgatggtctccgtgactatggccacttccgagtggatccagttctttaaggaagccggcattcctccaggacctgccgtcaattatgccgtgatgtttgtggataataggattcagaagagcatgctgctggatctcaataaggagataatgaatgagctgggcgtgaccgtggtgggtgacatcatcgccattctcaagcatgccaaagtggtgcaccgtcaggacatgtgcaaagctgccactgagtcagtaccctgcagccctagcccccttgcaggcgaaattcgccgtggcaccagtgctgcctcccgaatgatcaccaacagcctgaaccatgactctccacccagcacaccccccaggcgcccggacaccagcacctccaagatctcggtcactgtgtccaacaagatggcagcaaagagtgccaaggccactgcagccctggcccgccgggaggaggagagcctggctgttcctgccaagcggcgccgggtcactgctgagatggaggggaagtacgtcatcaacatgcccaaaggcaccacaccccgcacccgcaagatcctggagcagcagcaggctgcaaaaggtctccataggacgtctgtgtttgaccgcctcggcgccgagaccaaggcagacaccacgacagggagtaaacccacaggagtcttcagccgcctgggggccaccccagaaacggacgaggatctggcttgggacagcgacaatgacagcagcagctctgtcttgcagtatgccggggtcctgaagaagctaggacggggcccagccaaggccagtccccagccagcactgactgtcaaagccaaggccacaagctcagcgacaacggctgctgccccgacactgcggcgcctggcgctttcctcacggtctgggcttgagaggaagccggagtccttgtctaaagtcagcatcatcaagagactgggcgcagctgcccttgtgcccgaggcccaggacagccaggtcaccagcaccaagagtaagtcctcagccgaggtcaaggtcaccattaagaggactctggtggggccccgggggagcagctccagcgagggccttggtgcccagatggaccacgcgggcactgtgagcgtgttcaaaagactgggccgcaggaccttctagcccacctgtgggcggggtgcaggcagcagagcctgcgggcatctgccctggccgccccaggctcctggcttcatcacgcctcccaccagctcctggatgacacagcttgtctccctcgggctccagagctaggcccgagcattcgggggatcaccccatttctcctagcctgggatggtcgtcgcagctggcctggcctgctccaggactccccttctctcatgtcctctgtgctttcttctctggctgtggccttggcagaacccacttttctacctctcccaagtgccagggggcttcttcctctcctacattccccttcttcccctgagcagggtctgctgcctcagaccccagctcatcagcctccctgtccccctcaactaagtgggtgtcacctggtgggcctcccttcccccactccccactgacctccctcactcctctgcgcctccccccactgctgtgacttctctctctccctgtcttcactttgttcatttctcttctgttttctgtccccgtggcaaggcccgactgtccgctgcgtcctgcccgaccctcctgtacctccggcctcccagcggccccctcgtcggcggtggcgtcgagcctgttgagactgttagccgccctctactcccaggctggagggacctctccagaccctgggctgcggctgaggcgcatccgttttcctgccctgggcatctgtctctgaaagtgtatggcgggtggtgggcaaggggcactgggaagggaggccagtgcctagagtgaagacagctgctgttttaatatatttttgtgactttc

SEQ ID NO: 68 - DNA, 3140 bp, Homo sapiens
acacacacacggagcatcctcccgtcaggtctcctggtccagccccgcccgcgcctcctgcttccagcgaacctgttccctctccccacatcccccgccctccatctcccccggctctgggacccttcccgccgacctcacccccacccccgggatggagcggctcgagcccgcccggagccccccgcggccggggtgacggtccccccacccctctcctgcccggcccccgcctcgagcaccatgggcctgaggggttcccggggcgccagacgctgaagatgaccgatgccggagctctcttgagtcatggcttcttcaaagctccgagaacccgtggatgaagtttttgacctggacttggctgtgccagagacggccagactggacagcagtttacacaaggcccgggcccaactgttggccaagggccggagacaccggccatcccgctccaggcttcgggacagtgccagctccgcggaggatggtgaaggctcggatgggcccggaggcaaggtgaccgatggctgcgggagccccctgcaccggctgcgctcgcctttgcactcaggcccggggtccccggccgggggctctttctgcctggatcctccggggttgcggcgcagcctggacgaggacgagccgccgccctcgccgctcacacgctaccggcccctgcacaacgctgcgtcgcacgagggcctggccgccgcctcctgctctccgccgcgctccgcgccctcctccgacagctcccccagcttcgtgcgccgccacccgcgcgcagagccgcacagcgaagatgacagccgtgacgccagtcctcctgagcccgccagccccaccatcggcctcgataagaagactcgccgaaagttcctggacctgggggtcaccctgcgccgagcatccacgggcaagagccggaaggagaaaggcagcaaccgactgtccatgggcagcagggagtcagtggaggggtccggcaggtcagggggctccccgttcctgcctttttcctggttcacggacagcggcaagggctcagcatcctcgggtagcaccacctcccccacctgctcccctaaacacgagggcttcagccctaagaagtcagcttcccaggaatccactctgagtgatgactccacgccccccagcagcagccccaagatccccagtgggccctggcaggaggccaaatgttcttacccctaccacacgctgtctcagtcttcagatgagttcctggatgaacccctcccccctgtccaccactggaccagccagcaggtgggccagtggctgcagagcctcaacctggaacagtatgctgctgagtttgctgcacggcaggtagacgggccgcagctgctgcagctggacggaagcaaactaaagagcctggggctcagcaactctcatgaccgggcactggtgaagcgcaagttgaaggagatggcagcagctgccgagaaggagcgcaaggcccaggagaaggctgcgcggcagcgggagaagctccggcgccgagagcaggaggccaagaagagctaggggagggtgcacaggcgctggcacccggcaggggcagccactggctccgcgggcacaggcctcaccagggaggctggacctgggcgctgcacttgggctagcctggtcccacgctctcaggggggacatgctctctcttaccctgtcacttggtctagacccagagaccccagaaagggagaccccagggagagggcctagtaataaatcctattttgaggacttgtttggcacagagttcctgggggaggagcagatgaaggggagagggcagagaggccagggctgaggcaagtctgggagcctgggtcaggctgtcccattgccctcaggccatcatggggctggggtggaggggagctaggaggcctgcctgcctgcttgcctgccagaggccctgaggccgggccccagggctcagagctgggctgggcatttcagcaggagcccatgtgggagcggctcctctccactcttccagggggctgtgtggtgggagagctctgtcctgctcccccaagaggccagtgggcgctgcagcaagtcgcactcagggtagactcccagccaaactcctcaacaggagcgcagagaaagcagcctggggcgagtgcagtctttgccaggactcaagaggggaggatgaacatccccttctccctctcccctcctctgtcctgtgggtcccagggggcgagatgacaccacacaggtctgcctctcagggcccattcaagacctggtctttgacccattctccaagccaggactcccttcacttcctgctgcttcctcagagggcacctaagtcctctttgggagctgagcaaacaggaactgatagggacagaggacaccacttccaccagccaaggcctaggagctgctgacctggtcagccctcaccccagccaggcagagaggcaaaacctgggggtccccggcagctacgagattggaaaggttcatcagccctcccccatctgccccaggcattgtcagggaatcagtgggctcagaactggcaggcggtgcaagctctgcttccctgggccacactgagggctggggccagctccctggatgggggtggagtttaccagcagcctggggacagcatgtgtcctttttaggaaatgtccttggaggaagtgttcatgtgtggcgctggtcagcagctagtcccgcttccaggacactggtcagagttaccgatgaggcctgggggctcctgcttggaaacccctccagctcctcccatttgcccagacagagcgacagatggcaccaatgcatgctggctccctcattcctgcccaggggctgtggcttacggccagcaccctgtacctgggactcagcccttatcccccctctgctatctgtgctgggagaggggcttcggagggaaacagatatgaggacactggcaccatctgggcctggtggcagggccatgggaggttggaaggcacccacatccttaaagccatcagtagctatagtgggtgcccacctgcatgtgaaggggaggcagttctcaatttatttcaataaatccttatgatgtgccagtg

SEQ ID NO: 69 - DNA, 2103 bp, Homo sapiens
tttattcctgagaaatggaacttattgtgaaatgattgcaaaacccacatttaaacccatgttttctgattcccactgtcatgtggagggctatcctcctcatagtctgctatgtccttttttgtctttctccttctcatcctacaaccacccccagccacatgcagggttagtcctatatttgttcctgtttctgctatatttgcaacttaacttatggatggaaacatggagcctcactgatttctggcagagatctgtctcatgtgctgacaaacactccctggcactgggcacccgtccaacagcaggtgccttgctcggcaaacggctctgtagttgcttctcaaaggaggcaggttgaggtccagcatgttcttcctgctgcctcgaggttatgatctagcaccagcatttctctcaccaggtgaaaggaagtgagactaatgctgcaaggttaccaacactaaacatgggaggtggctatagggagcatctgtggcagcttagggattcttagcttgatggatgggcaagaagataagatgagacatttgaaattgtttacataggactattgtccatgaaactgagtagttgaccttcaggtcacgatgaaatgtctgcgtgttttctcaaggtgagagtgagctacaagatgaggcttcaaggacctaaatttgtatcattataggactcattgaggcaaattattcttgtttaacaatatgcgtttatttttgtacattacacactaatttagacacatatagtatatacgtaatggttatagctatagatgctatagatgagcaaatagaaggtaatgaacacagggcttaaagtttataagaggcatattgccttaaagttaataaaaggttatagacacagaaaaatgaatggtgggaccctccatgaaatggatggcacaaaagcaggaaagcacaagtcatgtagaaaggcagtgaaaaacaatttttgagagatcctaagggtttgagtaggggtataataaaagaaaatgttgtaaaaaatgacatgcagaattaaaatatctgagtgaggtctatcttctttgattgacaagccaatgaatgtattatttgttagaggagtgacttgatttgaaaaacatttaaaaatattaatctggcagcatgcaaatgatacattggaaatatagaggtcagagacatcaagtttaattagaaaagtttgtcagttattcaaaaataagaagttataggacctaaattagagtggtggcactgagaaaagaatgtaaggatgaatagacaggtggatggaagaaattccgcacagaaataatggagcagctatggcaataaattcactttgtgggtccaaggataaggggttaattatgatgcacaggttaggtatgggattgatttgactgcaatgtaattctctcagttgtgtcataggggctaatttttttgatatgatcaactcatattgtttgaccttagctgattgggaaaatggtggcataactgaaaatatgaagaaaagccaaaaagcagagatatcttatgggacaagggagaaaattttgtaagacaagctttaggtaatagcagaacactgataccaggctctgggaaaggcagaactggtgctcagaaaaggtaacaagattgaagtggagaccacatgttgaaagtcaagtgtgtccaggacaaagagcatggggaccacaattaagcctttgtaacaccctccttcaaaggttgggagggaaaaaaagtagttttcagagatgtcacagttgaagaaatgggaaaaagcaagatttcattttgctggggacagaatttgaatttcaaaggattaaggagaaagtaagtggaaacatgaaagtgacaattatgaactaatgttctacagcagaaaattaattacattcatggtgttgcacataaaaccttattcaggaaggagacttggactgcctcttatttccaaccccatcccatgtttatttcactttttcatttgcatacaatactgttaggcgtctgatttcatggttgctgtattcatggattcagccaaccatggctggaaagtatttgg

SEQ ID NO: 70 - DNA, 1648 bp, Homo sapiens
gtggtgaactccttgtctctatggcgactggacgcggtcggatcttgcagcagcactggctcggcctccagacgctgcgcgggcccagcaggggcggtggcgcggcccgggggcgcgccagggcctttgggtgcagaaaggggccaggggtcaagctttctgcaggctctgctgccctgaggtgccatgccggaggtggacagcactgggagagctctttctcctgctgttctgggttcctggatggaatgccttcagaaatcttgctgaagatattttcctacttggatgctgtgagccttctgtgtactggatgtgtgagcaggcgcttttatcatctagccaatgacaattttatttggatcggaatctactcaactgctttttcacctgcaagatcaaattggaaatttaattcagtagagaagatagctatgtctatgagctttctgtcagttcaggataaagaagctggttattggaagaaagaatatatcacaaaacaaatagcatctgtaaaagccgcactagctgacattctcaaacctgtcaacccttacacaggccttccagttaagaccaaagaggccctcagaatatttggtttaggttgggcaattatactgaaagaaaaaggtggaaaagaatatatcatggagcatgttgatctttccataaatgacacatcagttactgttatatggtatggcaaaaaatggccatgcctagcatcattgtcaaccttagatttatgtggcatgacaccagtttttaccgactggtataaaactcccaccaaacatagactccgatggcattctttaattgcaaagtacaatctgagtcatttgaccatatctaccatgattggctgtgacagactcattcggatcttctgcctgcaccctggcctcctggtgggagtgtggaagaaggaggaagaactggcttttgttatggcaaatcttcattttcatcaccttgtggagaggagcacattaggctcggctactatcccctatgaactgcctccacatagcccctttttggatgatagccccgagtatggactgcacggctaccaactccatgttgatctgcacagcggtggggttttctacctatgtggtacatttcgcaatctcttcaccaagagaggaaatattgaaaatggacatgtgaagctcattgttatacatttaaaaaataacagagaacacctacctcttattggaaaagttggcctctcgtggaaaactgatatttttgatggctgtataaagagttgttccatgatggacgtaactcttttggatgaacatgggaaacccttttggtgtttcagttccccggtgtgcctgagatcgcctgccacaccctctgacagctctagcttcttgggacagacatacaacgtggactacgttgatgcggaaggaagagtgcacgtggagctggtgtggatcagagagaccgaagaataccttattgtcaacctggtcctttatcttagtatcgcaaaaatcaaccattggtttgggactgaatattagcagtaggtggcaaattattgttgttatttagttgtttatttttgactggctttgttcttggtgttgaaaattaaaataaagcaaatctgcagagt

SEQ ID NO: 71 - DNA, 1337 bp, Homo sapiens
tgtttgttatggtgtttggggtgtggcccttttgtgggatcagtggcatttctggggttgcaccgacccgctggtggagtcccctggctgtctttcccatcttacactccggctctctctgactatgtggggacttagaggttggggaggggaagaggccagggaaggtgcccccagtctagtaggcacccgactcactgcttgggccagagaggcggggctctggtcatcctgcccaccacccgtgctccccctcggtgggttggccccagagcctccaggagtgcccccagagccctgcagaagagacgccctgctctggcacctctggcctggggattctgtccccatccatcagcaaggccagctgctccacctccagagcctttccaggctcctggcttctctccatgttctgggtccaagcctctgtcccctcctgccggtcccctccagggccttctacccactccttctgaccacccactgcacagcagctggggtcacctcgtgaacccaagtcagatcccgacccgcatggctccagtcgcctctgaaacccttgtcccgggtccactcctgtacccctttgttcacagcagccacgctggcctccttgctgcttctggaacactccacgctccacgctccatcctgccatggggccctggctgtgacctctgcctgacctgctctttcctctgctcaccgctgcctcctggtcatttaggtcccagctcgaatgttatgatggggagggacacccttgctaagggccttccagtcactctgagacacattgtcatgctttctttggaagagatggggtcttgctgtgttgcccaagctggatttgaactcctgtgctcaagcgatcctcctgcctcaacctccctagtagctgggactacatgcttgtgtcaccacacctcacatactcgaaacgttgtcatcagtttcctcctggatctgtgggttccccttcgaatgtaactctcgataacctgccatgcccagcacctgaaaccatgcgttcctgagagatggttgtggtttcagtgtctgagggctgggactctctaggtcaccccagcttctggctgtgaagacagccctagccaggcctcctgtcaagtcgcactgctggccccccactcaccctgagctcttcctcatagcccctatgcagccctgagtccaagctcagtggcggtgacccccaaagaccagaaccagctggttccaaaagatggaagtttgtggctggaggagctagtgttttggaagctgtcatgatgatttttcagtctacggctattaaactcatgacttgtccg

SEQ ID NO: 72 - DNA, 1399 bp, Homo sapiens
gaattccccgctccggctccaagatgtcagcaacgctgatcctggagcccccaggccgctgctgctggaacgagccggtgcgcattgccgtgcgcggcctggccccggagcagcgggttacgctgcgcgcgtccctgcgcgacgagaagggcgcgctcttccgggcccacgcgcgctactgcgccgacgcccgcggcgagctggacctggagcgcgcacccgcgctgggcggcagcttcgcgggactcgagcccatggggctgctctgggccctggaacccgagaagcctttttggcgcttcctgaagcgggacgtacagattccttttgtcgtggagttggaggtgctggacggccacgaccccgagcctggacggctgctgtgccaggcgcagcacgagcgccacttccccccgccaggggtgcggcgccagtcggtgcgagcgggccgggtgcgcgccacgctcttcctgccgccaggacctggacccttcccagggatcattgacatctttggtattggagggggcctcttggaatatcgagccagcctccttgctggccatggctttgccacgttggatcttcaaagttataactttgaagatctccccaataacatggacaacatatccctggagtacttcgaagaagccgtatgctacatgcttcaacatccccaggtaaaaggcccaggcattgggcttttgggcatttccctaggagctgatatttgtctctcaatggcctcattcttgaagaatgtctcagccacagtttccatcaatggatctgggatcagtgggaacacagccatcaactataagcacagtagcattccaccattgggctatgacctgaggagaatcaaggtagctttctcaggcctcgtggacatcgtggatataaggaatgctctcgtaggagggtacaagaaccccagcatgattccaatagagaaggcccaggggcccatcctgctcattgttggtcaggatgaccataactggagaagtgagttgtatgcccaaacagtctctgaacggttacaggcccatggaaaggaaaaaccccagatcatctgttaccctgggactgggcattacatcgagcctccttacttccccctgtgcccagcttcccttcacagattactgaacaaacatgttatatggggtggggagcccagggctcattctaaggcccaggaagatgcctggaagcaaattctagccttcttctgcaaacacctgggaggtacccagaaaacagctgtccctaaattgtaatgcatttgtctgttgttgacatgagagattcaagatcagattctagtgttcagtaaccctatgtgaatcagatgtctcctggataacattaaagccatgtctttgtcatt

SEQ ID NO: 73 - DNA, 1710 bp, Homo sapiens
aggaatgggctgatttcctgagtacacattaatctgagctccctcagccctaggggtagggggattgggggcacaagatgggtggagccagatagggaagattcccccagtgttgtcctgctcccagtccaggtttgggacaatgccggcagcgtttccctgtgtctttcccccacaaagtctccaagtctttcctcaaatgatcgtcaaggtttgggagaaacaatctcttcctctgcccgggttgcgtggatctccagtggaaaggctttatctaccaagaaatgaattggataatccacataaacaaaaagcttggaaaatttatccaccagaatttgccgtggagatactttttggtggattctcactctgtcacccaggctggagtgtagtggcacaatctttgctcacttcaacctctgccttctgcgttcgagcaattctcctgcctcagcctcccgagtaactgggattacagggacagtaagtggtgtttcctgggagatgctacggtgttatttttgcactacaagggctctgaagactgccaggcttgaagtgaagaaccacgtcacctgcctatcccagccaggtgacagtggacaaggggcttcacctctgagctgttttccagctgtactgggcacattcctcctctcaccctgactcacaaggtgttagcaataatggacactccactatcttctgccacactctgaacaatacttcacttccatcaaatggattcatcccaaaggtaatgcccatcgcttctggaggaagaaagttcctttctgcagaggcacctgctgtcacttgctcctcacgaattctgctagagctacactatgtgtagacatatggcagcgtgctcctcagcctcttccatgctggtttgtccactgaatttatcttggcgatttttcctcgtgattacatgtagagctgcctcattatctacagtagctgggatgcacatttcacatgtttatgtacactgacttccaaaaggttgcacttacagtatgtgagtttctaaaaaggagagaccatgttggcagttctccacacagaagacaaactgagaagggagagcgggcacgaattactcatctgtccacagagatggtgagacagctcagtgtgggaagctgtataagggaagtatatacaattctacctgaattggaagtaaacagggacattgcatttctggtattcagctggagttgaacacgcttcacagatgaggctcactatggccaagtcccagggctgaggtccagggaggggcaggctgagtcagcccatcaattcatcaacagagggaacaggagaggacaggggcaggccagcctggaacctagagcctttggatttctatttttacttcttacaacgaggtggtttaaaaaaagaggagggggccaggcgcggtggttcatgcctgtattcccggccctttgggaggccgagacaggcggatgacatgaggtcaggagtttaagaccagcctggccaacatggcaaaaatcctgtctctactaaaagtacaaaaattagccaggcgtggtggcaggcacctataatcccagccactcaggaggctgaggcaggagaattgcttgaactcaggaggcggaagttgcagtgagctgagatcgcaccactgcactccagcctgggcaacagagtgagactccatct

SEQ ID NO: 74 - DNA, 2905 bp, Homo sapiens
gtccgcggggttgagggaaggggccgtgcccggtgccagcccaggtgctcgcggcctggctccatggccctggtcacagtgagccgttcgcccccgggcagcggcgcctccacgcccgtggggccctggaattcctgagagaggggaggggacagccctccccgccctcaccctgccctggggctgctctctcggcaggaccaggcggtccagcgaaggagtcgactccagcgaagagttttgcggtgctccgtggggctgtcctgggactgcaggatggaggggacaatgatgatgcagcagaggccagttctgagccaacagagaaggccccgagtgaggaggagctccacggggaccagacagacttcgggcaaggatcccagagtccccagaagcaggaggagcagaggcagcacctgcacctcatggtacagctgctgaggccgcaggatgacatccgcctggcagcccagctggaggcaccccggcctccccggctccgctacctgctggtagtttctacacgagaaggagaaggtctgagccaggatgagacggtcctcctgggcgtggatttccctgacagcaggttcgagcagggagaggaaaggaggggcaaagaggtgagggacaggggggacaatggctttccctctgtcccctgccagctcccccagctgcaccctgggcctggtcttgcccctctggagtgacacccaggtgtacttagatggagacgggggcttcagcgtgacgtctggtgggcaaagccggatcttcaagcccatctccatccagaccatgtgggccacactccaggtattgcaccaagcatgtgaggcagctctaggcagcggccttgtaccgggtggcagtgccctcacctgggccagccactaccaggagagactgaactccgaacagagctgcctcaatgagtggacggctatggccgacctggagtctctgcggcctcccagcgccgagcctggcgggtcctcagaacaggagcagatggagcaggcgatccgtgctgagctgtggaaagtgttggatgtcagtgacctggagagtgtcacttccaaagagatccgccaggctctggagctgcgcctggggctccccctccagcagtaccgtgacttcatcgacaaccagatgctgctgctggtggcacagcgggaccgagcctcccgcatcttcccccacctctacctgggctcagagtggaacgcagcaaacctggaggagctgcagaggaacagggtcacccacatcttgaacatggcccgggagattgacaacttctaccctgagcgcttcacctaccacaatgtgcgcctctgggatgaggagtcggcccagctgctgccgcactggaaggagacgcaccgcttcattgaggctgcaagagcacagggcacccacgtgctggtccactgcaagatgggcgtcagccgctcagcggccacagtgctggcctatgccatgaagcagtacgaatgcagcctggagcaggccctgcgccacgtgcaggagctccggcccatcgcccgccccaaccctggcttcctgcgccagctgcagatctaccagggcatcctgacggccagccgccagagccatgtctgggagcagaaagtgggtggggtctccccagaggagcacccagcccctgaagtctctacaccattcccacctcttccgccagaacctgagggtggtgggggggagaaggttgtaggcatggaagagagccaggcagccccgaaagaagagcctgggccacggccacgtataaacctccgaggggtcatgaggtccatcagtcttctggagccctccttggagctggagagcacctcagagaccagtgacatgccagaggtcttctcttcccacgagtcttcacatgaagagcctctgcagcccttcccacagcttgcaaggaccaagggaggccagcaggtggacagggggcctcagcctgccctgaagtcccgccagtcagtggttaccctccagggcagtgccgtggtggccaaccggacccaggccttccaggagcaggagcaggggcaggggcaggggcagggagagccctgcatttcctctacgcccaggttccggaaggtggtgagacaggccagcgtgcatgacagtggagaggagggcgaggcctgagccctcacacatgcccacgctcccctgacactgaagaggatccacaactccttggagaaacaccctcacgtctgttgccgcacacattcctctcagctccgccccatacccgtcactacagcctcacctcccacccctgtcactacggcctcacctcccacccctgtcactacagcctcacctcctacagccttaagtcccaggcccatgtctgcctgtccaagggctcaagactttctaactgggatgtggtagagggactgaaggtacctttgggggcaacagcaccctagtttcattctcaactctagccctgcacactcacctgtggcacggaatgaaaacagagcttcccgtgcaaaaagggtcacgcctcccacccccgccccctccctgcacctcctgtcctctcccagttcattcctggaaccagccaggccaggcaaccagtggcccccaaaggcaggcaggatcctcaggccccagccgcgggaggctggaagggctggcagatcgcttccctcatccacctccaccggtccaggtctttgctgctgtccccagacctcctgtgacaccacgccagatcacagggcaccaggccagagatagtcttctttttgtcctttctggcctctggctagtcagtttttcatagccttacagtatctggctttgtactgagaaataaaacacattttcatatttggttattttc

SEQ ID NO: 75 - DNA, 2008 bp, Homo sapiens
agtccgcgggccgcgccgccgctcccgccgctcccgccgctcccgcagccgccccgccgcccgcccggagccccgcgtccctaggcctggctcccgcctgcccgagacccgcccagcctgccccgctcagccgccagagaagatgcggctgctcccggaatggttcctcttgctctttggcccgtggctccttaggaagcccaggcctggactgtcccttcctccggccagatcctgggagcaccctgcctgacccaggtggtaggggaaaagcaacgggccagcctggaggcccaggggaggtgcaccctgcaatgcggctggggggctgacagcctgatcctcccccaatcccagcagtgtcatccccaaagagccactccccgaagtggagtttgttgcccccagcagcaggaggccacctcaactccctgcaggccgtcagtgcccagataccagagtccggaaggccgcagtacctggggctgcgccccgccgcggccggagcgggtgcccccggccagcagctcccagagccaaggtcttcggacggcctaggcgtgggccgcgcctggagctgggcctggccgaccaaccacacgggggcgctggcccgggcaggggcagccggggcgttgcccgcgcagcgcaccaagaggaagccgtccatcaaggcggcgcgcgccaaaaagatcttcggctggggggacttctactttcgggtgcataccctcaagttttcgctgctggtgaccggcaagatcgtggaccatgtgaacggtaccttcagtgtgtatttccgccacaactcgtccagcctgggcaacctcagtgtcagcatcgtgccgccctccaagcgtgtcgagttcggaggagtctggctgcccgggcctgtcccccaccctctgcagtctacgctcgccctggagggggtgcttcctgggctggggcccccgctggggatggcagcagcagcggcggggccggggcttgggggctccctcgggggcgcactggcggggccgcttgggggcgcgttgggagtgcctggggccaaagagtcacgcgctttcaattgccacgtggagtatgagaagacaaaccgcgcgcgcaagcaccgaccgtgcctgtacgacccgtcgcaggtgtgcttcaccgagcacacgcagagccaggccgcctggctctgtgccaagcccttcaaagtcatctgtatcttcgtctctttcctcagctttgactacaaactggtgcagaaggtgtgcccagactataacttccagagtgagcacccctacttcggatagcgcccctccccagccagtcctgagcctcccgccaaatcccagcctcactaggtgggacccccttcccagtgttctgccgctcctgtggccatgtcgcccactccttccactctgggggcggaggggaatggcttctcgggaccctcagctagcgtgggtgcccttttccttatgcggagtgcccgcaaggctggggtagccccctccagtacaccccaaagtgaaagggataagagtgcagccccagaataggcggggcttggaggcggtcccaatgtcccctgggtccacagtgggtccccttttcacccttggcgctaggctgcgcactccctttccccgcagctttaataactcctggcctggcaccctcaccccaccctgactttcccatcccccagcgcttgtcctgcttcaccctaccccgcctaagactgtaaaggcctaaaaacctcggcctgtcctcccaccattctgcctgccatatgcctgtccccttttcctccaaaccctattagggtaccggaagcagaacccctgggctgaggccctggccctgcccccggcccctgcccctgcccgcccccctccagtccaggcagtcgagctccacctgccctctcctgctgcttcctctcggtgatattttttctacgccaaaacagacgggaaagggaacaaaataaagtgaaatccaatac

SEQ ID NO: 76 - DNA, 2934 bp, Homo sapiens
tagacagagttttgctctgttgcccaggctggagtacactggcatgatctcaactcactgcaacctccgccttatgggttcaagcaattctcctgcctcagcctcccaagtagctgggattacaggcacccgccaccacgcctggctaatttttgtatttttagtaaaggtggggtttcaccatgttggccaggctggtctcgaacacctgacctcaggtgatccacctgccttggcctcccaaagtgctgggattacaggtgtgagccactgtacctggcccgtttgctactttttcttggctgggttttggttatttatagatatcttggggattttccgatttctgtaagtctaatggagcaaggagggtgttcctgtattccttttttgctgtcacttttggtagagaagcaagggcgttccgtgttcctgtgcatgccatatgtctgtcctgtagcatcacgagtgacctgaagcaggaggggcctgcagcggaatctcccttctcagctaggacaaggttcgtggcccagagttgttggagaggatggtggcactctgtgcagagcaggtgtcagtgaggatgtggtgctggcttgggcaatggtgctggccgggagctgactgcggcctgcttcctgccgtggtggtacctgggtcagccatctgccagtggcttctgctggggtgtcttcctgagtggctcacctggtgcttgcagggcaggtggataagggaatgctgttgccatggtttgaacaagcagagacagatttggtgtgccttacttgtagatacatacatagaggaatctcagatttcataacgtcttgaggattgtctgtattcatttcttaccgggagggcaggctccagggaccgagtccttgttccttgtttgttaggcactatcgctcttgtccatgtttcaagaacttggggtgcagtgtgtttcgtgtgaatcgggggcatctgtagacatccacatggtaaaaacctccgttctgctttgggtattaaataaagcacagatccgagatggcaacaaactgaaaggaaggctgaagcggaggcccccactgtgaatgcaggaaagaggttccgtcagcacagggggccgaggcctcaggatggagctgcctggggagccactttgctgaagagggggccgtgccacgtggtgccgcctgctgttcttagacaggacccttgtacctcactgaatctgctgtggaaggacattctgaagtggcgtttcagtggtgaggtggcagtggtgggattaaaggggcccggctcgtagagcagccacgcgctgaagggcacagcagacagcgtgcatgggctgagaggggccgtgggcctggctctgctgcttccttaggtggagttttcagtgactgcagaactctgcacagctgcttttcattctcacgtccgcccccgcccaatctttgaaactaactttgattattccctcctgggtagctctgtcggtgctgtgtaagtttggttttcaattggttctcagcacccagggggtgaccacctcaaccccatctctactatgccaggggctcatcccgctcacccagcctcgccactgttctctcgtgtgagcctcacacggcaggcccggttccatgcccctgcttcccccttgctgggaacgctgtcctcaggctcccctgcctgctctttctttagctttcaccttctccagggccttctgttctgtccagcccagggcagtcctctgaaccactcatgtacgagctcacagtgtttggtgtttctaagacctggcctcttagagtgtgtgtgaagatggtgtatgggagatcttggacctctaggtgcaggtcacaaagaacacagagcttggtgcatgacatgtagcaggatccagcggttgaatggatggtggtgtgtgactctggggaaagagatccgtccatacgcattcagcgtttccctccccagcttcagcacctgcaccctggatcccctggagagcacgatgcgctcgcagcatgccggcctggtgctcgtggatcgtggctgcctaacgctgcctctttttcagattctcattcagattgtggatgcctcgtcagtcatcacttgggatttcgacgtgtgcaaaggggacattgtgtttaacatctatcactccaagaggtcgccacaaccacccaaaaaggactccctgggagcccacagcatcacctctccgggtgggaacaatgtgcagctcatagacaaagtctggcagctgggccgcgactacagcatggtggagtcgcctctgatctgcaaagaaggagaaagcgtgcagggttcccatgtgaccaggtggccgggcttctacatcctgcagtggaaattccacagcatgcctgcgtgcgccgccagcagccttccccgggtggacgacgtgcttgcgtccctgcaggtctcttcgcacaagtgtaaagtgatgtactacaccgaggtgatcggctcggaggatttcagaggttccatgacgagcctggagtccagccacagcggcttctcccagctgagtgccgccaccacctcctccagccagtcccactccagctccatgatctccaggtagtgccgcgctgcctgcacctagtgtgcagaggggacggccgccccacctcggacagccagctgcacccgcccacccagcggcgacattgtacagactcctctcacctctagatagcaaatagctctcagatggtaaacgtagtcgtttgatcccaaaactaccttggcaggtagttttaactctgatcctaacttaactcaatagccatagattttgtatacgttgtgcacaaaatccaaccagagcgcaagggctctcttgaaagaaaagtagtttctgtaccaattaaaggattgacgtggtctcag

SEQ ID NO: 77 - DNA, 1997 bp, Homo sapiens
tttcactaacttcactcctttcattagaaatagggcacgtgttttgtaactcacctcaaagctgaatgccaccccccatcctggcaggccattcaccatctttgagaagaatttaataacagttcctggagagtttcttataagcattttacagttttcctaaatacctcatgagggctggagcaattccacagcaactaggaggttatgggccccattgcagagatgttgaaactgaggccccactaaatggcgtgacccgagacatggtcccattttagtcacctgcatgaacagtaactttctccatctaatcccgcccaggtgagggctaaggtaaggcaaaggaggcacttggctctggcacaaaatttaaggagatgctaaaaaactcagtcgtcaagatcaatcctatttatatcagtgtttaaaaaataattgatataaatatccatgctgaacaaaatatccaattttaaaacaaaggcagaaacagcaacggggccatgcgtagccctacaggaaccgaggcaagagggaaaaaattggcaccactgacctcacctttacttagaattttggtatcttgttaatcttgggtggatattttgcattaattttaaaattgcattaaaatatgatctaccttgatgactgagtattttgatgtgtaaggcaccctaattccagccccagctccacctcccaatttctgtgaactactggaacagctgacccctgccttcaggtccccaggccctggggtccttggatgccagggcctttcactcctgagagtcaagagagcagctgaggatggcatttgatccctgcagtctatttttgtgcctgcccttcagcaactgataaaatgttgctctcggtagagctgatgtgttgaaatggtgagtgttgatgtcaggtggtttgtgtgatcatgtatcttcattcttgaccttgtagaggggcctggaaccaggaaagaaacagaactctcagcgtttttgccccccacagactttgacaaaacctgaaattgttatctggtgactgaggctgccaggaagcttggtcttgtcttggggctgtgtggaaaaaatgcacatgttgcgctctcttgtttttgtacacggtcctataccctttacaagacactcattttgtttcttgaacgcatgtttattgagcacctactatgtgccaggcattatgctgggcatttgggatacagtgggcaacaaggcaaacccagacacagcccctgctcacatggagctgccagttgtgggaggcagcagtaaacaagtagataaattagtaatgggggtagttctggagatggatggtggtgatggctgcatagcaatgtgggtgtacttaatgccactgaactgcacacttaaaaatgtttaaaatgggccaggcatggtggctcatgcctataatcctagcactttgggagaccaaggcaggaggactgcttgagcccaggagtttgagaccggcctggacaacacagaaagacccctatctccaccttagatagatagatagatagatagatagatagatagatagatagatccatctctaccatagatagatagatagatagatagatagatagatagatagatagatagatccatctctaccatagatagatagatagatagatagatagatagatagatccatctctaccatagatagatagatagatagatagatagatagatagatagatccatctctaccatagatagatagatagatagatagatccatctctaccatagatagatagatagatagatagatagatagatagatagataagcaagcaagcaagctgggagtggtggtgtgcacctgtagtcctagctactaaggaggctgaggcgggaggattgcttgagcccgggaattcaaggctgcaatcagccatgatcatgttactgcactccagctcgggcgacagagtgagatcctttctt

SEQ ID NO: 78 - DNA, 2130 bp, Homo sapiens
atttaaaaacccaaattatcaaaccattaagaactcattactggttctcagcctcctccagtactagcctcagtgtggctgctgcataagtatctgtagcctgtctacctcctgcagtggggccgctcgcctcttccctgtctactgctcaggctctcccacttcgtggcatccatgtaaagtaggtggcagggcagagatgtcactctcattcaacagggaggatgtctgttgctcagagaggttgtcctgaggggctgggtgattcctgggcctacattcttcccgaggctccaggccgctgtctctggaagtaaaagagccttgtctgaccttaatgcaagcagtctgtttgaacccctgtaggctgcattcaggagacagaaggtgtctgggccatcctgggcggccggtcagcgttgctaggcaggctcggctgtctggccgggacttgggcctgggtggcttttgagaccagtgaagaagggagagccggcctcatgccgatgcggcttgtggcacggctgggatgtgagggaggactcagatctacacacagaaacccctcttctccccgccctcccccagctcctacctgcctcccacgcctcaggtgtggctgcctgtgggaccatcccccaacccctttcctcgcacctccttgtcctcacccagttcctgcagtgtctctgacccacgcctcccgcctcctggccgacttgcccaggaggtgtctctggctcacctccgtctgttcatcaccttcctccccagtgtttccacttatcttggatgttttagattgaaacagcctgattcccggaagaatcctcttcattcattgctagtgcttcccctcacctcccactctccacttcccagtttgcaaatgtggctttcgcccaccaagtgaaagcggactgagagcagcccttggggacggcccggtgcctggctgcaaggccgcgctggggctctgtcttggtgcacatggcttgaccggactttccctgcttcccaccacttccctcactcccagacctccctcattctttttgtctcttctttttgcctaaagccagtccttaacaccctattcttcctctgcaggtggcttgcagacttttccccacctttggggctcgtggtggtggagagggcagctggtgttaagaatgtaggttaccaggcatgacccggcagatgcttgcccagtagttctggaggaaggcccgggaatctgcaaatgagcgcattccccaggcagttcccatgcaggtgatccacggaccacatgttgagaaactgcagtcacccttagggccacaccgtccctctcctcgctgtcccctctctgtagtgactggccctgaccttcaggagtgcactttccactctaccaggaagccctatgacatcctcaggctccccagacctgcagcttgcatggggcccctcccttcttccacacccaccctccgtatggtcccctgctctgccctcgtgctttgctggcccctgcccgctactcccactctcagacacccaggggtggtgggccctaactggctggcccctcccagcgctgccctctgccgtccagatgctgcagtgtggccagatttaccttccagtaacatacttctagtcacccctcctcctgcgaagtgatctgcagtggctgtttgaccagaccacaaagttcacatctcctgagcttagtgtccgtggctgtccacctcccagccatacttgactgtccccaaactctccctgcagccacatgtttcccatgacctgtgggctctgcagatggacctctctccgctagagatgcccttctcccaaatggcttccctcctggaaggcccagcctgagtcctcgtctcctttccagtgcttctgccagaagcatccccatgatgttgtgaccgcacagcactttgtgtctcgctttgagcacttgccactctggctggtgctgctgccactgattgtgtactgtcttgctgccctttctagactgtgagctcctcgtgggcagggaccgcctgtgttctctgtatttcccacggcgcctagcacagtgccttgcacttgataggtgcttaataaatgtctgctcaactg

SEQ ID NO: 79 - DNA, 2602 bp, Homo sapiens
gctactgcgaggagccggcgcagggtggcccgggaggggtgagcagggtgccgctggctgctggggtctgcaggtcaccgagtccccaggagaggggactcctaagaagccacctgcctgtgtttacccggcagcgagcgcgcaggcccccgcgaactcctggcagcgctcaggaaaggccgttgcgcctcgcgaaggaaacagagccgttgaccatggttgcaactggcagtttgagcagcaagaacccggccagcatttcagaattgctggactgtggctatcacccagagagcctgctaagtgattttgactactgggattatgttgttcctgaacccaacctcaacgaggtaatatttgaggaatcaacttgccagaatttggttaaaatgctggagaactgtctgtccaaatcaaagcaaactaaacttggttgctcaaaggtccttgtccctgagaaactgacccagagaattgctcaagatgtcctgcggctttcctcaacggagccctgcggcttgcgaggttgtgttatgcacgtgaacttggaaattgaaaatgtatgtaaaaagctggataggattgtgtgtgattctagcgtcgtacctacttttgagcttacacttgtgtttaagcaggagaactgctcatggactagcttcagggactttttctttagtagaggtcgcttctcctctggtttcaggagaactctgatcctcagctcaggatttcgacttgttaagaaaaaactttactcactgattggaacaacagtgattgaagggtcctaaaaagggaaaatatataaagattatttcatgattgggtagtaaaactattcagctagtcagctaaagtcatttgtagtttgccccacctgccctaaataagaaaccccaaatgtagtctcttttctttctgtgtttcacattcatagcaactgcagctaacaggctgattttctggcctttggagaagtgattcaaaatagtgtagattttctgcatagatcccatttttgtacagaattgaatgggatggaataggtaagcaaaagtagaagcccatttgagttttacatttgattccacaatttggtttcaggtaggcttggtaatagactatataaaccagatttgcctattttgattttcatatggcttttttttctgtaagttttcagaggattttttaaatcacagaatcatactaaatgatatttagcctatcaaaacttccaaaagcccacaccaccagttcctgactcaaatttgaagggtttttagacaggagggtaggattaagtaggtgagtttaattaaagcttaaccctaggtaagagtaaatgagaaatattacggcaataatggaactgcttcactgtttcttggtgacttcctcactctaatgttttaaagaggcaacaaaagcttgtggtgccatttcagtaaccacggtgttgttttagatgcctttataagctcagtttcccctgttcttaagtgttgaatactgtctttaaactagaaaaatgcaaaatattgaactgatatttttgtgtgtagttgattactcttccattgagtgaatgatgaatacctgtgaggataggaaattagttctgagatctagtccctctctgattcacttagtaatctatcctcttttcagtattacatgtgcttaatctcagatgaaccatttcaccatggcagtgttatctcatctctgggcttttctgggaattgaagtatctctccttaaccccaattgtcaagggtagtagctgtatactaccactttgaattattgaaacgggtcaatttacgaagtctgcattggctatggagatatggtttatagtacagcctagagaatgaaactcaccgtccagataaccatgcatgcacccagattttttccaccttggatacctgtcactagggaataataaaggcctgattttttgtcttattccaactaagtagatcattatctctttccttttttatgttaatgagagaatttagcctccactcaacaatgttcaattcagcaaggctttcatatccttgctgtgggtcgtggataaggagcttattcaggtttcctgccctagctattagctccacttcacatgctggagaccggcgtagggacagatgtattcatcctggtgttactgaaaaacaggtgtgatcctgttactgatactataagtgacctaaaatgtcactgttcaaattagccagtgttctaacaaactaaactcttcaaatgcttggaaagatactacaaagccaatctttatagaattgggccaagataaatctatgttgttttgcatggctattgttaagctccaaaggttcactgtgtttctgccgctgtcctggagttgtcaccactgactgggcaaggcttcttgggcatggatgtagaactgttgtccttttcccactaacagttatctttgactctcttgcctgttatgcttacaaaatggtgatggcttatggaaggctgttaaattaatattcctgttaaaggaaattaaagtttgtctatttttgacaataaaacattatatattttt

SEQ ID NO: 80 - DNA, 2025 bp, Homo sapiens
gtatcatttcagtgaaggtcactccagtctttcatggaggccaaactaagggtgtaaattaggatcctcactgaagtggcgggaccctaagaggctttttcctggccccttagttgtgggttttcctgcgggcggcgcagccggttcccatcagaaccgcccagaggcggacgctgccttcctggggtgacggagcagcaggaagcgttttcggatcctggaatacgtgggcggcccgtgggaggggctgaggcgcagtttcctactcacccggatcagaatcctccgcggtgctgtttcaagagagccggattccagatcgcgctccagcccggactcggaattcctgccctgcgggtctgcattttcataacgggcaggtgtgagtgccctgcagctggagaccagaagcctgaaggcagctcggcactccccagcccacagcgccgttattccgtttctatatcagtaaacacatttcattttccgtagaccagggcggggtgacgggtgatcccagtcctcgcagtgaattccgggcagcaaaattcaaaacacatgcgggcaaggccgggcacggtggttcacgcctgcaatcccagcactttgggaggtcgaggcgggcgatcacctgaggtcgggagctcgagaccaacctgaccaacatggggaaatcccgtctctactaaaaatataaaattagacgggcttggtggtgaatgcctgtaatcccagctagtcgggaggctgaggcaggagaatcgcttaaaccttggaggcggaggttgcggtgagccgagatcgcgccattgcacttcagcctgggcaacaagagggaaaactccgtcgcaaaaactttcgggggcggagcggagccccgccctgggttacgtaagcgaccgcgctgggccgtttctctttcttttccggaccctgcagtggcgcctaaagtctgagagagggaagtcgcctctgtgctgagccccacagtcttcgttataacctcacggtgctgtccggggatggatctgtgcagtcagggtttctcgctgaggtacatctggatggtcagcccttcctgcgctgtgacaggcagaaatgcagggcaaagccccagggacagtgggcagaagatgtcctgggaaataagacatgggacagagagaccagggacttgacagggaacggaaaggacctcaggatgaccctggctcatatcaaggaccagaaagaaggaatttcttgaaggaagatgccatgaagaccaagacacactatcacgctatgcatgcagactgcctgcaggaactacggcgatatctaaaatctggcgtagtcctgaggagaacagtgccccccatggtgaatgtcacccgcagcgaggcctcagagggcaacattaccgtgacatgcagggcttctggcttctatccctggaatatcacactgagctggcgtcaggatggggtatctttgagccacgacacccagcagtggggggatgtcctgcctgatgggaatggaacctaccagacctgggtggccaccaggatttgccaaggagaggagcagaggttcacctgctacatggaacacagcgggaatcacagcactcaccctgtgccctctgggaaagtgctggtgcttcagagtcattggcagacattccatgtttctgctgttgctgctgctgctgctgctgctgctgctatttttgttattattattttctacgtctgttgttgtaagaagaaaacatcagctgcagagggtccagagctcgtgagcctgcaggtcctggatcaacacccagttgggacgagtgaccacagggatgccacacagctcggatttcagcctctgatgtcagatcttgggtccactggctccactgagggcgcctagactctacagccaggcagctgggattcaattccctgcctggatctcacgagcactttccctcttggtgcctcagtttcatgacctatgaaacagagaaaataaaagcacttatttattgtt

SEQ ID NO: 81 - DNA, 1896 bp, Homo sapiens
ggcagcgaagccgcgcgcccggagcaggagcctcccgttgcggagccggtcccggtgtgcaccatcttcagccagcgcgcgcccccagcctccggggacggcttcgagccgcagatggtgaagtcgcccagcttcggtggcgccagcgaggcctcggccaggacaccgccccaggtcgtgcagcccagccccagcctcagcacgttcttcggagacacggccgccagccactccttggcctcggacttcttcgactcctttactacctccgccttcatttccgtcagcaatcccggcgcgggctccccggcctccgccagcccgcctcccctcgctgtgcccgggaccgaggggcgccccgaacccgtggccatgcgagggccccaggcagctgcgcccccggcgtcgccagagcctttcgcgcacatccaggcagtgtttgcagggagtgacgacccctttgccaccgccctgagcatgagcgagatggaccggaggaacgacgcctggcttcccggcgaggctacgcgtggagtcctgcgggccgtggccacccagcagcgcggcgccgtgttcgtggacaaggagaacctcaccatgccgggcctcaggttcgacaacatccagggagatgcagttaaagacttgatgcttcgctttctgggtgaaaaagctgcagcaaagagacaagtcctaaatgccgactcagtggaacaatcttttgttggattgaaacagctaatcagctgcagaaactggagggcagcagtggacctgtgcggacgtctcctcacagcccacggccagggctacggcaagagcgggctgctcaccagccacacgacagattcactgcagctctggtttgtcaggctggcactactagtgaagttgggccttttccagaatgctgagatggaatttgaacccttcggaaatcttgatcagccagatctttattacgagtactacccgcacgtgtaccctgggcgcaggggctccatggtccccttctcgatgcgcatcttgcacgcggagcttcagcagtacctggggaacccacaggagtcgctggatagactgcacaaggtgaagactgtctgcagcaagatcctggccaatttggagcaaggcttagcagaagacggcggcatgagcagcgtgactcaggagggcagacaagcctctatccggctgtggaggtcacgtctgggccgggtgatgtactccatggcaaactgtctgctcctgatgaaggattatgtgctggccgtggaggcgtatcattcggttatcaagtactacccagagcaagagccccagctgctcagcggcatcggccggatttccctccagattggagacataaaaacagctgaaaagtattttcaagacgttgagaaagtaacacagaaattagatggactacagggtaaaatcatggttttgatgaacagcgcgttccttcacctcgggcagaataactttgcagaagcccacaggttcttcacagagatcttaaggatggatccaagaaacgcagtggccaacaacaacgctgccgtgtgtctgctctacctgggcaagctcaaggactccctgcggcagctggaggccatggtccagcaggaccccaggcactacctgcacgagagcgtgctcttcaacctgaccaccatgtacgagctggagtcctcacggagcatgcagaagaaacaggccctgctggaggctgttgccggcaaggagggggacagctttaacacacagtgcctcaagctggcctagctgcctccaacacactacgtcagaaggacccgggtctttgaaactgtgtcttgaagctaatgtattaatgtgacatggaggaactcaataaaactcctgcttcactgg

SEQ ID NO: 82 - DNA, 2324 bp, Homo sapiens
attcacatagcaaagacttggaaccaacccaaatgcccatcaatgatagaatgtataaagaaaatgtggcacgtagacaccatggaatactatgcagccataaaaaaggacaagttcatgtcctttggagactattactctaagtgaagtaactcaggaatggaaaaccaaacatcgtctgttgtcactgatacgtggaagctaagctatgaggacacaaaggcatgagaatgatacaatggactttggggacgtggggagagcttgggagggggcagcgagggataaaagactacaaatagtgtggaatgtgtactgcttgggtaatgggtgcaccaaaatctcacaaatcaccactaaagaacttactcgtgatcggatgtggtggctcacacctgtaatcccaacagtttgggaggctgaggcgagcggattaccttaagtcaggagttcaagaccagcctggccaacatggtgaaaccctgtctatactaaaaatacaaaaggaattagccaggcctggtggcacacacctgtaatcccagctgcttgggaggctgaggtaggagaattgcttgagcgtgggaggtggaggttgcagtgagccgagatcatgccactgcgctccagcctggctgacagagcgagactctgtctcagaaaaaaataaaaagaacttacttatataaccagatactgcctgtaacccaataagttatggaaaattaaagaaaaacacacaaaaagagtatattcaggatcacttaagtaagcatgatactacatcacatctcgttgcggaaattatatggattatcattccatgagtgtaccagcttccggaagtttctgagctcacatggggagtgggaagtaggtggtctcgtgggaactgcagggctggccccttgtcaggacggtcatcactagtgacataaataccccatggtagagagagctggggtgtcttcgtcggttttgtgtcactagaaaggaacactggaggctggataatttatagaggaaagaggtttatttgggttatgattctgcaggctgtacaagaagcacagggccagcatctgtctctgctgaggacctcaggaggcttccactcatggtggaacgggaaggggagctggtatgtgtacagagaccacacgaagagacaggagggaagacagacgggagacgccaggctctatttaacaaccagcctgtggagaactcatagagtaaaaactcactcatgcttcaagaaaggacattgatctcttcaggaagaatccatcgtccgttgctcaaacccctcccattcgacctcccatccagcactgaggcttacattttaacctgagtttgggagaggaggaattttaaagcagagcctgtagattctaaagcaaaatattctgggtctcctgcttgtagaatggttgtgagtgtgacttcctttttctatttttattttatttttttgaaacagagtctcgctctgttgcacaggctggagtgcaatggcactgtctcggctcgccgcaaccttcatctcccaggttcaagcgattctcctgcctcagcctcccaagtagctgggattacaggcgcgcaccaccatgcctggctaatttttgcatttttagtagagatggggtttcaccatgttgaccaggctggtcttgaactcctgacctcgggtgatctgctggcctcggcctcccaaaatgttgggattacaggcatgagccaccatgcctggcctgggattgttatttctaaatgattccagctttttttttttttttttttttgtctcagctgaggcacagcggtggaacttgtcttattatcattgacttgttatgttcatgaaggacttggaaaaccaacgctgatcctcagagtaacagcatagatcctcacaagacagtctatgaagctggagccccctgggttgtaaaatgcctccgcaccccgtctctgtttctgaagaaggaagctctgctgagcagctaaacatgacgtgcttgttaagtgtgcattggttaaagaacagatgaaggtacaggctcagtctccaaaacttcattatacaatctcacagatgagtagcaccgttcagcattgagtgacacctactttcccgtctccaggtggttagatatcatcatctccaatttaaggcccatctaagaggtgcaccttttctcgatcctgaggctcaagtgtctaaacagcaactgtaaattttctccaatcagtgtttctcccctgtgtggaaataaattctcatccttgaagttcagctctctccttcattttac

SEQ ID NO: 83 - DNA, 2559 bp, Homo sapiens
caaaattacagttaattgtggataacttacatagaaaatttaatagaatcaacaggttaattagtagaatggagagtgcatacatagaggtataatagtcaacctgtaagacatcagatcaatttataaaatgcaacagtgtgcattgacctcagcagttactagggtaattatatgtcatggcttgggacagtctcagttgacacttgttgttctgacataatttttaatgttgttccccttttaccctcaaaagtattctgatttggatgataaattatactgtcacccttgctataacaaactaaatattaaacacagatacagataccattcatactgacaaaaacgatcctgtattttggagtgacactaagatatgaccatgaccatgtcatacaaagctatagagaagataccaagatgctcctggaatagggaagagccaggagagcagtggaacaagatctacagtgtggaaacaggtctgctgggcacttatagctttgaatggcagagtcaagttgcaaacaagacaatgaggaaaagaaatacaaactccatctgtggcaggcagcatgaaccccactgccctgtgtctattacaagagcaattgcccagccacaactacttaccttcccagactcccttgcaagcaggggtggtcacatgacccagtctggccaatgtcatgtaagtgggagtctattgggaaggggacataaatccaggggaagatgaactatctcgcatgcatgagaatgaaggatgctcactaacacaggtggagtagaaggcagggagaaactgggttctggtggcagccctggactgccctctccacaccactgcagtcaaatttcctttacttgcataaattgcaactggtgacagttcttaactgataaaccatcttcaaccaaactacatgttttttgggcaaatggagaagtcaagggagtggctccgacaaagccagcaaagcccacctccccagagtgagagatacgccaagaaggagaacctactctccactctttgcatcagtgggaatgtgtacaggggctaagggtgagagattccgtggggccatctcctcagcttcacagaacaaagccaggtactctccatcaccgacttttttttctccatagcacacacctctatccagcataccacctattgtacttacttgaataatttattgtttgtcttccccacatagaaagttagctacaagagggttaaggtgattgtgtgttttacacattgctgcattgccagggcctaggacagtaactggcatactgtaggggcttaataatgtttatcaaataaatgaatgaaccaagaatttaaagcccaatgaaccatctttcaaatataaagtcaacagaaaaacatgttgaacatatttttgaattatagttcccatgaccccttcttaaaaaaattaaggacacccttaggcaaatcaagaatgattcagaaaagtttaatgtaaaaggatgggcagatgatttttttaaaagttctgtggatagatggcagtgatggctgctgtattaatccattttcatgctgctgataaagacatacccaagcaatttacaaaagaaagaggcttaactggacttacagttccacatggctggggaggcctcacaatcatggtgaaaggcaaggaggagcaagtcacgtcttatgtggatggtggcaggcaaagggacagagagagcgagcgagcttgtgcaggaaaattcccatcagacctcatgaaatttattcactatcatgaaaacagcatgggaaagacttgcccccatgattcaattacctcccactgggttcctcccatgacacatgggaattgtgggagttacaattcaagatgagctttgggtacggccacagccaaaccatatcagttgccctacagtgagaaggtacttaatgcccctgaactgtatacttaaaaatggttaaaatggttatatgttatgtgcattctaccacaattcataaaaaggatgagcagaagcataacaaatgcaaatgaagagaaatcaggggtcaagttgtaaatggagcactgccaagagtgccagcaatgagcacagaatttgtgtaactgcaggactattaaagccaatctaaagattatgaccatcacagagaagaacgaaacaaaacagagaactggcataaataataaaaagtaggaggggtggaggtgagaaggagagaggtaatacaagtaaactatgtcatattcatatatagttggaggtctaaattattgcttagaagtctaagtaaaattagaggcatcaaggtaaacaaaaaataatcaactaaaataacttgatggaagggagacaagaagagggaaagtagaaatattctaattttgatattgttcacagtagggagaaaataagcgctgtctagagaaacaaaaggattaaagatatcatgtcatattataattatgaagataaccatgggatcaaaaacgcagctttccaaattatcagaagacatacacacaaaaaaac

SEQ ID NO: 84 - DNA, 2272 bp, Homo sapiens
agacacgttattgacaaccatgcttcgaaacggagctcccctcaccagactcccgagtgacaagctgaaagcagtcatccccccattcctacccccttccagttttgagctgtggagctctgatcggtcccggacgcgtcacaacgggaaggcagaccccatgaagactgcgctgccccagagagccagcaggggccaccccgtgggcggcgggggcacagacactacacccgtcaggcctgttaaatttccaagcctccccagaagcccagcctcttctgccaattctggaaacttcaaccactcgcctcattcatcgggcggctccagtgggataggtgtgggccggcacggtggggagctgcttaaccgctcaggtggcagcatagacaatgtcttgtcccaaatcgctgcccagaggaaaaaagcagccggattattggagcagaaacccagccatcggtcaagccctgtggggccagcaccggggtccagcccgtctgagcttccagcctcccctgcaggtggcagcgctcctgttggcaagcagaaattggagaccagcaaaaggcctccatctggaacttccactacctccaagagcacctctccaaccctcacgccctccccctcacccaaagggcacactgcagagtcctcagtgtcttcctcgtcatcccatcggcagtccaagagcagtgggggctccagcagtggcaccatcacagatgaggatgaactgactggaatccttaagaaattatcacttgagaaatatcagcccatttttgaggaacaagaggtggacatggaagcgttcctcacactgactgacggtgacttgaaggagctgggaattaagacagatgggtccaggcagcagattctggcagcgatttctgaactgaacgcaggcaagggacgcgagagacaaattttacaggaaaccattcacaactttcactcttcctttgagagcagtgccagcaacaccagggcccctggcaacagcccctgtgcgtgatcctccttcccgcagccaccagcccatggttgggtgggtgaggccagaagagactgcctccggcaagaggtagcagccgctcaggtggctctgctggcatcggagcccacagaagtgaggagtggccgatggacctgccctccaaatgtgcctgactctgggtcttgctgtcactggatttcctggcatggcagacagaaagaaagatagtttgaccaagtcgtagaagctgatccagcgggtaaaaagggggcagggaactcgtcccttttattcttgcctcagagctgcctgaagacatgggccaggccggaggctggacaactttggataacgctgacctgtacttccaagtaaatgcctcctgaagagcccgggacccttcctgggagaattctgcagccagaatgaaggtgccatcagcaggaggcactgtgaagcaccatcctgtcgctgtccttgtccattcctagcaagttaatcgtgtcttgttaaccagcagttcctgttcaacgtgtaaagagacctgatgttttccctaataaagctgataacagattttgcaggactggcttgcagaaggaatctccctgggtgaggtgggtcctctggcctcagggggctctgctcctccttaacatgcagcctaagagtggatttagaccctgccttaatttcagccccccagctgagaatccagtcccaaaaataacagttgttgttgccaaagcttgggaatgatagaagggaaatccacacagaatcacgggtagtgagcttgagcacaaagcccagttcattgtcctcggctcccctccccggcactgcgcttccttcctaaggctgagaccacctctccctgcccttgagaactccctttgctccaggacccccgccaacttggggccctgcccagcagagtggagccatctcgcatcagcatagggacctcccaggttcccatttcctgctggagccctctccaaggctgagacacagggcatggccatccttgtgtcggagaccctgtctccacctctaggtttggccttcccctatagggccctcactagggccagtgtattcactgccaagagtctagaatgccattttagtttctgcccaagggagtgtctattttcctcaccatagacactttttattattttattgttatgtttgtgcagggacttaattctttgaaagattattgtttgtcggcctgtgtatattaaatgatgtaaagtt

SEQ ID NO: 85 - DNA, 1757 bp, Homo sapiens
gagtgactggcgcagggcctccgctgggggagggttcggagaggagttgggttcagtgggacaggcctggggggtcagcagctactgccctgtcttgggtggggccaaggggcgcgacttggggcggggatcggagggtgcttcgagtgggaggagccttggggttattctagcatattccttgagggttattgcagtcggcgagggctagattagatgagagtgcggaactggacccccgttctggcggcggtcctttttgaggaggcagggcctggagagtgcttggggggcgggcacgcagcgaaggggcaggcctgaaatgtgagtcacgggggtggagcctatagtcccatgggggcggggcttgagatgtcaggaatgggatgagggttagaggctaattagagggcgtgctatggaaggttcaggagccaaattttggagtagcattctccagggtgggccgaatggtgttgtttgagggatgtgttctgcgtgttattagagggagataggaaggcctggaagattattcacatggctgagcccaggattgtttattaagaaggtggggtcagaacagttaatttgtttgggctgagaacctttaagattacttgaggggatggtgcgtaaatggtgggccagtttgtatatgagctgcaggggcaagacaagtagatgaggctagaatgttaactcagggaacaggtcctaggtagtttccatggcatgtcccccaacagccctctccactgctcttatctcccagctgttagcgtgctggactctgcggacatagaggtcacagacagtcgcctgcctcatgccactattgtggatcaccggccccagggtaaggcacgtagtgctccgaagccatcccaggcctctggtcatttctctgtggagctggttcgcggttacgcaggctttggcctcaccttaggtgggggccgggatgtagctggggacactccgctggccgtgcgcgggctgctgaaggatggcccagcacagcgctgtggtcgtttggaggtcggggacctcgtgctccacatcaacggagagtcaacgcagggcctcacccatgcccaggccgtggagcggatccgagctggaggcccccagctccacctggttattcgtcggcctctggagacccaccctggcaagcctcgaggggtgggagagccccgaaaaggagttgatcgcagcccagatcctggagggccggaggtaacggggtctcgcagcagcagcacttccctagttcagcaccctccatcccggacgacgctcaagaagacccggggcagcccggagcctagtccagaggcggccgccgatggccccacggtttctcctcctgagcgccgcgctgaggatcccaacgaccagatcccgggttccccggggccctggctagtgcccagcgaggaacggctctcgcgggccctaggggtccggggggcagcgcagctcgctcaggagatggcagccggaaggcggagacactgagcctacctctgacagcgcggggctcactagttaccgcccaacctggatccggcgcgtgtggccgctgggcacttggcacctccccaagagcttccacttggtttggtccccccacccgctgctcagtggctctgaccacactcccctcgcagcgtcagtggtacgacccttccagccggctagcctgcgcttctggttctgggagggggaggtaataaaatggttcggtccgg

SEQ ID NO: 86 - DNA, 1841 bp, Homo sapiens
gctaatgttttggccgcttcaagatggcggtgcaggagtcggcggctcagttgtccatgaccctgaaggtccaggagtacccgaccctcaaggtgccctacgagacgctgaacaaacgctttcgcgccgctcagaagaacattgaccgggagaccagccacgtcaccatggtggtggccgagctggagaagacgttgagcggcatcgaggacctagtgaatattgagatgttcctgacggccaaagaggtggaatccatccaggccgaggacgagagcgccaagctgtgcaagcgccggatcgagcacctcaaagagcatagcagcgaccagcccgcggcggccagcgtgtggaagaggaagcgcatggatcgcatgatggtggagcacctgctgcgttgcggctactacaacacggctgtcaagctggcgcgccagagcggcatcaaggaccttctggaccctgcacggtggcggatgctgatccagcagttccggtacgacaactaccgactacaccagctgggaaacaattctgtgttcaccctcaccctgcaggctggcctctcagccatcaagacaccacagtgctacaaggaggacggcagctccaagagccctgactgccctgtgtgcagccgctccctgaacaagctggcgcagcccctgcccatggcccactgtgccaactcccgcctggtctgcaagatttctggcgacgtgatgaacgagaacaatccgcccatgatgctgcccaacggctacgtctacggctacaattctctgctttctatccgtcaagatgataaagtcgtgtgcccgagaaccaaagaagtcttccacttctcacaagccgagaaggtgtacatcatgtaggccccacgtcgtgaagcgcacgcctcggggacgggctgcagtgggcggggaggccacgccttcctcctgtcccacgctccagcctgccgcggcgtttctgtttcttgcgaccaaagatccgtgagcaacgataaatactcttaggaagagagaaaataaggtttcataagtttgtacttgaaaacatttggattggtaggattttgtaacacgtcaaccatttgatgcttctgaaaagtactttcaacttgcgaaggaaactcttctttaaagactgacctaaacaccgagggaaacttaagaacgtttaaaatataggagtccgtgatttccctgtgttttcagtttctttccttctgtgaacgatgagacttggagaacgggctggtccttcaccacttcctgttggccctggcctggccggggaaggtggcagcggcaccggactgacctgcagtgacccgcgatgccgcgccacgagggacacttatggcttcattcgagagctgctgccaaaacgcctggcgccgccaccgtcgggggctggcttcgaggacgcccgcctgcctcgcgggtcgtgtccgcgggactgtgttcgtacgtgcatagtttcgatatcacatcgcggggctgtgttcgtagctgcgtcgtttcgatatcacaccctctgtgtgccgccttacttcctgcttcgagaatgtataacgtggaaatccacgggaccaaatttctgcagaggccttgccggatggttccataactgtagagtctaattgctatccattacagaaattaatcgttcagttgaaagaagtactgatgacttttcaaaacaaatgaaccaccgtagctgacagagaaccgtatcgtagaggtttgtagttagtgcttatttttgcatgttgatgttgactagctataaactgtaaatgtaaaccatgcgaataaaatggttttctatttctc

SEQ ID NO: 87 - DNA, 2357 bp, Homo sapiens
ctggggcccgccacctccgcccgtggccggagagccccaggcccgagccacgcggtcttccgggcccgggtcggggctcgatggctacgtggaggcgggacggccgactgacaggcggccaaaggctgctgtgcgctgggctggcggggacgctcagcctcagcctcaccgcgcccctgcagctcgccgcctaccgcaaatttgttgcgctgttcacagatgacctgggccacatttcccagtggagctccatcatggctgggagtctcgcaggcatggtttccaccattgtaacatatcctacagacctcatcaaaacccggttgatcatgcagaacatactggaaccatcgtacagggggctcctccatgctttttctactatttaccaacaggaagggttccttgccctttatcgaggggtttccctcactgttgtaggtgctctcccgttctctgctggctcccttcttgtttacatgaacctggagaaaatctggaacggaccccgagatcagttctctctcccacagaactttgctaatgtctgtctggctgctgcagtgacccagaccctctcctttccctttgagaccgtgaagagaaagatgcaggctcagagcccctacctcccacacagtggaggagtagatgtccatttctcaggagcagtggactgcttccggcagatagtgaaggcccagggggtcctggggctctggaatggattgacagccaatttactgaagatagttccatattttggaattatgtttagcacctttgagttctgcaagagaatctgtctttatcaaaatggttacattctgtctccactgagctataaattgaccccaggagtcgatcagagtttgcagccccaggaattacgagaattaaagaagttcttcaaaacgagaaaaccgaagcctaaaaaaccaactctataaaatggaatggaactagaagtgcactgactgacagcatgttgcaatcacagataaatgtagcctcataactgtgcacctgaggagggatgagaagctactgctatctgctgctctgggaaatgagatggtttggccatgcaccacctcagatctccaaactgatgtccctgtgaacacctgcactatgagaaggtttcccaacaagagtgtatcatgatggcattccacgagattttataaccagagtctagcagtgataaaatgtacaatttacgctctgaatagaaacatgacaccaaagaaagggcattgccatgacatctcaaagcaacaggtaattgaagtggctgagtggataccacgttgtgaggtcagccactgggtcacttgtagtcaatgcaaagcttgcacaaaccaacgtcagcctagtttcactcagtttgacctgagactttccaatacaatctgttgttttgttttgtttttagagacagggtcttgctctgtcacccagactggagtacaatgacacaatcatagctcactgcagcctttaactactgggctcaagacatcctcctgcttcagcctccagagagttgggaccataggtgcacaccaccacacctagctaattttttggggaggtcttgctatgttgcccaggctggtcttgaactcctgggctcatgcaatcctcctgccttggcctcccaaagcgctaggattagaggtgtgagccgctgcaccctgccccagtacaatcttttttgaactcaaatttttgctgacatctgagtgcacacaccacagtgtaaattatgccttatcagaatctaaatgaaaatagcgaacatttaaaagctatcaccattgtagtagaatcatccttcttttttgaaatttgaagcatcccaggcttaaaatcttgtgtttcagaaagacagtttataccatgactgcttaattatccccccaaagaccttctgattgaagtcatgtacagttcagtggcctaaattctctgcctttttaacttgctttgcaagcctactctgaaaataagttatttagtcaagttattctcaaagatgtcccagttgcctagaaaggatcaaatggaacatttgacacacatactcaaaaaaatgtaactgactataaacactttaacctaatcatctgtatcaaactttctaaaaatcaaatctcaggattgttccactttagagattctatgtaaagtttatataactatacttgtcaaatagcacctatctatgcatttaaaaatgcattaatatctaacataaaattgttaatttatacacacacatacactcatacatagagagagattttcggtatgttgcaagtattttttccgattaaatttattttccaaag

SEQ ID NO: 88 - DNA, 2471 bp, Homo sapiens
tctttcctgtatttctcttttatactagaatattaaaaagccaggtataatgaagtgcataggagctaaatagaagcagctttgaataccttcattttatgtagatgttccaagagcttgcccaggcttcctctctctcccttcctctctctcccttcgcctgtcgagtctaaggagacctggcagcctgagatacccttgggtgttcagggagatcttgaaggcaggcgcctttgaggtacgcacctaccaaaaatgtcacatcaccaccggttctgttgtttcacattgaatgtgaaagattcactaaaaggttaatttccagtcttgtcaaatgtagatcattaaaggcattgccttttcatggtacagctgacaaaagtcaggagccaagagggaaggcagatgcaaaggttgaataggccaaatactgtgagaagccctttggaaaaccacatcaggtatttttatctgtactcagcagaagtagtgattggtgactatttgcggaaggaaactggacgggtgtctgcctttttaaatgttaaaataggccctgtctattctaggaatggttttgataattattttttcattctttgcctttattctagaatagagattgcccatattttaaaaaaatgcttttcatgtttctatttgttttgatttctagaaccatgtttagatgacaaaaacaccagattgaaggatggtccatctggtatctttggctttcataaaagccagtttgaatcacatcatggttgatccaatggctggaaaacacatatttacccaaaatatggttaattccgtacttctgaataatcctgggttttgacttcttcagtttctccccttttttactttcttctgtttgagaggcactgtgaatagtggaaggagcatgggattcagagagttccagataggaattttagtttttccatttaagagcaactgcctttggacaagatgcttaacgtctctgaacctcagcttcttcatctaatggaaggatgctaataaccacctcacaggatttagggtagtgctaaatgagaaagcccatgtaggaatacttactgtcggagccagcaaattcatagcgcacactccaaaacgggtgctcactattgacaatgtcatttcctggtttcttattttttgattagctcttttctttaatctgctttcattcttaatatgtctcttttcctttttaaagcatagaagtagtatgtgggtcttttatgaatttgggttgatagctgattaattgaatatttaagagttgtttattgcttgtaaacagcatggttttctaagacattgcatttaattaaagcatgcttttcaataacactagttaccttgaccaaactggagttactgcttcacataaaggactattacctgtcaagagacatttactctgctggatgaagaactgaggaagagtgtcatgacgttaattatttaaaggcacttttctgaaaacatgtctcaaatcctaatgattctgttctttgcctataaacattagcgatgccattctacacttttcactgaaatggttctaaaaatataggagggaaattttgatgtgtgataaaagttcaggacgatcacatttttctgcctgtgtacttttgcttagtattactttgaaaaaccagctggaatttttgaagcagcctccgttttgctaaagtcattttgtagggtgggcctaataatggcctggcacaggacctgaacatcgaaaacacctaaagaacctgacacacctgcaaggcattgtaggggcgggagagacggtagagaagtgagatgagtgtgttttctttgggaaaataagtgatttttgctgaacagcttaaggcactctgtaaacattagccaaaaaataaatattaattctcactgtggcctcggtcccttagtgaagccatgcttactccaggaactgctgcgatgaagagtggtgaaaattctgaatgaaaagcagccctcaaaaatgttaaaacccatgctattaagctttacaccaaaaaataaattcgaatttttaaaaagtgagaaatggggaaaagaagaggaggcttaggatggtcaagtggcacctttagcaccttgtacttaaccagataagttcaagactgtgttttaggccgggcacggtggctcacacctataatcccagcactttgggaagccaaggcaggtggatcccttgagcccaggagttcgagaccagtctgggcaacatagtgaaaccctgtctctactaaaaatacaaaaattagccagacgtggtggtgtgcacctgtagtcccagctattcaggaagctgaggtgggaggattgattgagctcaggaggtggaagctacacggagccgtgatctcacccctgcactccagcctgggcaacagagtgagacgctgcctcactgctcccccacc

SEQ ID NO: 89 - DNA, 1949 bp, Homo sapiens
caacaggaaggtcaaatgggtttctttagaatgtgagtgtgtatagggtaggattcagggcctaaagaggccttcttgagtctgtactgccccctccgaagcagtggtctttttttttttttttttttttgagatggagtctcgctctgtcgcccatgctggagtgcagtggcgtgatcttggctcactgtaacctccgcctcctggattcgggtgattctcgtgcctcggcttcccgagtagctgggattacggatttgcatcaccatgcccggctagtttttgtatctttagtggagatggggtttcgccgtgttggccgggctggtcttgaactcccaacctcaagtgatccgcccacctcggcctcccaaagtgctgggattgcaggtgtgagccaccgcgcccggccagcagtggtcttaagccaccagcaaagccatctccaactccttcagacccttcagcaaaaggccaaatggcactggatcccctctggggtggggctttgtgagggcagctgtcggcatcagctccctgccaatacctgcagccctgctgacagtctggctccagtgagtgggggacttggggacaccctgggcagatggagcagaggacatatggggatggtcagggtgggaggggggctctgacccaggcccctccttactccctctctgccctgtgtccctccagagttacttccagagtcttcaagagtgccaactgggaccaggaccccagaccacagccccccacaccgtcctggacctggattctgactgtggttccactgtacccctcaccttaatctctggttctaaccagacctgagcctagacttccactttttcccttacccctgtgagggcctgggaacactaggtgggcagggtttgagcccacgggacctgcacacaaacttccccacctcttggacttggggacaggatctgtgcctcaacccagaccagctttgtagggatatgttccaagaacagagaagagtcttatggggaagggggaggaagggaagtatgaatatttacctctgaccaataatagaggtgccctggtccccaaagaaattgactcccgaattccctccaagccttacccatatagcttttgtttgtttgtttgttttcagacaaggtcttgttctgtccagtgccgtggcgtgaccacagctcatgacaactttgatttccccggcccaagcgagcctctcattcagcctcctgagtggctgggaccacagacgccacacacagctaatttttatgtattcgtttttatttttttgcagagacagggtctccctatgttgcccaagctggtcttgaactcctgggctcaagtgatcctcctgcttcagcctcccaaagtgctaggattatagccaccgcacctcgtcttgaaatagccttttaaatgttcacctcagcttgcctcacagtggtaaaaataagcatttttttgttttgtaggatcagggagcttccaaggcatttgatacctttttgatgggagcactgtcttccatggggcttccacttctctcctcaacctggggaagaccacagggcagtgcctgcctcaggacctgccttccccaaaagctggcttcttgctccaaggagagagcattgacccacctgccagagtcttgccttttgcccaaaggagcctggtcttcagggctgcataggatgcaagtgccttctctgcttctcaccgtgggtggcactaatttcctccttaaccagaactttgttccagccactgacccattctaactcttccccctctgactctcctgcgcagggtctgttcctggtttcccagatgcataaaggaagacatatccctcccctgggcagcaaggctacaatgggagggagggagaacatgggagcatgtgaataaaatggcattaaatactg

SEQ ID NO: 90 - DNA, 2567 bp, Homo sapiens
atgtgttttcaaaacagtgtgtgtattgggagtgatgggtatgtgttaggtatgtgatgggttgtagaagcgtgtgtttgagagaattcagagacatttgaaggctgctgtgtgcatgtttgggggtctgaaaagacagttgtgtgcatggatgtgtgcgtggggagaaagaacgtgggtaagatgtcccttcccagccctgagaccactggtcacagttggccacctccaacgggagaccttgtccttggcctagagtcctcccacccttggggggctcctgcctgaggtcctcagaatcccactgcaatggacccaggcagcgccccaggaagccatgctgggcccccgccagggcctatcccaaaagcaggggccagggagggggcgacttgcctgcccccgaagcccttgttcccattggccccagtttgcattctgcaggttttccattttagtgggttctgcttttatttcagagacagacatgtgtcttctctgtccgtttccaataggtaaagccatatcagttagactgcaatactttaaacacaagacaaaacaatccatatgtttagggaaccagaaaagtcccctggtctgtcccttctttggggagcagggcctcgacagctccagctcccttgacctaccttcttccccgcaccacgcccccaccttgtgcccctgtgtccagccccccagggggcctgtgtctgtgtctgtgcctgtgtctgtgatggggagccgcctcgcacccctgttgtctgcttgtctctttgtgtctgttatcctgggcaggatggtcattctcaaaaaccctggggtcctgggccagagacaggcagggcccagtccaggggccccaggcctccccagtcccagtgtgcgagccccacttggacacaagtgttcagagaggtccccctctgccacttgacagggaccttcaaacctcgacagtgatgcaaggacacagagagtaccagataggtagcagagaccaaggcgcagggtgcttcagatgagcaagagaacccagtcgaaccagataccccaggtgggccggagggaccccagaccttcagagggctgccctggtgttctccacagtgcagtccctctgtattcccagagtgggatcggggctttcagccccaccctgatgcctgccctccaggatggctggtttagtctgggtccatgtcccagacccctctattctgctccaggacagcaggacttcaggtcttcctgggggtggatataggagaaaatttctgcctggcacacacctggctccaaccactgccaagtgatcactcttaggcccaggggaacacaatgactatcattactgatgcagacctggctgtggagagcagctaatgtgtggcccagagagcctgtctgtgtggagcacgtagtgcacagaatacgtgagagttgctctggcaggggcaggatcctcacaggatcgcctgggaggtgaggtgtgtgtgacccactggatgggagggcaatgagtgtgcacatacaaatggggcagtgtgcatgcaacacacttaggggaggagtggccccagaattcagcacgcacacaacacacaagggagagaacccccagatgagaaaataggaaggagcaatcatttgtagatgggtgaaaaaagaatgaggttcaagggagcgtgcaccaggtgaggtgagcgtgtgtgctctcagggaagggcccaggctcccatgcctgggaggggctgccagagagaagcaaaaaggcggctgtggatcgccctgggctgggcaccagtgacaggtcaggatccccaaacatggacgtcctcccctccaaatccagaagctcccagaaggtgtccttaactgcaaagctgtgcagggtactcctccagatggaatcaggaagtcgagacaccatcccaggtgtgtgtaagagagagagagagaacagggaggatacagaagtattgcagcccagatcccctatcagggggacagctggtgggcaaagcagccaccccacagccttgtggctagagtacagtggggtggaccctccagccccaatagccctagtacccagctggcagagttgcccacccctgctgtccacctgctccatcctctagggttccacaggcccctgaccgcacagggaggctggggccagcctggtctcccaggcctgaggacatgcctcccaccaaatgtcccctgctccagtcccactcctgtcactccacgctctgcactggggagaaaacgggaggtgctcgtgctggccctgggtgggagcggggagtcctggtgagaccccggtgagatggaccatcctgcccgcgtgggggatcccctttcccacatccgtgctgtgtcattgttgctctgcttcctttcaatgtgtcagtgcctggggggaggggaggagcaccccctcagcccccctgaacctgaccaaaagccatggctgttgctcccccctttgtatgatgcaaatgctgaaatgtacaaaatcaaccatgacaacaaagaaaaagaccttgtacagc

SEQ ID NO: 91 - DNA, 1874 bp, Homo sapiens
agtgtgctccccgccccctgccgcggcgcctcgcctcccggctcacctccccaccccacctgcccgctgtggctctccgcgggagatctcaccgttctggagacagggctcgctcgctctcacggtaggctggaagaacgggctgtctgggccttaggaaaggcccatgctgtataaggcatggggaaaggaaaggaagaaaggcaacgaacaagaaggagggcttccaactgcagcttcctgccggctgcaggcctcccttcctaagctgagctgaggcttcctctccatgggctggggagggggcgccaggaggcctcggcgggtccgcaattggccgggacagcttctcacgaaaggtcctgggccggcatcatcagcctcacctgggaactggttagaactacaaattccctcggccccacccagaccgacgccaagggcagctgtggagtggggcgcggcaatgcgccccttaacagccctccaggcttcttagcccgggcttggacagccgccttccggccagaggggatgaggttgcgctgcgctccgggagcgccgatggcgtgactggccccgcgcggagcagcgacagtaaggctgtgtggggggagctgggacctaagccgcgcgcacacccctttctctgcgtctggtggaggtgcacagaggcttttgagtcaggcccaagcgcagccaggtgacctccccgcggcctttcaagcctgagctcggtggacagctccctctcccgtgagtcccgctgtcctgtacgcgcccggtcgagccccgggctgcgcaccccgctaggaggtgggtactcgtcctccaggagttgccggtgagcccttgaccgtggcaggtcccctccagccgcgagcgacccctcagtacctgccgatgcctgctggtctctggcatcctccagtcgagggtcagggtcagggagcaaggcctcacgcgggcgccctccttgcagctgcccggccagcccgcttctctgcccggagccatgaatctcagtagcgccagtagcacggaggaaaaggcagtgacgaccgtgctctggggctgcgagctcagtcaggagaggcggacttggaccttcagaccccagctggaggggaagcagagctgcaggctgttgcttcatacgatttgcttgggggagaaagccaaagaggagatgcatcgcgtggagatcctgcccccagcaaaccaggaggacaagaagatgcagccggtcaccattgcctcactccaggcctcagtcctccccatggtctccatggtaggagtgcagctttctcccccagttactttccagctccgggctggctcaggacccgtgttcctcagtggccaggaacgttatgaagcatcagacctaacctgggaggaggaggaggaagaagaaggggaggaggaggaagaggaagaggaagatgatgaggatgaggatgcagatatatctctggaggagcaaagccctgtcaaacaagtcaaaaggctggtgccccagaagcaggcgagcgtggctaagaaaaaaaagctggaaaaagaagaagaggaaataagagccagcgttagagacaagagccctgtgaaaaaggccaaagccacagccagagccaagaagccaggattcaagaaatgaggagccacgccttggggggcacggtgcaaagtgggccttccctgggctgtgctgcaggcacagggtgcccctgtccagcccctccacctgtgtctgaatgcaacaggggtgttgcgggggcaacatgagagcccctcacccccaactctccactttcaggaggcccccagtgaagagccccacctcggggtcacaataaagttgcctggtcagg

SEQ ID NO: 92 - DNA, 2255 bp, Homo sapiens
ttgtataaagacattaccccacgatatggctttattagggactttttttttttttttttttgagacagagtttcactcttgttgcccaggctggagtgcagtggtgcgatctcagctcacagcaacctccgcctcccgggttcaagagattctcctgcctcagcctcatgagtagctgggattacaggtatgtaccaccacacccagctaattttgtatttttagtagagacggggtttctccatgttggtcaggctggtcttaaactctcgacctcaggtgatctgcccgcctcggcctcccaaagtgctgagattacgggcatgagccaccgcacccggcttactgggggctttttaaccttgtttggctacattacctcagtgaacaaggggaagctcacaacaggaactcacacaaagaaggaagagaacagtaccaacaaggtagaacatcacgatgagaagaaagaatgatgcaaatatgtggacccccaggataaacacagctgcccaaaatttagctctggcccccttagatgggggaagtcaacagtgaagtgtttctcagcatcataaaggcagaagctgtggttcctgtggggcctgccaaccgttcccagatgctgaactctgctgggagttttttccatgggactttaaaaaatgatgcccttaggttgggccagacctctgttaacttcagtagggatggcaccaggttcaagaggccaaagaagagacctggagctagtgaaggaaacatagggtttatttggggaaccttacagggtggtccagtggccgcgggctggacagaactgcaaccacttataaaaagcatgcagtttacatagcactttcactcagcaccctcccctcagcagcctccacgtggcaaccctcacttcttaagttattgctgtcagatgcatctgccatacagggtcattctcaggggatgcttaagttatttctgtcaggtacatcttccatacactttactaccttggagtaaagtagtaagaatacagctttttccttaacctttaccagctaactcagtgcttaggggccttggaatgcctgctgtccagcaggtgtcacaggcctgactgggaggcatggccattatcaacagtgtatgaaggtcacatatggctccctgaagtgattacatacttggaccacatcacctcagccccttgcaaaattgcatttaatgttacacccttggcttttgtagaaacaggcaacaagacactatcatataaaactttgtactgcattgcaaggcataacctttaataaatcccagtggtcctttgtgtagggaacggggatgctcatagcctatggggcggctggagaaccagtcagggaccctgagggctcgatgtacactttacatgggtgggccaaggagtttacactgagggcactggtaatacctgtaatagtcttatagtacttataaagcagttttgcacataaaataccatcatgcacttataagtttgttcttgggctgctccaagttaactttattcattttcctagtgttagtgtctcagggagtctgattatatttttgatttgtaatttctatctgactaaggcctagagatttcaaaactgttctttgcaattcctctcatactgaacctctggttcagcagctttttttgttgttgttgttttcaagttttatcatttttgttcctatttggttttgtcgtttttaaattgagaattgcttctaaaacagaagacatgaaaagagaattaaaaatacaatatatgtgtaagatagaattattcaacttagcatttattaaacatctaccagatgatagacattagaaataaaatgactagcaagacctggcccttcccctcaggggttcacagaatggctggagcaactgtcatataagctgttatgaagtgcagaaactacacagacatttgtgcgggttcagaccagcgcaattagagatgggcagagtgggatggggtaggggtaaggtgcttgaaatttgcctgggtgggaatttttgaagtataaaaaggacttctacctggggggctgcggcagtagagggaagagcacggtcggtacaaatgcatggcaggtgtgaaacagtttgatttgttcaaagaatgatgaatcacttagtgttgtataatggatgggaggagagaaacacagcgatcacaaagggccatgtttgccaagaaataaaatatacttgg

SEQ ID NO: 93 - DNA, 2824 bp, Homo sapiens
aagcttaccatgggggtgtctgtacgcgtgtgtgttcgtgcgctcagtggtggaagacaggacagaaaataaacggatcaacatccaaagcaacaaggtcattacagcttatggggaaactgactcgatgaagctcaggcctggccgcggtcagggtagaatcaggactagaacccaggctgtgtggctgcggccctgaccctcaccatccaggtcaggcagagaacactcaggtcttggcccccatggtgtggggcttggtcacagctgcttccccagccccaggcctgcacgaagaaggcactcactaaatgcttgctgttgaggtgagtgaagctgagggtggaatccgagagtgggaggaggaggagaaggaggaggaggcagcagagaggacgcccacaggagaaaagtctccaaactctcccaggactttgctgtctctgagagggaaggcccggacggggggccccatggaagtcaagctggagctgcaccccttgcagaacaggtgggctctgtggttcttcaagaatgaccgcagccgggcctggcaggacaacctgcacctggtcaccaaggtggacactgtggaggacttctgggcgtgagtgtctgtccccagtggggctagagttggggggctctgagctctgggctccctctctccgggttgagccagccctccctagggcctttcagcctttgtgagggctggggctttgtgggttctgcccagggggtatagggcacaaccaccccccaccccaccaccttctttgggctcagggagagagcctggggagcaggagaagcaggaagctgaccttgactcggccactccagggctttgtgacctgggcaagttccttcccctctctgaacctgtctcagctgcaaagggaggactcggctgcctcagtgtccgggtgctcacgggagtggctctgaaaagggctacacaagccctagggagggtgagaaggcctcggctgtagctggaggggggagcaccagggggtctaaaaccctccccaggggttggctcagccttcactgggaaggctctgtggaaaaggtgggtcttgagagtttggataaacgggagtggaatcccaggtggcaggccagtgtaagcaaaggcttggaggccatggggtcggatgaggagttgggagggctgaacccagttggaaccaggccctaaaaagccttgacttttggcatggggtcgggggctctgtccaggctatacagtcacatccagctggccagcaagctctcctctggctgtgactacgccctcttcaaggatggcatccagcccatgtgggaggacagcaggaataaacggggtggccgctggctggtcagcctggccaagcagcagcgccacattgagctggaccggctgtggctggagacggtgagttggaggaggagggtcctcaggggaagagacgggctgtgtgggtctcatggtggcagtggtctcaaggatggcaggccagtccctatgtcccagccggtgatctcacaaccccctacttcgggtccagctgctgtgtctgatcggggagagctttgaggaacacagcagagaggtatgtggggccgtcgtcaacatccgcaccaagggggacaagatcgctgtgtggacgagggaggcggaaaaccaggcgggcgtgctgcacgttgggtgaggagggtctctggcacagggtggggacttgggtctctgctagagggaaggtgggtggagggggcttggcctgcatgggagacctctgaaagtctccatagcctccctcccttctgccttgcccacctgtatggaaggtctggcgttcagatttctaactttctcttacggcagtgcagctctccttttgcattaagggggtcatattttgggtttccacatgggtaagacacaacaggtgtggctgtggccagaatgagggtaggagtctggtggcctaagttatctctaggaccctctgatgactacctgtgtctcttttcctctgtgtcccccgcacctgcaggcgtgtatacaaagagcgcctgggcctctccccaaagaccatcattgggtaccaggcccatgcagacacagccaccaagagcaactccctagccaagaacaagtttgtggtgtgaggggggccttggcacccctcctatgtaatgggacagccgccactgagcctcattactttgggggatggggcgggactggggatcagacagcctagttcttacctgtcctcaagtgaacaggaatgcaaacactctttaacatgagttggggcctgagccttaggggctagatgggggtagtggtggcagtctgaggacctagcttgtcctggggccacaggacagcagcagggtggaaaaaactcctgagggtggggtgagtcatggcggggaaggagggctctatggtaggcggagaaacccatagtccagcgtttactgtttccacccaggaaggaggtgaggtggcctgagagacagactcttccatgggtggtgggctcaagggcacagacattctggagggtgaacgccatcatttgtacagagggatacgtgggttgctgaggactgagagagccttgcaaggccgctccccttctccccagctgtgaccagggctgtctgggccttgcctgcctcagggccagactgaagtggaggtggagggatgctgggctaggcctcaccaaggttctggtagaagtggtggaagtggataaacttgataataaaagcttaagcatctttctgttcctgttttaaataaatacttctgaac

SEQ ID NO: 94 - DNA, 2222 bp, Homo sapiens
gttctcactcccctgtcctcgtgttttccctccagcttagatttcttaactatgtcaggattctccacagcccttgaccagcacaagattacttgtattctcaagctgtttattcccctcagtttgtttcctccatctttccccatcccatatcaactcatttgttagcctgaggtcttttcttcttgacccagagacttttcacctgatctttttgctgtctactacctttcccatttcaggggaaaacctgcattattatatcttagccagactattttgactccacctttctcttggatgataaataagttctttcatttattcacttattcagtcagtcatccatttaatatacatttctggagcacctattaggtgccagaccctctgctggaggctgagtatgcaatggacagtgatctagcagagagagaagtgtaaacaaatgcttaaactgtgtaagcactgctagagtggagatatatgtatagaatggggtttcatgatgggcaagggagaggctgagctgccttctgcatggttgagtctgagaaagctttacacagcactagtaacattagttttccaggcagaaggaatggtatatatggagtcatgtgaaaccaggtgtgttagagaactacagatggttccgtattgtgagctgaaattttcatatggggcagggtggcagtgaggccagatgactgaccaccctagtggcctaatatgaattgcaattctttggtctcttgtagccatcccaatggaaattgcttcgacaggaactgttgaagtacctggaatacttcttgatggctgtcattaatgggtgtcagatgtctgtcccacccaacaggactgaagccatgtgggaagattttataacctgcttaaaggatcaagatctgatattttctgcagcatttgaggcccagtcttgctacctcttaacaaaaactgctgtttctagacctttgtttttggttttggatgacaatttttattatcagagtatgagatatgaagtctaccagctggctcggaaatattcattgggcttttgccagctctttttagattgtcctcttgagacctgtttacagaggaatggccagagaccacaggcactgcctcctgagaccatccacctgatgcgaagaaagctagaaaagcccaaccctgagaaaaatgcttgggaacacaacagcctcacaattccgagtccagcatgtgcttcggaggccagcctggaagtgactgatttattgctcactgctttggaaaatccagtaaaatatgctgaggacaatatggaacaaaaggacacagacagaattatttgttcaactaacattcttcataaaactgatcagacactccgaaggattgtatctcagacaatgaaggaagcaaaaggtaatcaggaagccttctcagagatgacatttaagcaaagatgggtaagagcgaaccatgcagctatctggaggatcattctaggcaatgaacacatcaagtgcagaagcgcaaaggttggctggttgcagtgttgcagaatcgagaagaggccattgagcacggggtgagatgaacaagtgcttcctcacaacttgaagcttctagcagaagaacttaacaagctcaaagcagagtttttggaagacctaaaacaaggaaacaaaaaatatctgtgctttcagcaaaccattgacataccagatgtcatttctttttttcattatgagaaagataatattgtacagaagtatttttcaaagcagcattaaaatttctgaactgccaatcaaatgtctcattttgaaagaaactgaagagacctgatgctcataatcaggaaaatcggcaaatggctgggactacaaccctggtctcttgaatcctgtttggaaatctgtgcgttaggagggaaatttccattcctacagcttcatgggaaaaggtctactccatttcaggaggtaacagtcctggcatgcacaattcaagccccctgcttcaccggttcctcactcctcactaggagaagtgattctgctggttgagacaagaccaatatccaagagggctacactgcattcgagggacaaggctcagtgtcttcctctctcccactgctttcccaagccagtcactatcacattttaatgtgtatgtgaattacttgggggatcttattaaaacacagattataattc

SEQ ID NO: 95 - DNA, 2622 bp, Homo sapiens
gcgctcgccccctggcggcgatggctggaggcgccggcggagcgcgggtccctctcctgagcatcagtgagcgcccggagccgtggccgctgggggctgcggcggcgctgagccagcggggccggacagacccacgaagtcaagcatgcggagtgcagccaagccctggaacccagccatcagagcagggggccacggcccagaccgggtgcggcctctgcctgcagcctcttccggcatgaagagttctaagtcttcaacttccttggcttttgagtcccgactcagcaggctcaagagggccagcagtgaggacacgctcaacaagccaggaagtaccgctgcatcgggggtggttcgcctgaagaagaccgccactgccggagccatctcggagctcacggagagccgcctgaggagcggcacaggggcctttacaacaactaaacggacaggcattccagccccacgggaaatttcagtaactgtctcaagagagaggtctgtgccacgtggtccctccaaccccaggaaatcagtgtccagtccaacttcttccaacactcccactcctacgaaacacctgaggaccccttccacaaagcccaagcaagagaatgaaggtggagaaaaggctgcgcttgagtcccaagttcgggaacttttggcagaagccaaagcaaaagatagtgaaattaacaggcttcgaagtgaactaaagaaatacaaagagaaaaggactctgaacgctgaggggactgatgctttgggcccaaatgtcgatggaacatcagtctcctcaggtgacacggaacctatgataagagctcttgaggagaagaacaagaactttcagaaagagctttccgatctagaggaagaaaaccgggtcctgaaggagaaactgatctatcttgagcactccccaaattcagaaggggcagcaagtcacactggcgacagcagctgcccaacatccataactcaagagtcaagcttcggaagcccaactggaaatcagatgtccagtgacattgatgagtataaaaaaaacatacatggaaatgcattacggacatcaggctcctcaagtagcgatgttaccaaagcttctttgtcgccagatgcttccgactttgagcacattacagcagagacaccctcaaggcccctgtcctccaccagtaacccctttaagagttcaaagtgttctactgctgggagttccccaaacagcgtaagtgaattgtccctggcttccctcacagagaagatacaaaagatggaagaaaaccaccatagcactgcagaagtgcacaggtattcttgaacagggccgctttgaaagagagaagctactcaacattcagcagcagttgacctgtagcttgcggaaggttgaggaagaaaaccaaggagctttagaaatgattaaacgtctgaaggaagaaaatgaaaaactgaatgagtttctagaactggaacggcataataataacatgatggccaaaactttggaagagtgtagagttaccttggaagggctaaaaatggagaatggatctttgaagtctcatttgcagggtgagaagcagaaagccacagaggccagtgctgtggagcagacggcagagagctgcgaagttcaagaaatgttgaaagtagcccgagcagagaaagatctactggaactgtcttgcaatgagctcagacaagaattactaaaggcaaacggtgaaattaaacatgtttccggtctgctggccaaggtggaaaaggattattcatacctgaaggagatatgtgatcaccaagccgaacagctgagcagaaccagcctaaagctgcaagaaaaagcatcagagagtgatgcagagatcaaagacatgaaagaaaccatatttgaattggaagatcaggtggaacagcaccgggctgtcaagttacacaataatcaactcatcagtgagctagaaagtagtgtgatcaagctggaggaacagaagtcagacctggagaggcagctgaagactctgaccaagcagatgaaggaggagaccgaggaatggaggcggttccaggcggatctgcagaccgcagtggtggtggccaatgacatcaagtgtgaggcccagcaggagctgcgcaccgtgaagaggaaactgctggaggaggaggagaagaatgcccggttgcagaaggagctgggggatgtgcagggccacggcagggtggtcaccagcagagccgcccctccacctgtggatgaagagttctggatgcttccgtgcggctccaacaggcatcgtcttcccttccgcaggtggaggggccgcttcccgcaggcatctgagctctgtgccggggccgtggccatgggaagatgttccacgctgcctccttctcgagttttcctcggaaacactcttgaatgtctgagtgagggtcctgcttagctctttggcctgtgagatgctttgaaaatttttatttttttaagatgaagcaagatgtctgtagcggtaattgcctcacattaaactgtcgccgactgcaggcgcagtgactgctgaatgtaccctgtgtggcgacttggaatcaataaaccatttgtggatcctg

SEQ ID NO: 96 - DNA, 1723 bp, Homo sapiens
tccactatttactattctgaatgtcacatttatttatttatgttttttgggatggagtcttgctctgtcccccatgctggagttcaatggcacaatctcagctcactgcaacctccgccttctgggttcaagccattctcctacctcagccttctgagtagccgggaccaaaggcgcccactgccatgcctggtaacatttgtatttttaatagagacaaggtttcgccatgttggccaggctggtctcaaactcctgacctcaggtgatccacctgcctcagcctcccaaagtgctgggattagaggtgtgagccactgcgcctggcctgaatgtcaaatttaatcccaaagtttgtttcctcaatgttaaattgaaaaagaaatgacctttacagatcaggagtaaacaaactgtttagctgggagtttatcaagccatgccaaaagtgtcagctgacccaaagtaagacatgttagatgggggttatcataccatggggtttccctaagataaaactcctccatattatactattcaaatacttttaatatcttagtcatttttatttcccttgcaggcaatctctttgaacagaggtttattcaatgaaggaaaggtggagggaagaagggaagaattacaatggttagaaaagagcaactaaagattatttctattatacttctgaacggtaaactagcaattttagtaaatatttgggtccacttaaatctattaaagcagaaagtgtaaagctatctccattagtgaagagatgaagtgacaaaaaccaatcagtttttgtagcaactgatttagaaaatcttgtactgaaatcaacaattagacttgcacatcatagattttcaaatgtttgctgaattgaaaaagaatattcacaggaattatttcccccgaaggtgtcttatatcaaatagatgaacttcaagttgtggaatgtaaatcttttattaaaacagttgtctttccacagtagtaaagctttggcacatacagtataaaaaataatcacccaccataattataccaaattcctcttatcaactgcatactaagtgttttcaatacaattttttccgtataaaaatactgggaaaaattgataaataacaggtaagagaaagatatttctaggcaattactaggatcatttggaaaaagtgagtactgtggatatttaaaatatcacagtaacaagatcatgcttgttcctacagtattgcgggccagacacttaagtgaaagcagaagtgtttgggtgactttcctacttaaaattttggtcatatcatttcaaaacatttgcatcttggttggctgcatatgctttcctattgatcccaaaccaaatcttagaatcacttcatttaaaatactgagcggtattgaatacttcgaagcagaacaggcaatgtgcagccctcatttatgagaaaaccctcaggaaactcccagggtgatgcttggagaagctgtgagttgagctgaagctggagaacttcctccagagcaaagggcttaagaaagaaagaagaactctaagctgggtctgctaacatcactccagtttagatggatcttggcagagagacatgcttgttcctctggattggaaagatgatttactctcgggaatcttctctgtcagcctgtacatctaaaggcatgaagcactcaattgggcaattaacattctgtt

SEQ ID NO: 97 - DNA, 1784 bp, Homo sapiens
gatgcaccatccggctgctggacgactcggagatctcctgccacatccagagggaaaccaaagggcagtttctcattgaccacatctgcaactactacagcctgctggagaaggactactttggcattcgctatgtggacccagagaagcaaaggcactggcttgaacctaacaagtccatcttcaagcaaatgaaaactcatccaccatacaccatgtgctttagagtgaaattctacccacatgaacccttgaagattaaagaagagctcacaagataccttttataccttcagattaaaagggacatttttcatggccgcctgctgtgctccttttctgatgctgcctacctgggtgcctgtattgttcaagctgagcttggtgattacgatcctgatgagcatcctgagaattacatcagtgagtttgagattttccccaagcagtcacagaagctggaaagaaaaatagtggaaattcataaaaatgaactcagggggcagagcccaccagttgctgaatttaacttgctcctgaaagctcacactttggaaacctacggggtggatcctcacccatgcaaggattcaacaggcacaacaacatttttaggattcacagctgcaggctttgtggtctttcagggaaataagagaatccatttgataaaatggccagatgtctgcaaattgaagtttgaagggaagacattttatgtgattggcacccagaaggagaaaaaagccatgttggcattccatacttcaacaccagctgcctgcaaacatctttggaagtgtggagtggaaaaccaggccttttataagtatgcaaaatccagtcagatcaagactgtatcaagcagcaagatattttttaaaggaagtagatttcgatatagtgggaaagttgccaaagaggtggtggaggccagttccaagatccagagggagcctcctgaggtgcacagagccaacattactcagagccgcagttcccactccttgaacaaacagctcatcattaacatggaacccctgcagcccctgcttccttcccccagcgagcaagaagaagaacttcctctgggtgagggtgttccattgcctaaagaggagaacatttctgctcccttgatctccagctccccagtgaaggcagcccgggagtatgaagatccccctagtgaagaggaagataaaataaaagaagaacctttaaccatctctgaactagtgtacaacccaagtgccagcctgctccccacccctgtggatgacgatgagattgacatgctctttgactgtccttctaggcttgagttggaaagagaagacacagattcatttgaggatctggaagcagatgaaaacgcctttttgattgctgaagaagaggagctgaaggaggctcgccgtgctttgtcgtggagctacgacattctgactggccatattcgggtgaacccactggtcaagagtttttccaggctccttgtggtgggcctgggactgctgctctttgtatttcccctgctcctcctccttttggagtcagtctccatgcagtaaacagacccagcagaacctgcccgtggtgagctcagccaagacttggctctccatgttccagcctccgtctgtgactgggtgggtaagttcggtgggccccacccagtgggctcggcagccgtcacttcacagaagaagaaaggaaccttgcttaggcctcagatcccagctgtgctctccaatccattaataaagctgcttttaaccctc

SEQ ID NO: 98 - DNA, 2515 bp, Homo sapiens
aactggctccgccacctcggctgccccgtggccacggccccaatcctggccaggcggagattctgcggacattcagggatcggcttcgtcactgagacctcaggcctctgccagccactccccctccccatacccctagtcatcctcggcaggtctcagtcccggctccatctgtgccctcgccccagccgcagctatgttgcacaccgagggccacgctcttcttcgggcggtgggtcagggtaagctacgcttggcccgtttgcttctggagggaggcgcctacgtgaatgagggtgatgcgcagggggagactgcgctaatggcagcctgtcgggcccgctacgacgacccccagaacaaggcacgcatggtacgctacctcctggagcaaggcgcggaccccaatatcgcagaccgattagggcgcacggcgctcatgcacgcttgcgccgggggtgggggcgccgcggtggcctcgctgctccttgcccacggcgcagacccctcagtccgagatcacgcgggcgcctcggctcttgtccacgccctggaccgcggggaccgcgagacccttgccacactgctggacgcctgcaaggccaagggtacggaggtcatcatcatcaccaccgatacctcgccctcaggcaccaagaagacccggcagtatctcaattctccaccatccccaggggtggaggaccctgctcccgcctctcctagcccggggttctgcacgtcgccttcggaaatccaactgcagaccgctggaggaggagggcgtgggatgttatcccctcgcgcccaggaagaagaggagaagcgggacgtatttgaattccctcttcctaagccccccgatgacccatccccttccgagccgctccccaaaccaccacgccatcccccaaaaccactcaaaaggctcaactccgagccctggggcctagtggcccctcctcaaccagtcccacccactgaagggagaccggggatcgagcgcttgactgccgaattcaatggcctgaccctgaccggtcgaccccgtctttcccgacgtcacagcaccgaaggccctgaggacccgcccccatgggcggagaaagtgactagcgggggtcctctctctcgccgaaacacagcaccagaagctcaggagtctggtcccccttcagggctgaggcagaaactgagccgcatggagccagtggagctggacacccctggacacctttgccctgactcgcctgagtccagccgcctgtccctggagcgccgccgatacagcgcctccccgttgaccctccctccagccggctcggctccctctccgcgccagtcccaggagagtctgccaggggcagtatctccgctaagcggaaggaggcggagtccggggctgctggagcggaggggctcggggacgttgctcctggaccacatctcgcaaacgcggccgggtttcctaccccctctcaacgtcagtccccaccctcccatccctgacattcgcccacaacccggaggtcgggcgccttcgttgcctgcccctccttatgccggggcgccaggctctcccaggaccaagcgcaaattggtgagacgccactccatgcagactgagcagatccgcctgctggggggcttccagagtctaggtgggcctggggagccagggcgctgagaggagtgagaggagccaaggagggtggggattaggaccttaatgggataggtgggagaaccagctcacacacacaccacgaacaaagggatctcttgcatgtgctcatgggtgcacagtgcacccacacatggttaaacatgtgtccataagcacagtactcttattagcaagaaagaataagtactctatttactgggtatatacacacatgtattcatgccctggtcatttcacatgcatatgggattacttgtgtacctacaggcacagcatatcaataaacacacagggctagggtcccaaactctcttgcatttgttcagaagcagtagggaacccttacttatgggcagtctccgatgtctttgccctcctgcagaagcaatcccttgctttccatgtatgccctgaaacacagcctatcatgattttgcacactctctccgtggacatcccagcccattctgcaggtcttgcttctttctccaggcctggctccttattcacaccctgcttctaaccccaaccacttttcaggatatctttttcactcttcttgggggttcctgcagcaacccccagcctcagttctgctgctgtctttactgctctcaacttcacttctcaacttcctgctttttattcccaccctgttcctccaacaactacaacagattgtctcattttcccagggggtgggtcatgggctctaagctgctcttctgtctgtctgagcttatgaacacccccacaggtagaagtggggagaaaccctaaatcactcctctctccacttgacatatcaaataaatgtgttcagaagtc

SEQ ID NO: 99 - DNA, 1984 bp, Homo sapiens
agaggcagagggaggagcctcggggggaaggagagggaggggaccgtcaggaagccgcgaacgccgccgagtgtctgcacacctcgctctgcctgccatggctggttaaagaaccatccggatcgcagcgcggggggagggccgggtggggggagcagcggccgcgcgtgaggccgagggaggggcggcggcgcgagcggcggcggcggcggttccagcatgaagaggagagctggcctggggggcagcatgaggtcagtggtgggcttcttgtcccagcggggcttgcatggggaccccctgctcactcaggactttcagaggagacgcctgcggggctgcagaaacctctacaagaaggacctcctcggccacttcggctgtgtcaatgccattgaattctccaacaatggaggccagtggctggtctcaggaggagatgaccgccgggttctgctatggcacatggaacaagccatccactccagggtcaagcccatacagctgaaaggagagcaccattccaacattttttgcctggctttcaacagtgggaacactaaagtgttctctggaggcaatgatgagcaagttatcctccatgatgttgaaaggtaaatagattggtggtgtgtgaaggtgattgactttgtttttcatatatgaagaggcaaatatctctttagactaaaatagtttttgttttttgaaaaaaacaacatgaaaccagctgttcttttctaaaaaaattcctacaatagtttgaaataaataaagttttgatttaaaaaggaaaaagggatttgaaagttttgaaagttggtatgagagtgtactttttaggtgaaaatttaaaacaagagtttagaagagaaggaaccataatatttaagaacagtaatagctaatattgattgagttcttactatgtgccagacaccattgtaaatgctttgtacatattcattcatttaatcctcacactcattttctgaggagatactattgtcatctccgttctagatcaggaaacggagtcacagacatgttagataacagaaggtcaggtggtactaaaacctgaacttaggctatctggcctcagagccatgctcttcatcaccatgccagattgctaggagacccctctcccatcctgtaggcatcagacttggctgctttaaagctttcccttgctttttgaaaatcaagtatgacccccaaatctgtacacaagcagatgcattctgtaataaatgaaaatacaaaactcagctattgagtcacttttaaatatgcttatttagcacaaaaattataaaatctctaaaaagactccttaatagtaccttttttttaacctgaaagttgactacctacctttcaggaaatataatattttttgggtttagctaggttgactttcttctagaaatggaaaagatggcaccctcggtaccaaagtgctgggactctgcactatgcttgtgtgtatgtgtgtgcctctgtcttgctctcttatctcccagcagtgagacattggacgcgtttgctcatgaagatgcagtatatggcttgtctgtgagcccagtgaatgacaacatttttgccagttcctcaggagtatcaatcacctgagctcaccatagtctaatagaaaacaaccgaaaccaaataattcaagcactgcttattacaattttactgggtctctattttaccctcctacaagcctcagagtacttcgagtctcccttcaccatttccgacggcatctacggctcaacattttttgtagccacaggcttccacggacttcacgtcattattggctcaactttcctcactatctgcttcatccgccaactaatatttcactttacatccaaacatcactttggcttcgaagccgccgcctgatactggcattttgtagatgtggtttgactatttctgtatgtctccatctattgatgagggtctt

SEQ ID NO: 100 - DNA, 1935 bp, Homo sapiens
gttcagatctcttctcagaaccctcctccaagtcccatgccagggagaatcgctgccactcctgctgggagcagaacccagcatttagagggaacaggtactttcactacaagagctggttgtggccactttggggatcggctgggccccagccagaatgtccgcctgcagtgtggtgagaatggccctgcacaccctttaccaagtaagacgaaaaccacagagaggcttctgtctcattcctccgtggctgtggacgcagcccctccaaaccaaggtgggctggcgacctgcagcgacgtgcgacacccagcttccctcaccagctcaggctcttctggttctccatccagcagcataaagatgtcaagttcaaccagtagtttgacttcgagcagcagtttttcagatggcttcaaggtccaaggaccagatactagaattaaagacaaggttgtaacccacgttcagagcggtacagctgagcacagaccccgcaacacgccgttcatgggcatcatggataagactgcgaggttccaacagcagagcaatcctccaagccgcagctggcactgtccggcaccagaggggctgctgacaaacacgtcttctgcagctggcctgcagtctgctaacactgagaagccctctctcatgcaagtgggaggatataataaccaagccaaaacctgttctgtttctaccctgagtgcaagtgtccacaatggggcacaagtgaaggagctagaagaaagcaagtgccaaattccagtccactctcaagagaacaggataactaagactgtttctcatctgtaccaggaaagtatctccaaacagcagcctcatattagtaatgaagcccacaggagccacctcactgcagccaaaccaaagcgatcatttatagagtcaaatgtgtgaaccttaagaaagccccatttgtggaatttggaaacgtgtgttgactcctggtggtaaattaaatagtttttttcatcagaaaaattattttttagccatttttttttctttggggtggatctgatgccattgatatatctaaaatgtgggataaaacttctttaatagctagaaatcaccataaataagaatgctaaacagaattgaaaattatatcaacttaaaattttaagacagcccagaagacattaatgactctcacttatgaaattgtttggcttttgccactttcctccttgcctttgctatatggtagaatcacagaacttacttagagaataaatatgtctattgttcaagagtaacaggtttaactcatgaccaagtgatgtacatccaagtgatgtattctggaaacgatggaattttacagttacagttccattgagtcaaatcccattttatatatacataaaaattaagttctgagtgagttctagctaaatataagtgcgactgtaaacgcagccaatttttttaagcagaatatgagaacacctaagtattctcttcatagcagttcctataaagggattaaacacttatttctgtgttatggttcttattcatatatttttatagcacctttttttggaacctatatttgtgcttgaaggtgtttttgatatttggaaacagtataagccatttggagtcatgattggtggtcaagtggattcaagctaaaatactaagaccagcattcttagtggcgcttataaattagctctcacctggtttccaaactgcttttaacaatggtagtgctcctggaacaatccttccaagctcctctaaggacaatatttaattcagatactaaaggtaagactggttgttacttttgttttgttgtacaattagtactttatagtcacatgttgtatatattaaatagcccagttttattcagacttgtaaatagaactatttcaatgtagttaatct

SEQ ID NO: 101 - DNA, 2277 bp, Homo sapiens
ctcatgcgcgctatttgtttcgacaacaggtagcagctctggacaccatggcccccagctcaccgccgcctccagcccctcggtgttcccgggcctccacgaggagcctccccaggcctcccccagccgtcctttgaatggactcctgcgtctggggctccctggagacatgtacgcgcggccggagcccttcccgccagggcctgcggcccgcagcgacgccctggcagctgccgcagccctgcatggctacgggggcatgaacctgacggtgaacctcgctgcgccccacggtcctggcgctttcttccgctacatgcgccagcccatcaaacaggagctcatctgcaagtggctggcggccgacggcaccgcgaccccgagcctctgctccaaaactttcagcaccatgcacgagctggtcacgcacgtcaccgtggagcacgtcggcggcccggaacaggccaaccacatttgcttctgggaggagtgtccgcgccagggaaagcccttcaaagccaaatacaaacttgtaaatcacatccgcgtgcacacgggcgagaagcccttcccttgtcctttcccggggtgcgggaaggtctttgctagatcagaaaatctcaaaatacacaaacgaactcacacaggcgagaagcccttcagatgcgagttcgagggctgcgagcggcgcttcgccaacagcagcgaccgtaagaagcattcgcacgtgcacactagcgacaagccatacacgtgcaaggtgcggggctgcgacaagtgctacacgcaccccagctcgctgcgtaagcacatgaaggtgcacgggcgctcgccgccgcccagctctggctacgattcggctacaccgtctgccctcgtgtcgccctcgtcggactgcggccacaagtcccaggtggcctcctcggcggcggtggcggcgcgtaccgccgacttgagcgaatgatgtccaccgcgttgctcgcaaggtaatctcgctccgcgcagctgagcgccccgcatctcgcgcctgctacatcaaagggcccgcgcacaaagcagtgtttcttcgccacggtgcatcttcatggtaagttaggatttctatggcaatgtgcaagtcgcactgaaatcctgaaaggccaagcctggagcccgtccaggcttttcattaaggacataatatttacgtctaacagaccttttttcttgtgtatacaagtatatatttttgtttgacgcggactaaatcattttcatttaatttccggtaaacaaaacccacgcgaatgggcacttgtacccgatcataataaaaatggataataatgtgaaggaagaaaagagccgcttgaatcgccgctcagccccctttgtttctgctttctgcggtgatcagagggcgcgtttgggtttgatggcgagtttctaaaggcgaggaaatggtttgtaagaggggaaagaaaaggagaaaggtctaatcaagctcgggttgttcaaagagtcgggttttggggttgaaagtgtgagtttgacggtgcatcagcatgccgcgttaggctcgccatggaaatacgcgcggggagcggccgcttcaaaggcggcacacttcactacagacactctattaagatacatttgcgctgacctttgctttcacgccatttaatactgtcactgcgctctccagtatatacttcctttctagaacccgacttgcccacgtttaggggttcactctgcaccctgatgtgggaggctttggcgcaggggacactttcaggaaagggaggagcacaaggactctgtgcatcttgactgcgccccaaagaggctccaggatcaggagtgaaagattttaaagcagcctccgaagcttaacaaatgagcattccaagctcagttttgtgcaaatcgcctttctgactcttgagtaggatggaggcttaaatttaatggcgacttggggggaagggagccaccctgggggagtctgaggagttcagactgtgcccttgggaatttccactctggctttccgtgccactcttcttcctttccatcccaaaagtctcttgcggcccctgaaacttgtttctttctaaggcagggtgtgtggtacccttaggcctggactagtcctagatgcaaactcaagagcccaaggccaaggggatgtggggaagatggcaggaaagttagaagtccatgttcccttaattgtcttgttgtttattttatccaagtaccccagtgaataggggaaaaataaacacagtg

SEQ ID NO: 102 - DNA, 2046 bp, Homo sapiens
gtgtgcttctgccccgttcccagcctgcccctcccctgaatgcctgtcctgggctgtgtgcagctggtcgggctgggcagccctgggacccagctgggcacctgttctcccattaacacagggtgccctggtcctggtccccgttcctgccttgaggcctgccaccctcctgccctgccctccaagggtatggggggcctgggcagtgctcaacctctgcccagccttgaccagagaccttgctaattgacaatggacaatgctggtgcccagcccagactctggggtggggcagtgcttgagggggtccttgactgtgggacctgaggggctctctggcagctcctcacgtgtgcacatcaccttatagtcacccttgatcctgggtcattgagagtcctgtctgcagccagatgccagcaggctgtggtcctgtggtccctgagccatggaggcagggtgggctcatcctgtgcaccttgttccacagtctccctctttcccaatttacaagaagaccaataagaaaaataagaaaacaagaaagaaaaaggaaaaataaagttatcacctcctggtagcagggagggtctctcagagctgggctgcactacctcctgtcgcctgctggggctgctgtgagggcagctttgcgtctcagctgttgagggttgtctccgtgctcctgcacccctcatgtccctccctcccagagctgcctctgtggggggctggtggcttgctgctctctgacatcagtcctgcctggagaccccttggagatccaggtgctttgaaggtcttgagcacacttgagggtgtgctgggagtggggagcgaagctcatgactgtcccgtctgcccacctctgcagctcagcccacccttcaagccccaggtcacgtcggagactgacaccaggtattttgatgaggagttcacggcccagatgatcaccatcacaccacctgaccaagatgacagcatggagtgtgtggacagcgagcgcaggccccacttcccccagttctcctactcggccagcggcacggcctgaggcggcggtggactgcgctggacgatagcttggaggggtggagaggcggcctcgtgccatgatctgtatttaatggtttttatttctcgggtgcatttgagagaagccacgctgtcctctcgagcccagatggaaagacgtttttgtgctgtgggcagcaccctcccccgcagcggggtagggaagaaaactatcctgcgggttttaatttatttcatccagtttgttctccgggtgtggcctcagccctcagaacaatccgattcacgtagggaaatgttaaggacttctgcagctatgcgcaatgtggcattggggggccgggcaggtcctgcccatgtgtcccctcactctgtcagccagccgccctgggctgtctgtcaccagctatctgtcatctctctggggccctgggcctcagttcaacctggtggcaccagatgcaacctcactatggtatgctggccagcaccctctcctgggggtggcaggcacacagcagccccccagcactaaggccgtgtctctgaggacgtcatcggaggctgggcccctgggatgggaccagggatgggggatgggccagggtttacccagtgggacagaggagcaaggtttaaatttgttattgtgtattatgttgttcaaatgcattttgggggtttttaatctttgtgacaggaaagccctcccccttccccttctgtgtcacagttcttggtgactgtcccaccgggagcctccccctcagatgatctctccacggtagcacttgaccttttcgacgcttaacctttccgctgtcgccccaggccctccctgactccctgtgggggtggccatccctgggcccctccacgcctcctggccagacgctgccgctgccgctgcaccacggcgtttttttacaacattcaactttagtatttttactattataatataatatggaaccttccctccaaattcttcaataaaagttgcttttc

SEQ ID NO: 103 - DNA, 3033 bp, Homo sapiens
ttttgcatttttggtagagatggggtttcaccatgttggccaggctggtctccaacttctgacctcaagtaattctccctccttggtctcccaaaatgctgggattacaggcatgagccaatgctcttggcccaacctgggaggccctgctgtctttggtgcatggtgcagtaggggtcacagtggtctctgcctcattggatcatggtgagacgtgaatgtgaaggcatctggtgtatctggaatggggcctggcatggatactcactgtgtgctcactgctgccaagatgctggaggtgtggctactgtggacacatggtgtacccagttggcactgggcaggcatttggcaggcatccaacaggtgcttgatggggacacagcaggcctgcaagaggcacttcgtgcccacacaaggaaatatttagcagatgtttagtaggtgcccagtagatgctcagcaggcacacagtgtgtactcagctggtgttcaacaggctaatggtatgtactcagctggtgctcagcaggcttacagtgtgtgttctgcaggtgctcagcaggtgcacggtgtgttctgcagtgtgtactcagcaggtgctcggcaggcacacggtaggtgctctgcaggtgcacagtttgtgttctgcaggcgctcagctggcgcagcatgtactcagcaggcgctcagcaggcactcagcaggcacacagtgtatactcagcaagtgcttagtaggtgcacagtgtgtactcagcaggcactcagcaggcacagtgtgtactcagcaagtgcttagtaggtgcacagtgtgtactcagcaggcgctcagcaggcacagtgtgtactcagcaagtgcttagcaggtgcacagtgtgtactcagcaggtgcttagcaggcacacagtttgtactcagcaggcgctcagcaggcacacacaacagtgtgtactcagcaagtgcttagcaggtgcacagtgtgtactcagcaggcactcagcaggcacagtgtgtactcagcaggcgctcagcaggcgctcagcaggcacagtgtgtactcagcaggcactcagcaggtgcacagtgtgtactcagcaggcgcacagtgtatactcaccgggcgctcagcaggcgcagtgtgtgctcagcaggtgctcagcagatgcgcagtgtgtactcatcaggttctcagcacatgcacagtgtgtactaagcaggtgctcagcaagtgcagtgtgtacttagcaggcacttagcaggcgcacagtgtgtattccacaggtgcacaatgtgtatacaggtgctcagcaggcgtacagtgttcagcaggcacacggtgtgtattcagcaggtgcacagtgtgtatttggttgctgagcaagtgcacactgtgtactcagtaggcgcagtgtgtgctctgcgggcactcagcaggtgcacagtgtgtatttagcaggcgctcagcaggtgcataatgtgtatttagcaggtactcagcaggcgtaccgtgtgtgctctgcgggcgcttagcaggtgcacagtgtgtatttagcaggcactcagctgacacacagtgtgtatttagcaggcgctcagcaggcacagtgtgaactcagcaggtgctcagcaggcatcagcaggctctggaatctgacctccctgtgggcaggcctgtctccagttcattctggaatctcatagaagcaggtgctccctaagagggccagtaccatgtcacatggtccaatgtccccacttcagtcctgggaggggtgtgcggggtcttctcaatacctccatctgggaacatgtaccggctgttgaggggccctgaagtgagaagagtagtttgtggtcttcctggagctcacatttttctaagcaaatcctgagcctgtatacttgtacggaacacagtgtgttccagggtcaaatcctcggggtaggatggccctggggctgcatgatggtgcccacccagccctctgagtgcctgaacaagaagcactggggtggcccggtgagttctccctgcagcagtgagggtttggataggaaagtccattcctcgagtcagttggtatttcctgagcatctcctgtgagctggccccggagacaccttggagagcaggtcagctggagaccctgccctagggagtgacaggaagccacacctgtgccagctggccctgcccctgaggttgcggctctgagccaaagcgaagagcctggcctcgcctggctctgggggtgatgcctcgtgggccagggtgaggggttgagatctggtcctgggatggggagggttttgagcagggcagtgatgtgggatttatgctttgcaaggatcccattggctgccatgtggggacaggcctgggaggaacgagtagggagcagcaggaggcctaggaggggccagggcaggtgtcccccggagatagtgggtgctggggctctgtgatgacctggggcttggcaaaggcgggcttgtgacagactgagcctcatctcggcagctctcacacccatggatcctgagcctgattccccaggagggttggcgacgggagggttatgttaagtggctgcgtcttccatctcagggagccccacactggggaacgtcaccactatagcggctgagaggctttgggtcctcatttactacataaaattcccccttctctgtacttgggtcctgacgcctccgctggtcccaggagtttcactccgtggggtggggttgaagggtgcggtgaggcccagaggggctgagtctgcttggaagggtgggccttctcccactgcgggtgctaataccctgtgcccatatcctagccaccctgtcccttatccacataccccactctggtatttcaacagcccagagaccaccacggtgcttgggggctctcggcaagggggcgaagcctccctgagaacttctgcaggccgcccttctcttccctttcctgccggggctcttgctgcagagaagctctctgccacactttttttttttaaat

SEQ ID NO: 104 - DNA, 1961 bp, Homo sapiens
tgtaaaatagggttaataatagttcctaaagattaaataatgacatattcttcctcttcttcttcttcttttttttttttttttttgtttgtttagacagagtttcactcttgttgcttaggttggagtgcagtggcgcgatctcggctcaccgcaacctctgcctcctggcttcaagcgattctcctgcgtcggcctcctgagtagctgggattacagtcatgcgccaccacacccagctaattttgtatttttagtagagatggggtttctccatgttggtcaggctggtctcgaactcccgacttcaggtgatctgcccgcctcggcctcccaaaatgctgggattacaggcataagccaccatgccaggccaataatgacatattcttaaagcctggcatgtaagtgctcagtaagcgttagcaattgttgttgtttaaaaccttcctgtaggctggcagtagtggttcgtgcctatagtcccagcactttgggtggctgaggcgggaggttcatttagggccgggagttaaagaccagcccaggcaacaacagtgagaccctgactctacaaaacaaaaacaaacaaacaaacaaaaaaattagccaggtatggtgacatgcacctatagtcctagctactcagggagctgaggtgggaggatcgcttgagcccaggagttaaaggttgcagtgaattatgatcacactactgcattgcagcctgggcgacagagcatgaccctaactctaaagaaaattaaatttcaaaattaaaaaagtaaaatcctcctgtagactttaaaatgcagttggtaggggttccctggacagcccctccccccgcttatggagcgtggtgtagggtgctcaggaatgtctgggatggcacaggtcaggacagaaggggacgccctgctcagggagcgactgggaggtgggtgcctaagagggctgagcagccttatgatgcacggctagacctaggatagccctgctgtccccactccctccacacagcctggggtcttctctctttagcatgatctcttgccagcacttgaggatttatggcccagaggccccaaacaactgtgtggctttggccaagccctgtgccggctctggctgctttcctcgtctcctatgcagggcactggaccgctctcccgctgagaatccctgataatgacaagcagactttacccagcttatttttttactgtttggctctgactcaagctaaaaagttgctattcagcagagcttgagttatttttattgttatagccgggcttggtctaggatgtatttggctaaagttgatcttgaccttggatttccagctggctcaggctggaggaaggggaaaaggccctgggaggatgagtggcagatggtgggcatgcctcgcaggctgagccgctggcccttcttccctgacagatacaatctgtggggagagaagaccagagtaattgagaagaatgtcaatttttttttttttgagacagagtctcactgtgtctcccaggctgcagtgcagtggcaccatctcagctcgctgcagcctctgcctcccgggttcaagagattctcctgccttagcctcctgactagctgggattacaggcttgcaccaccatgcctggctaatttatgtatttttagtggtgatgggattttgccatgttggctgggctggtctcgaatccctgacctcaggtgatccacccgcctcagcctcccaaagtgctgggattacaggcatgagccaccacgcccagccaaaaagaatgtcagtttctttccaaacttttgttcttgtacaaatattcttaaatagtactctttttactcaaatagcaagcaccatcagctcaaaggttcatcctagaagtggaaaaatgttgggtcccagatatctgttatgcagttttcccaaagggactttcctt

SEQ ID NO: 105 - DNA, 2482 bp, Homo sapiens
atttcgcccttgtcgcagctgaaccgccgactacgagctcctgcaccgcgcacacaccccgcgcgcttcgctctcggcctcgcccggccaccgtcgctctctagaacgccgcgcccgtgacccggaagagcattctccttagcaactgcgggactgcggcggcgccggcctccggggagaaacgcgaatgacaacagagctgctcaaggcgggaactctgagctaagcagtggaggtttctctggatctggagagaagagtgaccttggagccaataatgagccatcctgactacagaatgaacctccggcccctggggacccccagaggtgtgtctgctgtggctggtccacatgacattggtgcttcgccaggtgacaaaaagtcaaagaacaggtccacacgagggaagaaaaagagcatatttgaaacttacatgtccaaggaggatgtttcagaaggcttgaagagaggaacactcatccagggtgtattgagaattaatccaaagaagtttcatgaagccttcattccttccccggatggtgatcgagacatttttattgatggggttgttgctcgtaatagagccttaaatggggatctggtggtcgtgaaactgcttcccgaggagcattggaaggtagttaaaccagagagcaatgacaaagaaacagaagctgcgtatgaatcagatatccccgaggagctctgtggacaccatctcccgcaacagtccctgaaaagctataatgacagtcctgatgtcattgtagaggctcagtttgatggcagcgactcagaagatggacatggcatcacacaaaatgtgctggttgatggtgttaagaaactctcagtttgtgtttctgagaaaggaagagaggatggtgatgcaccggttacaaaagatgagaccacctgcatttcacaagacacaagagctttatcggagaaatccctgcaaagatcagcaaaggtggtttacatcttggagaaaaaacattctcgagcagcaaccggcttcctcaaactcttggctgataagaacagcgaactgtttaggaaatacgccctgttttctccctcagaccaccgagtgcctagaatttatgtgcctctcaaggactgtccccaggactttgtggcacggcctaaagattatgccaacacactgttcatctgccgcattgtggactggaaggaggactgcaattttgccctggggcagctggctaagagtcttgggcaggctggtgaaattgagcctgaaacagaaggaatactaacagagtatggcgtggatttctctgatttctcttcagaagttctagaatgtcttcctcaaggcctgccatggacaattccaccagaggagttcagcaagagaagggatttaagaaaagactgtatcttcaccattgacccatcaaccgcccgagacctcgatgatgccctctcctgcaagccactcgctgacggcaacttcaaagtgggagttcacattgctgacgtgagttactttgttccggagggatctgatctggataaagtggctgccgagagggctacaagcgtctacttggttcaaaaggtggtccccatgcttcccaggctgctgtgtgaggagctgtgcagcctcaaccccatgtccgacaagctgaccttctctgtgatctggacactgactccagagggcaagatccttgatgaatggtttggccggaccatcatccgctcctgcaccaaacttagctacgagcatgcacagagcatgattgaaagcccaactgagaaaatccctgcgaaagagctgccccccatttccccagagcatagcagcgaggaggtacaccagcagaacgcagacaaggatggggctgcccatcttcaggcctctcacagcccctctgctgaagatgcagaagcacagccctccacagaggaacgcctgcctgagactcggggcatatgtgacagggatccagacacacgactgtttttccttcagcaacagagccgtgtattggaagcaaagccccaaaacacgataagagtagaggagcagacaacccagttgcagatttgaagaagcatgtggaattccttgtggcggagaaggaaagattatggaaagaaagtaaacaggtaaaggctgaaaaggccagacttctaaaaggtccagtagaaaaggagctggatgtgggtgctgattttgtggaaaagtcagagttacggagctcgcctctgcattcagaaactgctataccctcttcagccttgcagaggtttgcagcagatgccaggaaagccaagtacattccaatacccaatcttttccctcagattttccatctccagagcttccctttatggagctttctgaggatattctgaaaggatttatgagtaactaaaatggaaggccatagaagaagggagaagaggaaataatactaagtcatacagttaatccagcaac

SEQ ID NO: 106 - DNA, 1741 bp, Homo sapiens
acagaggcaggaagactgctggatgccgcaaggacttcctgtggagaaaatgtctgttctgttgcctgtgtgatctcagggccccacagaacacaatccatcacccatggggcagaacgtgtgaaaacagcaagaccggcagaagcaagcggcgcgaggactcagagcgatcgatattcgtgcggttaaaagaaggtggctaccggctgcgagagaacatcctcttccatctctacgtgagcacctccccctgtggagacgcaagactccactctccctacgagatcaccacagacctgcacagcagcaaacacctcgtcaggaagttccgcgggcacctgcgcaccaagatcgagtccggggaagggacggtccccgtgcgtggccccagcgcagtgcagacctgggacggcgtcctgctgggggagcagctgatcaccatgtcctgcacggacaagatcgccaggtgaggcccacggcttcctctcgaggatgttggctgcggccggtggggagtgccaagccccaggctccctgcatcccacttctggtgaggtcagtgatgctgggcacatgcggtcagggccctgtgcctgagccgtggaactccacagccattccacatgttcagtcccacaccctgaggccaaggcaccccgagtccctgagggagcaaggccctgccacccgaggctgccgctgcagaggcaaacagccccgagcaaggcccggcagccccaggctgtggctgcatggggcaaacacagcctggcctgaggctgccggccagtcggggtggccataggctaacgagaagccagggcctccctccccactgggctttccacaaaaacctgactaatgtccagggacagccaaaggccttgaggtcagctgggtggaacacctttcccctaccatcccgagatattgtcttcttggatggagttttcaaagcctccatgtggaggtctcgggatgagaggcctcggctgagctctgtgcagaggagcaggaagctgcagaatgggcacccgcctccctcccagcacctccagtcgctgccacgccccaagctcctgagctgctctgcccaagacctcccccaaccttggtctgacgcgttgagacctccccctaccttggcctgatgccccgagacctcccccaacctcggtctgatgccccgagacctccttgacctcagtctgataccctaagacctcccccaacctcagtctgatgccccaagacctcccccaggttagtctgatgccctgagacttcccccaaccttggtctaatgtcccaagacctctccgtcctcgatctgaccccgagacctcccccacgttggtgacacccccacgttggtgacaccctgagacctcccccacgttgctctgaggccccgaggcctcccccacgttgctctgatgccctgaggcctccccaacgtggatttgaggccctgaggcctccccaacgtggatctgaggccctaagacctccccaacgttgatctgaagcccctagacctcccccacattggtctgacgccctgaaagcgccatccccaatgcaggacatttctgtaactttggtttggaaaataggggtcacaggtgtggggacagcatgagtttccctaaaagagccatgaattccccacaagcctgataaactaacaacaatgtggtcacaggaagtctgggttgaggaacccagaacacccttggac

SEQ ID NO: 107 - DNA, 2047 bp, Homo sapiens
ggatggaagctccggccgcggagtgatggtggcctcagcgaagatgggccgggcagggaccatggcggtggcagcagaggtggcaggggcggggcggctggcggtagaggaggctgtggtcctcagggggctgtaggtggaggtatggctcgggccagcagcgggaacggcagcgaggaggcctggggggcacttcgggcgccgcaacagcaggtatcccaatagctccaaaacctatcacgacagccatttgtctctttcccctttccttgtcccttccttttgggggtgggggaggaactcacggagccaaaggtactgtgaagttcctaaacatgtctcttccactctttgtctaaactttgtaacgtagatgcagctgactttgcctgtagcctcatagaacccatcccatggctgcagtggaagcttgcggtggctctccagtgaccagaggcatagtgaggtcccagggaggctctctctgtcttgcaacagttatttgtgatctttttctatgtgcctattgtcacaacagagtccggcagcgtcttctcttgagggagcaatttggagaagagctggaacccagactcgcgccctggatgccatcctttatcatccacagcaatcccatctggttgggagcactgctctgggtctcacactgcccctcctctatcctagggagcctgaggcccaggggtggaaagatccagttgcgggtggggggtagtgaaccgcgcaggataatgaaagcaacttgctttggaaatgacctaccgctacccgttgtctgagactgagattatctcagactgtcttctggcttctgccaaaacactcccttaacagaaagcaccgaggggatgggggtaggggggttggggagagtgaggcttgagtgtgaaggaagtctcatatatgcagagctgaaatctccctctttgtatgtccacacttttgtcttgttctctagactgattcttgctattccaaatcctcttccacgttgacagcccttcagatatttcaacactcctctcagcatcctccacttcccccatctctccaagctgaacttggttcacagggtgggattgtcttcgagagctgtgcccaggagtgaacaaccagccctacctctgtgagagtggtcactgctgcggggagactggctgctgcacctactactatgagctctggtggttctggctgctctggactgtcctcatcctctttagctgctgttgcgccttccgccaccgacgagctaaactcaggctgcaacaacagcagcggcagcgtgaaatcaacttgttggcctatcatggggcatgccatggggctggtcctttccctaccggttcactgcttgaccttcgcttcctcagcaccttcaagcccccagcctacgaggatgtggttcaccgcccaggcacaccaccccccccttatactgtggccccaggccgccccttgactgcttccagtgaacaaacctgctgttcctcctcatccagctgccctgcccactttgaaggaacaaatgtggaaggtgtttcctcccaccagagtgccccccctcatcaggagggtgagcccggggcaggggtgacccctgcctccacacccccctcctgccgctatcgccgtttaactggcgactccggtattgagctctgcccttgtcctgcctccggtgagggtgagccagtcaaggaggtgagggttagtgccaccctgccagatctggaggactactccccgtgtgcactacccccagagtctgtaccgcagatctttcccatggggctgtcttccagtgaaggggacatcccataagtagttttgagagggtggatgggttacttgcccaccagaaacagccctagtcccaactccttgcgttcctttggcccctccctgcctacctagaatctgcctgaaagggctggagaggggcagtattgggggactgtgctagctttacccccgcaggacatacacaggagcctttgatctcattaaagagatgtgaaccagc

SEQ ID NO: 108 - DNA, 1936 bp, Homo sapiens
aacacatgcaatgaaatttactaaagctcaagcagttgtttactgcacatgttcagtttttccagaagaaaatgaagctgttgttaagaaagcactggaatttcaagaccttgggaataaaggacaaccttacaggcttagtcctcctgttcttccactgtgctccttaaaggaaattcaattgtctactgataaatttttcagaatggaaccatctgaaattaccaatggttgttttctttctattttaacaagggagcgggacccttctgagacagtgtctgtgaatgatgttttggcccgagctgcagccaagggtctgctggatgggattgagttgggtaaatcatcaaaacgggagaagaagaagaaaaaatcaaaaacatcattgacaaaaggtgccactactgataatggcatccaaatgaaaattgctgagttcctgaatcgagaaactaaagccagtgctaatctatcagagactgtaacaaaaccacctcttccccagaaaaatactgctcaagtgggggcttcctcacagaccagaaaacccaacaagctggccccccatcctgcagtgcctgcatttgtgaagaacacttgtccctccagaccgcgtgaacggcagacacacttcttaagacctcggccagaagacagaatggttgctctgaaacccatcgagattgttctgcctccagtctttatgccattttcaagtccccaagggatcagatctcggatgccaactcaacatttgtactgtcgttgggttgcacccaaggcacttgtgcccacctgccttcccacacactcactatccagaaaagaggaaaagcctaaagatgacacaccttcctccctactcaggcctcctcggcgatggctttgattgtcttgtgttttttataggggccaaagagcagttgattttttttcaaagtctagtatttctctgaagattctacatctctacacaagatattcattcttttggtcacctagggatcttctaagtgtgatattactttcagagaattcagacaagtgagaaacaataatgtaggagtcagcaaagcagaattcagagacttcagccaatcactgctgctctgagaggatccagttagagactcagtatcagcggtcagaacttatctcactcctgtgaactttcaggctggacttaaagctgccaagtttcccctgcagggaaggaaacactgcctcccttcagcaggtagctcattagaaagccaaacaggcaaacgatcctggcctctcccgccagctgaccgctcttcagcatccatgcggttgtagtcgtgactttctcagtcacgatcaagggtgattttttcttaaatatcaagctgttctttgaacagggaatgaacatgagtttttgtaacgtgactgaagttgagtttaagtaggaagcgcaggaagttcccaagtgccaggtgtgtgtagctcagagttccttttacagtgaggtgtctctcactgggggagcttccaggatcctgagcagactggacacaatcatctctcccttcctctatgtcaagcactgttacaaaagactgtgagcaaatttccatctaaatattaataattctgaagaagaggcaaaactgttgaatgcaagcgatacctattgttgaagaaacccacaaatttctgattctaagatcaggggatacaacaaaatctacaagtcatttcaaatagcacacaggaatcaaactttggtaaatcatttctgaggcacaattaaatatattgtagcactatgttaattaattatattaaatgtcgattcatcttgaatgtattctcaattgcctaccaaaaattggtatgattatcatttctgggtctactgatttttcatcatggcaacagaaattgtcattaaatagaattaagatac

SEQ ID NO: 109 - DNA, 1959 bp, Homo sapiens
aaaagccaagcgtcgtcgtcacccaaggtcaaggggtggaagttacacctggtgcagccctcggctctgatgcaaaagcagcttttgcccctggctgcgggacagcgctgtgactactcgcaacgggagagctgctgccagtcgccacaccgtgcggaaagcgccggcgaccggagcactgacaatggtctgcataggggagcggagagaagcttctgttgcgccctagatccgctgcctcggcgcccgcccgcagggaggagggggcgcgacaggtcgtctagcgcgtgccccggagcccgcgcccgggtctggccgcctggggcctgtgcttccttcagagactcacacaagaggtttatcatgagaaggaccgcactatttcatttcactcctacaagttttcatttacgttacacattgagaaagttatgagaagcaactgtcactctctggaggtggagactgccgtgattcacaaagacaagaggatggatcatgaagccgcccagctggagaagcagcatgtgcacaatgtgtacgagagcacagccccttacttcagcgacctgcagagcaaagcctggcctcgtgtccgccagttcctgcaagagcagaagccaggcagcctcatcgctgacataggtaaccaggcggcctcatcgctgacataggtaaccaggcagcctcatcgctgacataggtaaccaggcagcctcatcgctgacataggtaaccaggcagcctcattgctgtcataggtaacccagcactgggccgtgtagcatgaaataccttccattgagcctttgcttttcacattgatttttcatttttgttctaataggaatcctgaaattgcacccttggcatgccagtacctagaatattcattttacagcagaaactcgagacagtcaagtcagcagcaagtaaaaaactttctcaaacttttattttatttttattcttttgagatggagtttcactcttgtcaaccagattggagtgcagtggtgcaatctcggcttgctgcggactccgcctcccgggttcaactgattctcctgcctcagactcccaaatggctgtgattacaggcacccgccaccacgcccagctaatttttgtatttttagtagagacggggttttgccatgttggccagactggtctcgaactcctgacctcaggtgatccatctgtctcggcttcccaaagtgctgggattgcaggcttgagccaccgtgcctggcctcaaactttacctttagacagtggctcttcagggcctttgtgtacatcctccaccaaaacggacctgacattgattgactaaatcaggatggaaatgatggcttgtgaaactaaccgttgtaaatttaaagatattcacatttgccaaatgtgttctcctctggtggctcactttgagtggctcacatgccttctatagaattgtgggaatatggaagaggtccagtaatatcttatgaatctcatgggtcctttcctttaattattctataggtgtttcattataggagcgcatctttaattagacagtattttaataataacttatttgtctggaggacgttggttcagtatcttcgtaaaccaagaactggtaaaccacagcttagtagatctaggactaagacttaaaatgtggttggaatctcactcaaggcctacccacctaaaactgcgtcctagcaattgcatgctgactgcacctatgagtcgtaagtctgtagttgcaacgtgtgtctagtttgatattctttctaaatactggtaagagaaacagacataccagaacttgtggcttgctgaagatggtatgagtaatgtggaatctggggaaggggtgcatgtcacatggaaattgggagtctttgaaaaatatctctatcctgtaaattaaaaaataataaatctagtttcggagtgtgc

SEQ ID NO: 110 - DNA, 2476 bp, Homo sapiens
cccagccttagtttgtccctaggcctctagagcaccacagttactggaacttcacaggtgcggccactgcgcacaccttcctggaagcaggcccagccccacacgccatgttctcggaggagaagccttctctgagatcctctccttttgttgagaaaggcctggctagagtgctttgtgcaggatggttccagtgcctacaccctaggtctgagaagccacatggctcagtgccttcaggacatgccctcccctcccctcctagtgtcgtttctgctgagcagctggtcgtaaggacccgggccttcagctttccccgcatgctggctttccaatttgacatcactgaccaggcactaagagattcccaggtgctagacgaggtgagtaacatgtctgtccttcagcggcctttcacagcccacctaagggcaccctgcatccaagcacatttccattgcccagctgcatccttggtcggggggctgctgaacagtggtatcttcgtgggttttctctcatcgaacaccaccagcttaatccagttaaggaattcctcataacttagccctgtaggtatttccttaggggataacaggagttttcaactaaatagaacaaccttttttctacttcagttagccctataatgttcctcagtatttcatattggaaagtaaacaattctgtgcctgccagggaacaggaatcctgggaactgtttagttcaaaagcaccgggaaagtgagtggctggcagccagcaaccaaggtcatcttgacccaggaacacatgttagaagaatgtggaacattccgcaaatactgggtgcagggtttagcacccctgaagatcggtgatggagatgctgtctaacgactatgagattatcagtttcatcccgaattcccagaaacagaggggactggacgaaactagtgacattagggagaggggcggcacataggctggttattcagaagaggaagcagaatgaatgcgcgcctcacaggctttcaaatgactgtggtggtaaaaaggcaggtgcgccatgctgccactgtgggagaccgaggaacaagggccacaggtacccacacatctcaggggctggctttctttgagggaatgcaatgggcagctcactgtccacattgtttctgagctcttgggagtattttcttagaaaacagtaactttcaatgtactaacaatccttttaagttattctccataaatctgtcttttgactgaattacaagcttctagagggcgagagttagtaagccccatgatgtcacataggccaaggaagttatgtcactccgccatggagtctctaaatatggggaaaccaactatcctattaacaattcaccaactgtccataaaaccccgttagacccaggctgcatgccttgcagtgggggcctcacctggcatcctgcagacagggagacagtgcaatcatgatggagcagtccttggcagtcatggcgacgcggtactgctgcacctgcaggggcgggaaagatcagctccaggtcacacaggaagcctctgcccccccacacaaccttccttcccagtagccaagtgtgggaactgcttcctgcctcagaacctgagggtgggattaggagcgagggccacggtgagcacgggcgtcaggaggtcgccctgtgagagcacctgggccagccctcagtgccacggggctgctcagaggccagcaccgccccctgacctctcacggcaagcagtgtgggaccccgactccagaccctgagacggatgatctgtcttcagcaaggtcaccacagtcggcctttggaaggaaaagcagtaagccacctgagccccgcatgttggccacactcagagtatcaagtgagtatcactcgacacctgcaaggagagcgcagggggtgttcagcaaggcatcgcttagaacgacattccctccggaacatcatacagccaccagagacaacggcagacggccacccttctacaggctgtgcatgtgttaacttgctccaccctcacagcagcccaacagggcagcacggccggcgtcccactttacagacaagcaacagacacagacatcacttgtctgtcatgccctgcttgtcaatggcaaggcagggactcaaacccggtacgctggctctgacatttacactcttcaacacatgctccaagctatgtgggtctgtccatactgaccagggacagctcaacacacaccacactgtcagagtcgacatacgtaaagctgtacatgtgcacatgtgtgtgacgcgggcagggagaaaggtgaaggacaggcaccacaatgctcacaactgtctcctctacagagcagaatgtgaggcactctctcctcttccttctttggactttcatatatggtttgcattgttttagatggcatagctctcgctttcacaaaaataaacagttgtaaaag

SEQ ID NO: 111 - DNA, 2167 bp, Homo sapiens
gtacacgccatggtgtgggagcagcctgaccatcgggactcaggagcttacagaattttctggggtttcgatactctagaggtttcccctggttacttggcgaatattctatgaaaatgaagagaatgaagtgaagtcagagtcatttactcagaatgcaccctactgtaaatggagaggatgctacttggagtgtgtggtctgtataaatggagaggatgcatatgaagttacaaagggtcggtaggctccacgacaaaagtcaacccttctgtaaatcacctgctgtggttatgatgctctgagttcaatacgtctgaacctttgctgtctatggatctgctctaaaccttatagcctgcttatgggggaaggtgacgccttctgggccccatctgtccttcctcacagcaccctcagcaccttaagccaccaccctcagccacaatttggcagaaggatggagtccaaggtctcagaaggtggcctgaatgtgaccctcaccatccgcctgctgatgcatggaaaggaagttggaagcatcatcgggaagaaaggagaaactgtgaagaagatgcgtgaggagagtggtgcaaggatcaacatctcagagggaaactgcccagagaggattgtgaccatcacaggccccacagacgccatcttcaaggcctttgccatgatcgcatacaagtttgaggaggatatcatcaactccatgagcaacagccctgccaccagcaagcccccagtgacgctgaggctggtggtgcctgccagccagtgcgggtccctgatcggcaaaggaggctccaagatcaaggagatcagggagtccacaggtgcccaggtgcaggtggctggggacatgctgcccaactccacggagcgagcggtgaccatctcggggaccccagatgccatcatccagtgcgtcaagcagatctgtgtggtcatgctggagtccccaccgaaaggtgccaccattccctaccgcccaaagcccgcctccacccctgtcatttttgcaggtggtcaggcctacacaatccagggacagtatgccatccctcacccggatcagttgaccaagctccaccagttggccatgcagcaaaccccctttcctcccctcggacagaccaaccccgctttccccggtctggacgccagcccaccggccagcactcatgagctcaccattcccaatgatctaataggctgcataattggacgccaagggaccaaaatcaatgaaattcgacagatgtctggagctcagatcaaaatcgccaacgccacggaagggtcctcagagcgtcagatcaccatcacggggaccccggccaacatcagccttgcccagtatctcatcaacgccaggctgacgtccgaggtcaccgggatgggcacgctgtaatcctacccagcacccttcccccgcgtcacccacctgccagagcctaaggcccccggctctcgcactctgtacagcccaccttccctgcctcacagataccaatagagaggttttcttaattaacaaaaggacgtatgccatggagaaacacacccgcgcacacagctgctctctacagaggctgcaggctccgccgagtcccccctcagtgttattttatttatgacttacgctcccgtctgcccatgcaccggcatgcagtggtaattattttagaaatattgttccttggtgtcagcgtagctgtctgtcttaggagctgggtcggcgttccgacagcacttcctgtccgcccttctcctctgccatccagaaccgtccagaactgttgcctgagacccctcctctctcacacagccctgccatgctgactcggtttcccctcagagccattgttgtctgggctcgagtttctgccccaggttgtgtgctggaatcggggggtggctctcctgccacccatggggagcgccaggagaggagggtcatggaggatgttggggctctgaccccaggagtggggtggagggcggagcctgctgggggccctgccttcacagagatgccgcgtgctgggaaggctcttggggtcccctgagcgtcttccagggtggctggagagcacagacgcgccagggagccccctctgtgctcctcagagttcaataaatgtcgtggcccctcctc

SEQ ID NO: 112 - DNA, 2374 bp, Homo sapiens
ttgattacatataaacgagtttcctttttttctacatagcacacaggtgctcaacatttaatgaataatataacagatactgtcttaaaagtttaaaaacaggatttgtacttaatcctaaattcctcttatcacacaccagaaaataatttggattttatttacaaactacatccaaatactcttaaggaaagagtgtcatttagcttggagtagggactgactggggtctaagtgttggaaattaaattctgccattcagtccaacctcaaaggtcttccaggcaaggagttttgcaaggactagaaaccctttcacacttgaagtgcaggtgttggctgaaagaatagagggacatttcacaaacacagaacacggctcccctacaggaaagggatggagacagctacctttgctcttgctctcacattctctgtcctcatggactttcttctctgtttccctctgcctatctatctgcctggttctcttgcttctcctggccaaccagctttctcattagtgcatatgtagctgaaaaatccacccctcaagaacccactccacacaacctttccttttcagtacccaccacgctctgactagcatctctgtgacgcctaaggcaaatttttgaggatctgattggtttagttcatctgcctatgggtgagccaccctggggtcaggtgcctgtccaatcacctgttaccaaggaggcagggccgtgtcatttaagcatggccccatggactgaccctttcagcagggacttttattgggggctggtacccagaagaaggagcatgagtgggcaagaccttcaaaaagaacctactacacactggaactgactagtactcctgggatgccatgccacgcagcagccagcactcggagagcagtcccctggatactaccacacagagaaaaggggcatcttcacttgcacatcaggtgagggtgcacacacttgaaactctgctagactggccagagctgccccagccacttctcaccccaccaccagttattgatacagccgctgggtctaggaagcgatttctgaacaaggcccagttagcacaatgtcttgctcagcagacaataaatacttgtaaattgaattgcatgatcttagctcaggtgctactaatgtggctcacggccacacacttgcatggataagaaaaccaatgagcccctcaacagagtcttttgaaacaaaattggtttcaagtgaaacttacattattttttggctgtgaccttctgaatataataacttagtgtcctgagaattgaaaggcctcttgatttcttaggtgaactgttacagaatcctagcctgtggtaaatgctaaaatgtaaggcgtttctgagaaggaatatttaggaaatataattgtgccacacacacattactttagaagatatgcagttgctctgattctgcaggtttaaaaaaaatgggaagtttgtgatatggcagaatctgtctccattggtcaaaccatacttcagtgagagccattataagtgaaatctaaaaattgatcgttttcattctctgactttggtcagacttttgcaaattatggagagaggccatcaacatattttacataaattactgtggccccatcttatttctcctcatttcttccttatgtttaaacacgcccccatctcacacacaaactgagaaaagatttgtatcaaacagaatcagaggcatatgaatggactggaaattgtgaaaaaggtataaatatcctagaccttgatcaactcactttaaactggtctctgattcctcatctgtcaaatgagtataagaccctctgtacttcccatggtgattttgaggagcacatgcataatgtatctgaaaatggcttgacaagcacttgaagccattcttactaaattattagttttgtaattcggttttatccaggaaaatattttagctcctcctatctgctgaattaatttatacagtcacatgttccatgacaccatgttttgccaaggaaaaataaagaaattcctaaatttgaaattgcccacaagatctagcctcatctggagttgctgttattgtccttgttgtctatgatttggaggatatgtaagtacttgtacatgtgctttaactctgggtgaaaaaccccaaccggtgagtctttaaaaccatattagacacattgggcaaagtactgagcagaagctttgaatgtagctgttgttattttaatgcttcgctttctaatgaactttgtacgtccttagcctctgccgggaacagagtgttcatatgctgttagaattttttattgtaaaataaaatgacaaaggctttcatacccc

SEQ ID NO: 113 - DNA, 1931 bp, Homo sapiens
agtctccgcgacgcggcccgcctcggtcaccgcggccaggcccaggctggtactgaattaccttctattaccagcaacgtcgcttctcaggccttggactacatttcccttgaggctttactggtcgactctctgtctcctcccctccccccgcgaacttggccgcctccttctgtgacgatggagctcttgaggactctgcacttgtccaagagaagaatccagagaaatcagagcaggtcaaatagttctaaaagccatggcccagggactggtgacattcagggacgtggccatagagttctctctggaagaatggaagtgcctggaacctgctcagagggacttgtacagggaggtgactctggagaactttggtcacttggcctcactaggactctccatttctaagcctgatgtcgtctccttattggagcaagggaaagagccctggatgattgcaaatgatgtgacaggaccatggtgcccagacttggagtccaggtgtgagaaatttctacaaaaagacatttttgaaatcggggcattcaactgggagataatggaaagccttaaatgcagtgacctggagggctccgattttagagctgactgggaatgcgaaggccagtttgagagacaagtcaatgaagagtgctattttaagcaagtgaacgtcacctatggacatatgcccgtgttccagcatcacacgtctcacactgtacgtcagagcagggagactggtgagaaactgatggaatgtcatgaatgtgggaaagcatttagccgtggctcacaccttattcaacatcagaaaattcacactggtgaaaaaccctttggatgtaaggaatgtgggaaggccttcagccgtgcctcacaccttgttcagcatcagagaattcacacgggtgagaaaccttatgactgtaaggactgtgggaaggcctttggtcgtacatcagaacttattctacatcagagacttcatactggtgtcaaaccttatgaatgtaaagaatgtgggaagacctttaggcagcattcacagctgattctgcatcaaagaactcacacaggcgagaaaccctacgtatgtaaagactgtggcaaggctttcattcgtggctcccaactcactgtgcatcggagaatccacacaggggccagaccctatgagtgtaaagaatgcgggaaagcctttagacagcactcacagctgactgtacaccagcgaatccacactggtgagaaaccctacgagtgtaaggaatgcggaaagggctttattcacagctcagaagttactcgacatcaaagaattcattctggggagaaaccctatgagtgtaaggaatgtgggaaggccttcagacagcacgcacagctcacacgacatcagagagtccatactggcgacagaccctatgaatgtaaggactgcgggaaggcatttagtcgtagctcatacctcattcaacatcaaagaattcatacaggtgacaaaccctacgaatgtaaggaatgtgggaaggcctttattcgtgtttcacaactgactcatcatcagcgaattcacacttgtgagaaaccctatgaatgcagggagtgtggaatggcctttattcgtagttcacaacttaccgaacatcagagaattcatcctggtatcaaaccttacgaatgtagagagtgtgggcaggcatttattcttggctcacaactcattgaacactacagaattcatactggttagaaagccttgagtgtaagggataaagataagcctttatgtggagttcacatctggctcagtactaggtaatttttaatgtagtgtaattaatgtcagaaaacacctgtcacttccatcatagaacatcagaaaactcacacccaaagaaaattaaataaatgtgggaattctt

SEQ ID NO: 114 - DNA, 2618 bp, Homo sapiens
caagaaggaagcttgttcaaacatgaataaaagactgtgcatcttctgactttgtaggtgtggaataacaaagatctgttcctttattgggtttccagaaaacatctccaaagctataccagtcatcattttgtgctttcagaaatgagtaacattgtaggatagtacttattgcttgtacttagctttgtgtgctagctgagcatttgtaaatagaaggcattcacgggtaaaatgtgtttcctttagccaaatgcacaatggtagtgcctttctagaatccaagctaaagatgtcgtcacatgccacatccacacacttcttagcaaaaatccaactagaagaactttgctatttacaacaaaggcaaatgctatcaagaagtaggcttagtaccacaggaagcggagccaaatgtgttcttgaaatttataagttgacctgaaaataatgttttgggaagccatggcttgccgttgtcagctgtcaaaattgagcttggcaggagaaatcagggtcaggaacagaatagagatagtcaaaaagagacagaacagagagagggctactgttgtttctggagtccagtgaccacccgggttctagtgtggtactggcagtggactaaataagtggatccaccctaaggtggagagaaggttcatatggagataatttaaagagctgacttttagcccttccaaagaattacatgttcctaactgccaacctaggaacatcctggattaacttgcaatttaaggctgtggtatacctgtttcaaataaaatagccctgtgaatagcatggaagtcaaatgatatcaactaggtttgaaacaacctccttctctcttttgaatggagcagtgattaaacgcaagacatcagcttagaaaatgcatgtattagcaaacgcctaagatgaggaaagatctgggcatgccctgaagccaatgcaatttttctttctccaccccaaacctgtgctacgtgatgaatttacagtattaaaaacattgctgccgcctacttcttccagctgggacttcaggaccatctttgaatcctcctcggctctccacacccagcagtgcagcaactcctcatctctctctctctctctctctttttttttttttatttttttcgagacagagtcttgctctgttgcctaggctggggtgcagtggcacaatctcggctcactgcagcctccgcctcccgggttcaagcgattctcctgcctcggcctcctgagtggctgggactacaggcgcgtgccaccacacctgactaattttttgtattgttagtagagatggggttttaccatgttaggatggtcttgatctcctgacctcgtggatctgcccacctcggcctcccaaagtgctgggactacaggcgtgagccactgtgcctgtcctacccctcacatctctttaaatatttttcaaatatctgccttccttttcaatctcatggacttggttgtggttatggcctcttgtgagagggtttcttgcttccatttttctccggcttcagtccatcttccaaacccatgtcagcggcttctcctgcttgcacaggaaatgaagttcagacagtttgcatttgagccttggctcactttcccagcctcacctccagtgacccccttctctgccctaccccagtccttcttagcccatctttcttctcaggacacaccaggcaacttcatgccaccattccttgcgtatgctcttctcttggcccagctcactacctctctgaaatgttccaaaacgcttccaggcagaattaatcattttgtgtctgtattccaaaaaccagggttccattctctgtttatcatggtgatgatagttatttacttgtcactcttagttagctttgtaacacctagcacagtaactgaaacagtagatgctcaaacatggatttatttttaacttaaaatgagatgggtattttaggatgccagaatctttgggtcaaaaagatgtggcttagttttcatgtcaggaacggctcttagttcaagcagtgaaacaaccctggctcattcaaacaggaagggaaaaaattcaaggctgttgagttgctcacaggctctgaggggttcatggaggcagatgctggtggcctcagcggaaggagcaatacacagactctccacagagaacccattctgccactgctgctgggtgcagagtctggttgcacttaccacgccccaagcctgatgccagattctgctgctccctctggaaactgatgtcgctcccagtgcagctgccaccccagcccaaatggattccctgcagcccctccttagcccatgtcatgccaagagtcagtgccatctgattggctgagcctggatcacatgcccaagccctagctgcaagagaggctgggaaagcaagcatctggcttctgtggagttgttggtctctgcccccatcaagactcatgaggtggctgggcacgggcatggtggctcacgcctgtgatcccagcgctttgcggggctgaaacaaggggatcacttgaggccaggagtttaagaccagcctgggcaacaaagtgagacccccatctctatag

SEQ ID NO: 115 - DNA, 2410 bp, Homo sapiens
ttaactcttccagctgggttttgtaactctccatatttctaaccaacatgtttttattgctgcctcttgattttccagctttgaacattatctgtgggactttccactgtggcagataaggattgagtgcttttacgccttgacccagagtgcgcgcttcccatcccaaatcctccccatacaggggaactgtaattgcagtgtgagcccgcccaagtatgtcctcttcctcctcctcccctgctcctcccgctcctctacccctcctcctcggggctgtcttctgttccagaccttcttcctacacattctccttgggtgtgctgatctactccacggcttctgccattatctgcaaggaagagactctcaaacccaggtctccagccccattcttgcatctaattttcccactgcctgttagacatccctaccttaaatgtgtagaaattcaaaaatcacaatggaatttattcccacacacaggctcctcctcctggccagtttcctctgtttttccatgggttcgccgcaactgttttttttaaattcgtatttcagtgtctttggggtacaggtggtttctggttccacggataagttcttcggtggtgatttcttaatgttagtgcacccgtcacctgagcagtgtacactgtacccagtatcacccttttatcccccaccgccctcccaagcttcccctccaagttcccaaattccattacgtcattcttgcaccacaggggttttaacagctctcttgccctcgcttctgggagcctcaagcatgcgtgtcacagactgattctgcaattcctgtgaaacctgttcctttggatccaaatgcagtgtgagaggacaggacaggacaggtcattgcttgtcaagatgactcccacttggctccagcctggactccacggcacacccaccatgccagccatcccaggcagttttctcagctccagaagaatcacactacttctctgcccaaaaccctccaatggctcttctgtccccacaggataaagcccacacagcggaagccagtgttccaggcccttctgcagtgctggtctccagtgctttcaagtgaggcctcccgtttctctacagcttgggtttgacctagttttgctatgaagggtattcagagaaggaacaacagcgggtagacaatgtgggcccaagggaggtttttttttgtttgttttttgttttccgagacaaaatctcactctgtgccccaggctggagtgcagcagcgcaatcgccactcactgcaacctctgcctcccgggttcaagcgattctcctgcctcagcctcccgagtagctgggattacaggcactggccacctcgcccagctaatttttgtatttttagtagggacagggtttcgccatgttggccaggctggtctccaactcctgacctcaggcgatctgcccacctcagcctcccaaagttttgggattacaggcgtgagccaccgtgcccagcagaagattttaagttaggagatagtagagcatgtttctatgctattagaaatgaataatgggcaaagctaatgatgcaggaggaaaagaaagagacagagacacacgatggcaagagcagaggcatggagaaggtgagagggcacgagatgctgagatgctgagcccaaaacaagcagcagcctctggtgggcatggggccatgccatcactctggccggtgggcacgaggccatgccgtcactctggccggtgcgcacggggccgcgctgtcactctggctggagagttggctgtgtgcagacacatagtggagtcagcagtggaaaggatggcactgccctctgtcctgtaccaagatacacttgtctggctcagataccaagctcactgtttactgccttgcccagtgctgttgagacagtgtgcaactagatagccttgtgctggagtcttaatgtggacacctcattatttataagccacttaacctctcagaacctcaaggtccttgactccaaaatagagaattgattgatgtgggaaaggcttcttcaatcctaacgatacatgctgcttccaggtccactgtgaaaattaaaagggataatagccttaaagctgctagcagaaagtgaccgtaaaataaatgtgatcttgaagacaagcacatcctcatggtctgaaaataataaagtaaaaataactatcaaatagtacctaatgtctcagatattatgctaataagcatttagctgggcgtggtggtgcatccctgcaatcccagctattctggaggctgaggcaggagaattgcttgaatccgggtggcagaggttgtggtgagccgagattgccccattgcactccaccctgggcaacaagagcaaaactgtgtctcaag

SEQ ID NO: 116 - DNA, 3174 bp, Homo sapiens
acctctggatgcagacccacccctccattggctggccacagggagctcaccagttcctaatctgttatgctctcccaaatgaaagtcttctgctccggaagcagcagaagcagcaggagtagggtgggaggtcagtgtcccctgctctgtccgaaatcccacatcccattctgcccccaggcctttccatgggtaaggagaaggcacttagcctccagatgatgaaatactgggccaactttgcccgcacagggtgagtctgccccccagcacatctgggcattctacctgcccagtgctggacctgaagaagccagctgcttcggatatttgccccagcatgtcctacaggaactgcccagtcggcccaaacagggtgccccttcttcttcagctttcctcagtcagtcaccggatcctaaacgtctctagaatgtgtccttcttgatccatgacccacactcttcattcactcaagcattccacagtcattcaccactgcactcttttgggcccagccccagtactgggagctggaattcaaggatgttgcagacatgagccccatcctccagcagctcaccacataaaatcaggaaattacaatctggtacgctgagagctgtactgggggagcacaaggcactttgagagcatagaggaggtgtctggcccagcctagggggcaggtgacatgtaaagagagctttggctagccttgtgactattttcttaaagtctcgctctgtcacccagactggagtgcagtggcgcaatcccagctcactgcaatctccgcctcccaggttcaagcgattctcccacctcggcctcctgaggagttgggattacaggccaccacgcctggctaatttttgtatttttgtagaggtggggtttcacgttggccaggctggtcttgaattcctaacctcaagctatccacccacctcggcctctgaaagtgctgggattacaggcatgagtcactgcgcctggcctctctcctttcaaatcatcctccttatgacactcaaagtgtctttcttcttctttttttttttaaatttttttgagacatggtctcactctgctgcccaggctagagtgtagtggtgcaatcacagctcactgcagccttgacctcccaggctcaagcagtcctctcacttcagcctcccaagtagctgggactacagacacataccaccatgcccgtctaattttttttttttttgagacagagtctcgctctgtcgcccaggctggagagcagtggtgcgatctcggctcactgcaagctctgcttcccgggtttatgccattctcctgcctcagcctaccgagtagctgggactacgggtgcctgccaccatgcctggctaatttttttgtatctttagtagagacggggtttcaccgtgttggccaggatggtctcgatctcctgaccttgtgatctgcccgcctcgggctcccaaagtgctgggattacaggtgtgagccaccacgcctggcctaatttttgtattttttgtagagatgaagtcttgctattttgcccagactggtctccaactcccgggctcaagcaattttctcacctatgcctcccaaagtgttggtcttacaggtgttagccaccatacccagcccaaggggtctttctgaaataacatctgaccaagtcactctcctgtttaaaactcttcatggcttctctctgcctccaagataaagtcccagctcctcaaccttgcgtgaaaggcctttcaaaatctttcctatgtcatctcctttccactttgatccctttcacacactctcttttttttttgtttttgtgtttgtttttgagacagtctcgctctgtcacccaggctggagtgcagtggcgcgatctcggctcactgcaatctccacctcccaggttcatgctattctcctgcctcagcctcccgagtagctgggactacaggcacccgccacctcgcccggctttttttttgtatatttagtagagacagggtttcaccatgttggccaggatggtctcgatctcctgacctcgtgatccgcccacctcagcctcccaaagtgctgggattacaggcatgagccaccaggcctggccacacacacactctgtttttacctaactcttgacttgtgcttcctccaaaagccttggtcttttatatctctcaacctggcacatactgtttgctctgcctggaaggcccaccccaatacacactttcctactctttattaaagttctaagtatcatctccgtaaagccctctggaaccccaagtcccaagggcaaattaaacgagggaagggtgaaagaaagaagcaggatgaaaaggaacacaggtaatcctctcttttttatttctgggcagaaaccccaatgatgggaatctgccctgctggccacgctacaacaaggatgaaaagtacctgcagctggattttaccacaagagtgggcatgaagctcaaggagaagaagatggctttttggatgagtctgtaccagtctcaaagacctgagaagcagaggcaattctaagggtggctatgcaggaaggagccaaagaggggtttgcccccaccatccaggccctggggagactagccatggacatacctggggacaagagttctacccaccccagtttagaactgcaggagctccctgctgcctccaggccaaagctagagcttttgcctgttgtgtgggacctgcactgccctttccagcctgacatcccatgatgcccctctacttcactgttgacatccagttaggccaggccctgtcaacaccacactgtgctcagctctccagcctcaggacaacctctttttttcccttcttcaaattctcccacccttcaatgtctccttgtgactccttcttatgggaggtcgacccagactgccactgcccctgtcactgcacccagcttggcatttaccatccatcctgctcaaccttgtgcctgtctgttcacattggcctggaggcctagggcaggttgtgacatggagcaaacttttggtagtttgggatcttctctcccacccacacttatctcccccagggccactccaaagtctatacacaggggtggtctcttcaataaagaagtgttgattagacctg

SEQ ID NO: 117 - DNA, 1687 bp, Homo sapiens
acacggaccccacgagcgcggcggcggcgacagcagcgggccaggcaagagcacaacatggcggcgggcaggacggaccgagctacagcagcggccgcgcgaggaagtgaggtctctggcgaaggcgggaagcgctgcccctccccccgccgccgcttccctatcaccctcgcacagaaactcccgcacactcacacacctctgctcaggagtccaggaagagcaggagccgcccccgcgctcctacggagtcgggcaatgcagaggcccaggcgcggcggaggggagggggaagtgtgcgtcacggagaacggagcgcgcgcgaagcgggggcacaagcaagatggcggccacgccgtttgcaccgtttccccttttcccttccccctcccttggcgcctggactcccagtatcgtgcggtgcgcagaagctgtgctccttgaggtctcgcgagaattgggaaggggcgacgacagagggaggcggaatgagatctgagagttttaaccccgccccctttcgggagctcgagatctgagttttgaccccgccccctttcgggggatccggaggcgctgcccagtgacctccaccaccctgcctatccttgtggatctccttggtgcgagcttgaattttaggaaataagtaggtgtgtgcgcgtgcccttgagttttaggaactaagtaggggcgtgtgtgtgtatttgtgtttttaatttggggagaaagaactgggggatgaaggtcgacatggcgttccagattaagcatgccgttcaagtagacagctactggcaccttaaattcataaaagagcatttagcaccaaactgtaaagtgatgtcctctagaataaagaacagtacttaccaagaatagttagcttgtaaccttacgtcgacatagttgttcttatttgaatgcagattttaaagttttatcacgcagttggaaaccacagctactatgagcatggatttttccatacttatctctttcatttccgtgaccacttggtccaaaggcatcaggattgtatccattttacaaatgataaaactgaagctcaaaaaggttaagtaacttgatctaagtccccacagctagtaagtgtcaaaaccccatccgaataacttcaaaacctgtaggtatagtcatcaaatgtgtcttgaatggaattacctacagtgagagttagtgcattaggtaacaagcgcagagaggaatgactgcctctgctgatggtaaccttgaattttacaaatgacactggagcctttctgagactagtgttgcatgggtcctcaataaaatcacactgttgttactcacttcctttgggtttgtaaccctggtgataaagtaattgagaatagtggagtaaaccctcgacttgaattcaggaaaattgttttcaaatccagtttcaataaatctcacatcaggcactctatttgatgaatgaatgaacaaaacctaactataagacacttgacttcagggagtctcaattccttcatctgtaaaaagatctaattcctaacttttggtaatgttggggagagtgaatgaaataatgtgagagtgcttcgtaaattgcaaaagtgttataaagaagttactggtaagagctacgagtgtctcgctgcactctagcatgggcgacagtgcgaggccctgtctc

SEQ ID NO: 118 - DNA, 1883 bp, Homo sapiens
ctgccgtgtgaggcggaagcggaagagcaggtctccaggggagcgatggcagccgggggtctgagccgctccgagcgcaaagcggcggagcgggtccggaggttgcgggaggagcagcagagggagcgcctccgccaggtacgccgccgccgctccccggcccggccatgcccggcccgcgccgccgctcaccgtccgcctgcccgcaggtgtcgcgcatcctgaggaaggcggcggcggagcgcagcgccgaggagggccggctgctggccgagagcgcggacctggtaacggagctgcagggccggagccggcggcgcgagggccagaagcggcggcaggaggaggtgtgcgacgacccggaggagctgcgggggaaggtccgggagctggccagcgccgtccggaacgccaaatacttggtcgtctacacaggcgcgggaatcagcacggcagcgtctatcccagactaccggggccctaatggagtgtggacactgcttcagaaggggagaagcgttagtgctgccgacctgagcgaggccgagccaaccctcacccacatgagcatcacccgtctgcatgagcagaagctggtgcagcatgtggtgtctcagaactgtgacgggctccacctgaggagtgggctgccgcgcacggccatctccgagctccacgggaacatgtacattgaagtctgtacctcctgcgttcccaacagggagtacgtgcgggtgtttgatgtgacggagcgcactgccctccacagacaccagacaggccggacctgccacaagtgtgggacccagctgcgggacaccattgtgcactttggggagagggggacgttggggcagcctctgaactgggaagcggcgaccgaggctgccagcagagcagacaccatcctgtgtctagggtccagcctgaaggttctaaagaagtacccacgcctctggtgcatgaccaagccccctagccggcggccgaagctttacatcgtgaacctgcagtggaccccgaaggatgactgggctgccctgaagctacatgggaagtgtgatgacgtcatgcggctcctcatggccgagctgggcttggagatccccgcctatagcagggtcttataggggaaatcaataacttcttttaatcaaagggttcaagaaattaaggatcccttcaccttctgggcctggcacttcttgtggcaggatcccattttctcactggcgactcccctgcgtgctggtgaagaaggcagccacagtcggaagtcgctgtgcagaagcagagaggaggccccgcctggggaccggggtgcaccgcttagctcggcccccatcctagggggctggtttggcaggggctgcacaaaacgcacaaaaaggaagaaagtgacgtaatcacgtgctcgatgaagaacagttggcactttgcagatggccagtgtcacggtgaaggctgggttgcccccacgggtctagggagaacgaactctttggggatgacattttcaccgtgacatttttagccatttgtccttgaggaagccccttgcactgctgcggttgtaccctgatacggcctggccatcgaggacacctgcccatccggcctctgtgtcaagaggtggcagccgcacctttctgtgagaacggaacttgggttatttcagccccggcctgcagagtggaagcgcccagcggcctttcctcgctcaccaggccagtctcagggcctcaccgtatttctactactacttaatgaaaaagtgtgaactttatagaatcctctctgtactggatgtgcggcagaggggtggctccgagcctcggctctatgcagacctttttatttctattaaacgtttctgcactggc

SEQ ID NO: 119 - DNA, 2135 bp, Homo sapiens
gttcactcaaggcccgaaggctcttgagttaggttgtgatgaatgctgccaggcctaggactctcccttcaggacagtgggctcttgtctggcccagggcaggcccagagcctctttgaaaatatgcagtcagaggaaacaaaagaaaaaagaatgaaaatgccatccaagaaccaaggcctggaattggggaccccgagagcctgcttagtgctctacatagcccaaatagtaaagggaactttgtcttgtagcttagtgtctctggtacctaagctggaagctctgtctcccaggctggagtacaatggtgtgatcttggctcactgcagctgccgcctcccaggttcaggttcaagcagttcttctgtctcagcctcccgagtggctgggactacaggcatgcaccaccacgcccagctaatttttgcatttttagtagagatggggttttaccatgttggccaggctggtctgggactcctgaccttaggtgatctacccacctcggcctcccaaagtgctgggattataggcatgaaccaccatacccggcccctttactcctctttcttttctcaagcagaaggagtctctccctgtagccaccacagctgggaatgtgctgggtcatgcttgaagacagcatgtctcagtctcactcatggccccacagcaaataccacctggctatcagtgctgattatttggggcctcatgggtctttaatcagcaggtgatgaatgctgccagggctgagtccttcctttcaaggcagtgggttcccttctggcccagggtatgtctagaaatgtcatccaggagctagggtctagaatggggacttcaggactctgccctctcctactgtggctgagctggtatccaagttgcaagacaaaatcctcttttactcttccctctcctctccacaagcagagggaaggagtctttcccggagctgtgagctgtgctgcctgggctttgggaagaggtggcacaattactccttggccatgctggctgatggtccaggttcttatcatgagtcaaatgactcgtggggaaatgtagccagaggagcccccttcaaaaaaggagataaaaagcaggagacatttttgttgttgcatatctgagatggggtaagagtagaaatattgatactaagcgtttaagaggttttatttatagctaacttttgttttcaataggtaatatattcacatggttcaaaagaaaaacattattcaaaaagatacatagtgagaagtctcgatctcaccctcagctcccatggacctttatggtctttttcttccaacctttttttttttttaatttgagacgggatgctagcttttttgcccaggctggaaagcagtggaattccggcatgctggaatgctgatcatggcacactgcagcctcagtctcctcagctcaagtgatcctcccaattcagtctcctgagtagctacaaaacccagtcaattttttatttattttttttagttgaaacaatatctcactgtgttgcctgggctggtctcgaacttataggctcaggctggagctcagtggcacaatcacagctcgctgtaatctctgcctcccgggctcaagtgattctctcacctcagccttctgagtagctgggactgcgggcgcacactaccacgcctagctaattttttgtatttttttgtggaggcaggatttcaccatgctgcccgggctgatctcaaactcctgggctcaagcaatctgccctcctcggcacccccagagtgatgggattacgggcgtgagccgctatacctggttctaacttttttaatatgaaatatttcaggtcgggtgcggtggctcacgcctgtaatcccagcactttgggaggccgaggcaggaggattgcttgagcctaggagtttgagatgggcctgggcagcatggggagaccctatctctacaaataatcaaaaaattagctgggcatggtggttgtgcgcctgtagtcccagctactctggggctgaggtgggaggttacttgagcccaggagtttgaagctgctgtgagctgtgatcatgccaccgcactctagcctaggtgacagagcaagactctgtctc

SEQ ID NO: 120 - DNA, 2195 bp, Homo sapiens
ctgcggtgcagtccttggtctttctggcaagtgaggcgctctccccctaaatgtctcagagggagacaaatcagcggactaccttgcttcctttgatgacttggaaaggatctgcagtcccccttaaagcccaagaatgtcttctcttccacgacagccgtttgtggacacatactgcttacctccctgactgcaggacaaggtccttcaaagctggaactctgactgcgctcagtgatcccgcagtgctcctctgtagagtgggaactcaggtccatttcaaatatctacgttggaatgagtggatctcgctgggggtgagaggcactttgtctacccacactgccggtcccagccacatgcctcctcccttccctcaaaaagcagttgtcttcttagtctgcttcttcaaggggagaagtcgtttttatttatggaaacgaactcactatatggtagaaagaacaagagtatcagaatttgcactttggacttggactcccctctaagcagctgcacaaggtggaacaaaccaataatccttgctgatctgctttgtccttaggaaaaatggtggagggagaatattagatcaggggttcttagccttggcttcatgaataagctcaaggatgtcaatgaagcttttgacatgatctcaacttttttgtgaacatttatatatttttctggaatggggtccatagagttacaagttctttaagacctccagatggaccccaatatggcagaaatgaactatttaaagatacctgcctgctcccgtagtctgaccctctatggctaagcaaggttttagaggagtggaaggctggccattgcacagtatcagggttccagacaggctccctggctcttccctcccagtcctgctcctgagatatagttctttctggccgccacttcccttagggcaaccccagagcttaaatcatctgcaaggcagtcacctttcaggcacctttcatccggcacctgtgttcttagctggattaactagaaagctagttggaggaaggaaggtgaaagtggaggaaggggaaaagaggaaaagttggagacgaatctggcttatggttagaagcatattttttggccaggcaaagtggctcacgcctgtaatcccagcactttgggaggctgaggtaggcggattgcctgagctcaggagttggagaccggcctggccagcgtggtaaaaccccgtctctaacaaaaatacaaaaatttagccaggcatgatggtgcaagcctgtaatcccagctgttcgggaggctgaggcatgagagttgcttgagcccaggaggtggaggttgcagtgagctgaaattgcaccactgcactccaggctgggtggccgagcgagactctgtctcaaaaaaaagaaaaaaaaacttattttttgagacagagtctcgctctgtcgcccaggctggattgcagtggggcaaacacagttcactgcagcctcaatttcttgggctcaagcagctatcctgcctcagcctcccgaggagtagctgggatcataggtgcttgccaccacacctggctaattttttaaatattttgtagacacggggtcttgccacgttgcccaggctggtcttggactcctgggctcaggttatcctcccgcctcggtctcccaaagttctggaattacagatgttagttaccacccggaccaattttaggattcctttagccagtgaccttggtgtgaccttgtacttctgcagcattttataccttctgcggcacacccttgtagtgggtcgaattgtgttcccccaaaagatatgttctagtcctaattcccagtacctgtgaatgtgacttatttagaaatagggtctttgcagatgtaatctagttcaaatgaggtcatactggattagggcgggtcctcatccaataactgttgttcttattagaatagggaaatttggatgcagagacacagagaaaatgccatgtgaagatggatcagagacagaagtgatgcggctgcaagccaaggaatgtgaagaatggccagccaccaccggaagctaggggagacgccagcacagattctccctgagagtatccagaagaaaccaaccctccaacacctggatttcagacttctgaccttgagaagtgtgagccaataaaacaactgcagtgg

SEQ ID NO: 121 - DNA, 2552 bp, Homo sapiens
gcatgcgcggcgcgggccgtagtcgagcctggtgggcggctggctggcaggggacgtggtcggcggcagcggggcccaggggcggcggggctgcagcagcggcggccccagcttcgccgagcagcgatcggctggtgggcttctcgttggcgggctccgcgttggcgggctgctccccaggcaccagcgcagcgcgcgctcgcccggcttcgtcactcgcctccagctacatccgccggccgaggctgcgcgagcctccgggcttgcggtccccgccccgcggtccttcctccaccctcagccagggcagctgcagcccgagcgaacagccacggagcatcctccgcccgcccgggccgcgccaccgcccatgctgcagccagtcccaggcagcgaccccgcggccgcagcccgccgctcagtgacctcagcctggcccctgcgcgccgcccgagccggtcccgctgagccgcgggccccgtgccctgcgatggctcggctggtgcagcgcggcgccaggtgccagccgtcctcccgctgagacgcgcccgagtggggacccgctgggcctcggggctcgcagccttcgcctccccgccgcgcccgctccctttctggggactccgccgctgtttctggggacgaggggacaggggacccagacaaagcccactttgtgcagggagttggccgcaggcggggaatgtgcgcgtcggcgcgcgccccctccccgctcccggccagctgcgagtcttggctcccggacttgtctcgtcgcgtcggagaaatcgccccccagcgccgctctcccgcccgggggtcttggttccgagctcgcgcggccgggagtcgcctcggtcttccttggggcgcgcgcagatgtgagcgtgcgagagttgtgtaggggattttgttccctccgaaactgagacccagggcgcccagtgggcacccgtgccttgactctgtcctttctgcagccgctggtccgagctgtctggcctcagtttccctccgacttttctccgctctgccagccctcactgctgcccgtcattgttctcgcagttagatgggggtgctttgtgacggctgccaagttggggtgtgttctctttattccgtttttcaaacagaacaaggcctccaaggctgaccccagacaacccaccccctcggaccctaattcaccttattgcactgatttttttttatcaagtcgtattttattgtacaggagccacgccctgatttcttaaaggcgccttgcactctggccatgtgttatctctgcagccggtgtgtgggaggcctcttgtgagccagttgttttcccgcctccaccacccccctcgaagatttagggatgccaggggggaagaaggtggctgggggtggcagcagcggtgccactccaacgtccgctgcggccaccgccccctctggggtcaggcgtttggagaccagcgaaggaacctcagcccagagagatgaggagccagaagaggaaggggaagaggacctgcgagacggaggcgtccccttctttgtcaaccggggtgggctacctgtggatgaggccacctgggaaaggatgtggaaacacgtggccaagatccaccccgatggagagaaggtggcgcaacggatccgtggggccacagacctgcccaaggtgagacacacgggtcaggggggtgatagcacagtctaggttttagtgaccttggggccaagagtaaagccacactctcctcccacggggcaggggaccactggctcggtaagatctttaaaatgcagtgatatcatacctgtctaggagaactttctctcactgccattctaggagggaggctcacatacattgtctccaggaggccctccccgctgtcttttaaaatgtccacgttttacaggaggggacagcagcagatggaactaacaaacacagtaggatggcttgacgtctcatttgcttgatgacacttgccaagccagagaactgtgagcagacaaatgtaatgaatgactaaggagatgcagggcttcatatgttgagaaaatattttcgtgcattatgtcattgaattctcccaacagccttgtgacgtaagtacagtttggattcccattttacagatgagaaagctgaaaactcaagtaggaactcaagatcccacagccagtaagtggcagaactgagattcaatttcaggtcttcaggagaagggcggggggtggtggtggagggaagtgtccaggtcctcttctctgttggacagtagattcaagcacattagaagaggtcttatggagaagcataaaatgaaataatttttctgtgttggctgtaactcctcctccatgacagctatacttcagttgtgtcaccaacgaaaacagaggctgtatctcattcatctttgtcttcccaaggcctcctgtgtgcctggcacagaacaggcactagtgtgtgtgtttgctgaatgaaagggtatttgagagtttctgtgctgtacgctgctatatggaaatacatgccagatatt

SEQ ID NO: 122 - DNA, 2105 bp, Homo sapiens
tttatgttacctttatatgactttgttaaacttgcttattctaggagatttcttgtagattcctcaagattttctacatagacattcatgtcatctgcaaatagagttgtatttctgcctttccaatctgtatgccttttatttcttgttcttgctttattgcactgactaggcctttcagtactgtgttggataggggtggcgagagtggacatctgtacctttttactgaccttaaagggaaattatttgatctttcatcatttaagtatggtattagctgtaggtttttgaagacaggctttatcatgttgaaaaagttcccttctgttcctggtttgctgagaatttttatcataaatcagtttgaattttgtcatgttattgctgtatctgttaatctgatcatgtggttttttttttcgttagactattaatatagtagattacattagttgattttttaatattggaccagccttgaattccccatttacataaatccaatttgggcctggtgcgttattctttttgattttttgctggaatcaatttgctgttttgttaaagatttttacatgtatgttcatgaggaatgttattctgtaattttctttattgtactgtttttgtttttgagatggagtctccctctgtcgcccaggccagagtgtggtggcacaacctcagatcactgcaacctctgcctttcaggttcaagtgattcgcctgcctcagcctcccgaatagctgggattacaggcgtgtaccaccacgcttggctactttttgtatttttagtagagatggggttccactatattggccaggctggtcttgaactccttacctcaagtgatccgcccatcttggtctcccaaagtgctgtgattaccggcttgagccaccgtgcccggcctttttttatactgtttggtttttgtatcaaggtaatgttggtttcatgagttagaaagtactccctcctcttttattttctggaaaacattgtgtagaactggtgttatttcttccttaaatgcttagtagaatttaccagtaaaactatctgagactggagatttccattttggaagattttaaaccacaaattcaatttcttaaacaattacaggactattcaggttatctttcttatcttgggtgagttttagcattttgtgattttcaagggaaactttttcttctgctttttgggttatttgaacattttttagtcttccattttaatttattgtgattttgactctgcatctttgtatagtttaattttatttttttagagatgacagtgtacatccttaactttccacagtatacttagaatcaatattttaccacctcagctggaatgtaggaggaatcttaccaccattttaggtcactttattcttctccctttacatcctacttgtcttttattacttctgcatacattgaaaacctcattaaacaatgaggtttttgctcttagccaaaaaatatattttaataaacccgccttggcctcccaaggtgctgggattacaggcgtgagccaccacgcccagccttttttttttttttaataatcagtttttcatcatctgagaatgtctctattttactttcattcctaaaggatgttttgctggatatagaaaattagttattttcaggccaggtgcagtggctcacgcctgtagttccggcactttgggaggctgaggcgggcagatcggttgagctcaggagttcgagaccagcctgggcagcatggcggaaccccgtcactacaaaaaatacaaaaattagccaggtgtggtggcacatgcctgtagtcccagctacttgaggggctagggcacgaggatcgcttgagcccgggaggatgaggctgcagtgagccatgttcatgccactgcactccagcctgggcaacagagtaagaacctgtctcaaaaaataaataagaaaattagttattttctttcagtgcttgaaaatgttgttcacttccttttcgcctccatggtgtctgatgaaaaatctgcagtcagttgaatcattgttcatctatataaacagtgcctatttctctggtt

SEQ ID NO: 123 - DNA, 1919 bp, Homo sapiens
tttaatcaggaatgtaattttagatagaggcggtaatggagtggtaggccacacataacagaatgaagcttccccaacgtggattcccagactatggaagtgctggcctccctgctcccagctgagccgggaaaactctgccccactccaagaggtgcttctcaaagatgattcctgatcccaggcatgtcctgtgtcctgtcaccaatcctggtgcttcatcgtcctttaaaatccaaacgaggtgatctagtgttcttcctctgcgtcctctggtcttctagcatcctggataggccgtgtatgtttagaaagaggggctccaccctgtgcccgcctaagatgatggctcatttatcaagaccaggctggaggctcagctaccagagcttctgttgtttgggaggaaggctgccagcagcagatgtttgtcctcgcctcagctccctgcagcctttgagctccatctgccgcacactcgggcacagctgccagtgcttcccctccgtgctcacctttcacctctcacggaggctggggtttcatgcatctgggcccaacagagagatggtgacccagaccctgcgatcctggtgccacaatccttcccaacagcttgctgggcatctttctgcagtagcctgtcagcatgctggaagcagcaccgatggaggttgttgagcagggttgcaattgtagcccgtcactttggtcttggtgttccatcttgttagggcaagagagtcagagcacacacagccatctcctggctggatcatctggtggagtgggagtgtgcacgtgcccacccccatttctaaataagatatgcattgtctcagggcctttgcaatgtccactccctagtcctcaatgctcttccccattggtcatcccagagctcatctcaaatgtcaccctttagaggggcagctgtcagtcttcccagttaaagcatatgccaaccccctcatcactcctggtctcaacaacctctttatttccctcattgctattattttcatctgtaattctcatctttataatatctcttgaatgaatctttaggaggattactcttcctagagtgtgcaaaacggattgcagggatggtgagaggtgggcggaaatgttggaaaggggacaagggtggaattggtagcactgatcttgttgagagaggattggccctggaaaaagaaagtagcaatggagcaggaagtaattagacatagaagagagctcttcacgtgggaggtgaggagaatcggtgttgggattgtgtgttaggactgaggaaggaggaggaggaggatgcccagctttctaaactgggtatttgagtggatgggggtgacttgccgaaaataaagaatggtttgagaagaaagatgctgtgctcatcttggaaatgttgagttttgggcccctgtagaagacccagctgagatttgcaggtctgcatcaaatggagaattcatcagagaggcaatggtactcaaaaccatgacagtgaaaggtgcttccctaggagagaggcaggataaaaaaataaggtggcccaaaattaggatggccacacatcccagttagccaggatattcctgccttatacctgttgttccaccataatttctaatggcccccgcccccctactttcactttcacttgtctcagtgaactatatcgtcaccctacccgcatgagaaggttggggaaattcagagttcataggagggcataagaacccactgaaaaaaactgagtatgagcagaagggtagaaagaaaaaccggggtagtgttgggtaatgtatgccaagggtagaaaattgacaagagaagaatcattcatgtcaaatgggtcacagaggtgaagtcatgcaagtgtcaagagctgtgcattggatttagctacc

SEQ ID NO: 124 - DNA, 2569 bp, Homo sapiens
acctgagttcagaaacacctctcatggaagctgtactagttgtgatttacttaattccttaagttccatgacctgaagttaaccccgttcttcctctgctctcaacccattgccccttgagataactgtacatgtcactctgatcatggtaacagcacccctattgcttctgccagctgtcatggcaatcgtgtttcccatcacctgggcggttcagagccagtcatgggctgctgaatttaatggagcatgtttccaggttcttcatggcaaactgtactcatgacttaggagtgagtgttacttccatgtgcctgtcagcttgtgagggggaatgtggaggaaggtgagaaatacagctcccacagttgtgctcttcctagaggaagctctcagaacgcagccctcacgggatttccttaggtcagaggagagcatcgcatctcacgtttttaggtttatcactgccatcccacttctgggatgggaggtagcaagggcttctgtattttcttgtgttcattctagcaacccagacatttccggatcagatcctgctggtctccactcactggaaagtctgccagatgccgatttgagagctgcctgtccctgctttcagggggagcggggagaaaaactccaatggtctttaatggtttctgcagctggccatggccaattcatatgacattgtgagtttgctttcttatagagctgctctggggagaggtttgctattgagatgtaacagtggagctgttgggtcttcatgactcctttgcgtgtgttccatgggactctctttctgggttccccatgcttatagttgcctcgtgtcacaagacagatactaaagtcaggtttgtggcttcctgatggtttgggtggggccccagtgtcctggtaatttataggactgcctcatctgggagcattgccttcttccttagtcccacgtggagtgaccagtcttcctccttgtagctgaacagggaggaaacttgcaccattacctgactgtggaagggtggcccacaagatgagctgtgcaccataaacacagcccacctctgatttgtcatgtggtacctcttctttccttggcttccatggtagtattatcaactaagcaagattgtgatcccagaaattggcttagcatgtgagtgttgcctcgtgagagtacaagtaatataactcgccatcttgcaggaagtgccaccccaatatagagcctgaagttggaatctgttgagatccttgggtggctgatatacagcctgggatctttcttttttttgttccttttcaaccacccataattttaatattattttttagtgtgtgtgtgcctggctttgcgctagatattgtagaaaacaaaaaaggtaaaagacgtaatatgtggcctaagggagcttttaggtgactgctgcacatcaagcagaaaatcaaggactatctaaagacgtttatagtagataagatcagggtagaccagatggtctgggaaagttctgtgcctctgaggctttgggttgtagtcaatggcaggacagacagtgagatgaaaaacacatgagcaaaagcaaggaagcagaaatctgcatggcatgtactgaacagtgcacagccctgttagagcaacatggttaaagaatcctttccagtgcggttttctagatggaagcttcccagccaccaggcagacctgagtgccaaggggttatgatggtgaggtggagcccaaagcccaaaggagtcagcaaggctcctgcccattgccagggcctcactatggtcagctcaggccatgtgagggaggcagagcctctgcaccccctgtgttactggggtttcttctggagaactcatacattcaggtacaaaacaaaccaactgaggaggtgtgacccaacctcaccacccacctttctcctcctggggagtgtcgtgttgaactgtgtctgtgtcagtgcactggtcccagccctggccgcagcctagtcctttctctgtggagtgggctgcaaaacagcagcgcaagaggagacagtcttcgtcaggtgtgggtgtttggtgcctgcatgggtggccttgcacagagcagttaggggaagatgagggggaggcatggggctgggccagctctctgggatacagcctggtcagagagtaaatggagcagaggagcaggtgtggcagcacctgcccttcacctccctgaccaggcccgtccctccttcgccagtgctgtgcagagctcatttaaatgtattcctttctaggtctgggcgcggtggctcacgcctgtaatcccagcactttgggaggctgaggtgggtggatcatgaggtcgggagttcaagaccagcttggccaaacagtgaaaccctatctctactaaaatacaaaaattagctgggcatggtggcatgcgcctgtagtcccagctacttgggaggctgagacaggagaattgcttgaacccaggaggcggaggttgcactgagccgagattgcgccactgccctctagcctagacgacagagtgagactccatctc

SEQ ID NO: 125 - DNA, 2676 bp, Homo sapiens
ggaagaatttatttagatatgcttaatgtatacaagtgcctcagtgaaaatatttctgcagctatccaagctaatggtgaaatggttacaaagcaaccattgattagaagtatgcgaactgtaaaaagggaaactttaaagttaatatctggttgggtgagccgatccaatgatccacagatggtcgctgaaaattttgttccccctctgttggatgcagttctcattgattatcagagaaatgtcccagctgctagagaaccagaagtgcttagtactatggccataattgtcaacaagttagggggacatataacagctgaaatacctcaaatatttgatgctgtttttgaatgcacattgaatatgataaataaggtgtgtaatatttcagttatgtaagggggaaattctgcaggatagccttaattcttgaaagctaaagtatgtctgtggatataacataattttaatgccatggagtttaaatatttaaacttgtatattagggaaatactttcttggttttcaagaacttacttcccaggagtttgaaaccaacctgggcaatatagtgagacttcatctctacaaaaagttcaaaaagtaaccagtcatggtggcatgtgccggtagtcccaactactcgaaaggctgaagtgggggggggggtcacttgagcctgggagttcaagatggcagtgagctgagattgcgccactgcactccaagaagaagaatttactacacagaatcttgattggtaaaaagtaaatatggaaaacagattttagcattcacatggtatgtagcatttattgaaacctcataggtcggggcatccttttatgaacgtagttgtattaattggtttgaataaatgagaaagtaagtctgcatgtttcaattataaaagtgtagtatatgcttataagaaactgaaaaatgtgttaacaagagaaaataggctggccatggtggcttacacctgtaatcccagcacttcagaaggccaaggcgggcagatgacctgaggtcgggagttcaagaccagcctgcctaacgtggcaaaaccccatctctattaaaaatacaaaaatggccaggcgtggtggctcaacacctgtaatcccaacactttgagaggccgaggccggtggatcacctgaggtcaggatttcaagaccagcctgaccaacatggtgaaaccccatctctactcaaagattaggctgggtgccgtggctcacgcttgtaatcccagcactttgggaggccgaggtgggcagatcacgaggtcaggagatggagaccatggtgaaaccctgtctctactaaaaatacaaaaaattatccgggtgtggtggtgggcgcctgtagtcccagctactcggagaggctgaggcaggagaatggcatgaacccgggaggcggagcttgcagtgagccaagatcgcgccacgcaatccagcctgggtgacagagcaagactctgtctaaagaaaaaaaattagctgggcatggtgccgcatgcctgtagtcccagctactcgggaggctgaggcaggagaatctcttgaacccaggaggcggaggttgcagtcagctgagattgcgccactgcactacagcctgggtgacagagtgagactgtttaaaaagaaaaaagagataaaagatacgttaagtggacacatttacacggtaacttaaatttttttgtaatctgtagtggtgatttcaaattaaaaacaaaagtgatagtagtagtcttatggtaataatggtttagatgagttctctattaaaaaggttgtctttctccttcaatttgataactcatgtgcgtaacgggacagtttcattttccgtgagaggtggattgtattttacttgggtttacctttcaggaggcattctatcttctgtggtttattgaaaactccaaatatttatactggattaagccttgcttttcccctcctgtctagcacaacaaagacactgaaacattattttgtttccaccacttatttttaggactttgaagaatatcctgaacatagaacgaactttttcttactacttcaggctgtcaattctcattgtttcccagcattccttgctattccacctacacagtttaaacttgttttggattccatcatttgggctttcaaacatactatgaggaatgtcgcagatacgggcttacagatactttttacactcttacaaaatgttgcacaagaagaagctgcagctcagagtttttatcaaacttatttttgtgatattctccagcatatcttttctgttgtgacagacacttcacatactgctggtaagaatttaatacgatttaaatgttaagtgccagctgggcacagggcctcacgcctataatcccagcactttgggaggtcgaggcggggagattatgaggtcaggagttcgagaacagcctggccaccatggtgaaactgtctgtactaaaaataccataaaaaaataaaagatacaataaaaatactgggcatggtggcatgtgattgcaatcccacctattcgggaggctgaggcaggagaatggcttggaccgaggaggcagaggttgcagtgaactaagattgcgccacggcattccagcttgggtgacagagcgagactccgtct

SEQ ID NO: 126 - DNA, 2061 bp, Homo sapiens
tcactctgcagaaattcccttttaaaaacatcctgtgtattagtttcctgggctaacagagtactacgacctgtgtgggtaaaacaaccgaaatataatctcccagttctggaggccagaacgtccaaggggaaggcgtcggcagagctatgctctctgaaggccccaggggagagcctcttcctgccttctgcgtggcttcgggtactgccatagcccttggccctcccgggctcggagaccgtcgctgcactgtctgccactgtcttcccgtggcgtgtgtctgtgtgtcctcttcccttgttataaggatgctggtcattggatttagggctcaccctaattcgttgtgacttcagtgtaattcgattatctctgcaacccaccccatttccaaacaaggccacagtcgcaggtacggagccagggcttcagcatgtcttctcttctcggggacacagtgcagccaggacgcccgtcttgctctggtcattttggaatttatcctagggcatgggtctcctccctgtgccacagggcacctgggctccctcctgcaccctccgctctgcccacctggccaccacccacttggcatccctctccccaggctccagcagctcctgcggtctcccattctgcaggtgcggccgggaacttcctgtgccccgctggcgccttgtccttcaacgccttcaagaccgtgatggacatcgataccagcggcaccttcaatgtgtctcgtgtgctctatgagaagttcttccgggaccacggaggggtgatcgtgaacatcactgccaccctggggaaccgggggcaggcgctccaggtgcatgcaggctccgccaaggccgctgtggacgcgatgacgcggcacttggctgtggagtggggtccccaaaacatccgcgtcaacagcctcgcccctggccccatcagtggcacagaggggctccggcgactgggtaaggctctcagggagcccaggcctcccacagatcctctcctggggcacagggtgcccatgaagcttccagaaccttggcagggtgtatgttgaaaagccctgtgctggttccatggtggcaactatgttctgtgcctggcctgatcctgctccatgctaggccttggtgacactgactgtgtccttgctgttcccagatgcctctcagggaatgagctgggggagaggggagggtgctgggtcttggggctcacggggcctgagccttctgctgccctccaggtggccctcaggccagcctgagcaccaaggtcactgccagcccgctgcagaggctggggaacaagaccgagatcgcccacagcgtgctctacctggccagccctctggcttcctacgtgacgggggccgtgctggtggccgatgcggggcatggttgacgttcccaaacggtgtcaaagggctgccggatttcgcatccttctctgctaagctctaggaatcttccggccgctgcttcctgccgcctcactcagccaggtggagagcaccaatctgaaccagcaatgcctgcagcccagcccctcctctgaacactcagctattactgcgctttccctccccacggccccaactccagggcaggagcaactggacagtgggcctggcccgtggagctgccacgcaggtgcctgagggccaggtgccacgcaggtgtctgaggaccaggtgccacgcaggtggtgggggtacagacaagatgctgggatgtcccctgccccatggtcaagggtgtcctgcctgcctgggtccagggcctgagggagccacatggatcccgagacttgtgttctcttggctgaaaacactgaggtgctcccatctgtgcgtggcccatgagctgggatggtcctccagctgcccacaaggtccgcccctctgtctctgcaccacctgtttgcataaacacactttgctacaatcttgctagtgcgttttcttaaaagataatctatttactgtaaaaataaattggactttgcaaaagcttttagaaggaaaagaaagaggattaaagagaattgctggtg

SEQ ID NO: 127 - DNA, 2494 bp, Homo sapiens
tcttgttgcccaggctggagtgcaatggcatgatctgggctcgctgcaacctctgtctccctggttcgggcggttctcctgcctcagcctcccgggtggctgagattgcaggcgtgcgccaccaggcccggctggttttttgcatttttggtagaggcggagtttcaccatgttggccaggctggtctcgggctcctgacctcaggtgattgacccacctcggcctcccaaagtgctgggattacaggtgtgagccactgcactgggccaagaataagatttttaaaaacattttcgcatctggaggctccagggggcttccctgagaaacggcagcctctgcggtcagagaggctgcaattaagagcgttcccacaaacagcaccatgtgctcgtgcttacctgcttgggtgtgtgagtcacctggagatggggtgcagaaacattgacatacctgagctatctttcttcctctgccctttgcaggtgtttgatgtacagaggaaagtcacctataggaacctgagcacctggtatacagagcttcgggagttcaggccagagatcccatgcatcgtggtggccaataaaattgatggtggggccatccctgcacctgggtgttagcaattcactggggacctgccctcatacatttcctcctccattccccggacaggcaaccttcagtgattggtcctccctcccacgataagatacaacccttggttggttgcttgcattcttcccaccttataaagaagccagctaagccgacctgccctctttccaagacacagatccctattaactgagctctttctaggacctgtttcccaatcatccctgcctatcccactttctggaatgaaggcctccagtggcccccccctccaaaccttcttcccttcccttgacagacaccaatgtcctaccttctctctacagcagacataaacgtgacccaaaaaagcttcaattttgccaagaagttctccctgcccctgtatttcgtctcggctgctgatggtaccaatgttgtgaagctcttcaatgatgcaattcgattagctgtgtcttacaaacagaactcccaggacttcatggatgagatttttcaggagctcgagaacttcagcttggagcaggaagaggaggacgtgccagaccaggaacagagcagcagcatcgagaccccatcagaggaggcggcctctccccacagctgaggggctggggctaggggtgggtggagcccttttaaaatacccttcccttcaacaactctccagctctgaatggagaaactctctaggccatcccctcttctacctcctgcaacccacccatcctattagcctcccacattctaggcccgtgatacagggatgaggtcagcaccagcaaactctggactggtggaagaattccccaccagatctccttgaagcagaagtagggatcagcatcattaacaccttccccaccccctccccgcaggcagacagtgaagagaatcagaaaacatgattatgtgtcactttaatacaggaaatttaggtgttttttggtgtttttgtttttgtttttgttttctttccaaagctcacctcggggacaattccttgggcttctcctgaggtaatgattacccccccacccacagctgagtctgtgaggccccatcctttccctacgttttctcccatcttttttcctcttcagtctcccagtcatctggtttgtttgtttctttgttcgttctgagacggagtctcgctctgtcgccaggctggagtgcagtggcgcagtctcggctcgctgcaacctctgactccctggttcaaacgattctcctgcctcagcctcccgagtggctggcatcaccacgcccagctaatttttgtatttttagtagagacggggtttcaccatgttgcccaggatggtctcgatctcctcacctcgtgatccgccagcctcggcctcccaaagtgctgggattacaggcatgagccaccgcgcccggccccaatcatctgtttttaaacaatcgtttttgagcagatagctattcattccagattttcgtgtacccattctgtttcaggagctcttctaggtaaagctgagatcacaggaacagcaggtgacaggcctagctatagttaggaatacacaagccgtaaaatcgagtccttacagccataccacaaggtacgtccatttggactacaagaagagcttcctttaaagttcctatttcagcataaagaggctgtcctttttttgaggaatagtttggaccttgtgcctcctgtgggaggctgaggactgcaagaggagagctagcagatatgcctgttcacccctctctggtacttgtggcttgctagtatgtttttatgataatctcgggcattgtttgcattgtgtttattaatagggttttgtttttgttgtttccttttttacagtaaaggctgaattacat

SEQ ID NO: 128 - DNA, 2338 bp, Homo sapiens
acaactaagtattaaaaacagttcatctgtgccagcttctactctgaatgaggaaatagccccagaaaggtggagtgacttaggagtcccacaggtaggtcataacaaagtggggactaagtcagaatccctgcatgcctatgccctctacccgcatgtcgctttaacaaaggatgttggagcagacagacatctccattttataatgaggaaacagagggaaaatggctccaggggtgccaagatggagccaggctggaaatctctggaagccggtcttgtggacctccctcatcccagccccaccctctttcacactccctctcctcacaagggaccatgcaagggagaagtgagggagacaggcctcgagttgtgggcacacctgccacagccatggccgcgtcctgtgtcacatgaatagggattcttgcacatctctgacagaatcacgtggctttttgaggccactggggcagcctgcaaaggtggctgctgggatggctacctccctccaacctcagggcccttggttgaaggaaggggctcatggagcctgggggagaagggatagacatccagccaggggcagatgggaagtgaacttccctgagggggtttggcgaaggggtagcccccacccagctgtcagcgcaatcacagattttctttgggctgcacagaacctgtctgtcctgaagcaagtgggagaggagatgcagctgacctgggcccagaacgccatcacttgtggctttaacggtgagtcctcacctctgtgagctgccccacagtggcctcttagaggtatggccctcgcacacaggggcctgggtatctgaaccagcctcccaggctgctttgggcctgacagttgcatggatgagggcaggactggggaggcaatgggctgggtgggcatccagaccttagctccagcacttctgggaacctcggtccctgagcccacagcccttcatagctggatggcccaacttcagcttcactgcctactccagctgggaaaccaaggccagcacagcgccagccatcagagtgagagctgtcaccgtggccagtggcagggcttgtccactcgagtggggaaatggtgattgtctgtgcggagcctcaggaaacagcagctcatccctaacagctctctcgagacctggctgccacattctcaccagcagccatgcccagtctgtcactcagttgggcgcccatttcataactatggaggccaaggcccagaaagctttgtgtcccctccctgcgcccagaataagatgtttatgtggcctccccacagccctggagcagatcctacagagcacagcgggcatatactgtgtaggagacgaggtaagctgtccccagacctccccaggcccagccacagtggctgcctccctcatgctgacctccctcaagctcagagcttcctgagaaggcgtctgcagggggatctctgtgccatggggcactcctcagctcactcccactaaaccgtcttaagagggagttactcaaggtagaagactggctgtgagaggatgaggcgggccagcatcagttgagggattgtgctagatgatgtctgcgcagtcaaggcaatccatcttctctggccctctcaacccacagagttggttgtcagggcaactggagcatggcctgggagggcacttcagctccgggggacagactcatgcaggcctagggcagacaagaattggaggtgggatgggtgaaagagccgaagcagattgttggtacccccagtagagtcgcagtggacacacccagtccagccactgactctggggtatgcaccctgatgggaacccaccggaacctctttcaggtgaccatggctgatctgtgcttggtgcctcaggtggcaaatgctgaaagattcaaggtggatctcaccccctaccctaccatcagctccatcaacaagaggctgctggtcttggaggccttccaggtgtctcacccctgccggcagccagatacacccactgagctgagggcctagctcccaaatcctgccccgttggcacagggccacaggagcagaagctgggtgggctgaagaggcctggaaacgagagtcttaattgaggagatgggagactcgaactctagccctggatctgccttcctgctgaaacttgttccacctcagtcccctcatctgtcacacgcatgtggggtggagtagggagatgcggggagcagggtgggcaggaatactgttatctatgtgacggggcagtcgtgaggctgagatgagaatgcggattaaaatgcctggcgtgctcaccgt

SEQ ID NO: 129 - DNA, 1969 bp, Homo sapiens
cctctagctcctccagcagttcatcctggatagggaagacaagaccactttagatgaagaaaaaaacttctacctccaaaaacataccacttttgaagttccctcccaaacttgtcccaagagcctctcttgggtgttccttctggccagtcccatactttctgcaatattccctgacccttcacccccaatcacctcatccacatcatctctaaagcccataggccgagaaatggcatctgagatctgctgggccacctcctgttgttccgtgatgtcagtcatcagttcatctaccttgtcaatgtccctgagaatgagatagatagctaagaaatcacgcaacaatgcccccttgactttctcatctcacatgaatgaaacccctcctgccttgcagggtcacactgataagcccataactatcaatcagaagagatccctggaaaattgcaaagatgcaagttgtgatctcagcctccccgagtagctgggactacaggcacacaccatcatgcccacctaatttttttttttttttttgagaatggagtctccctctgtcaccaaggctggagtgcattggtgcaatcttggctcactacaacctccgcctcctgggttcaagcgattcacctgtctcagcctccccgagtagctgggactacaggcgcgtgccaccacaaccagctaatttttttttttttttttgtatttttagtagagacaaggtttcaccatgttgtccaggctggtctcgaactcttgacctcaggtgatccacccacctcggcctcccaaagtgctgggattacaggcgtgagccaccgcgctcggccaatttttatatttttagtagagacggggtttcaccatgttggccgggctgatctcaagctcctgacctcatgatccacccacgtcggcctcccaaagtgttgcgagtacaggcgtgagcccccgcgccgggctaagaaggcagtctttcttcttcaccttagatccctcttgcccagcacaaagtattatagaacaaggttttgaaaatggctgaagacagcaggaaactcgtcttcaagcctgaacagtgggagtcagcacgatcgccacgccctcaactcaagtcccctcccagatcttgagttcttccctctgagagtgggggaggacggcggacgggaacaaggcgccccgacatggtgtgccttttggcaccggcgatgagccttgctccgccatcggccgccggggttttccagtcagcctgtctcctgattctcttcccctgcccggcgcagcggtccggccgaatctcgccggggtctcctcttcccctgcaccagccagcgcctcctggctggccagtcccaccctggctcacccttcccgaagagcctgccgagaccactcatcgcgagctcgcctctcccgcctccgcccctcagcgtcctccagacttccgccttgctcctgggagggtgatgtctcatcacacagggaccagccttgcccaatccgtcctcagggcgccgccgcgacatcaagaggcgcaaacgagaccaccggtgtcacgtgacccaagccaccagccccagaccgacgcgctcctcttaaagctgccacatcattttctattaagtaaaaagacagttctatctccacctgagtacgtgcttgttctccggaaggaaatgtgcagtgtgatggcacctcagtgtatggggtcagtgggaaaacttcatgctctttacagagctcaggaaagtggggtggtataggttcaagcacttggggttgccctaagtttagatggcaaacctgatgcagtctaatgtctcacattctggtctctgcacctcaggacaaccaaccccatttcacaggctagaaaaatagaaactccccacactgtgggtaaaatctcttctgtcacacacagatgaactttaataaattacaaatgcacctg

SEQ ID NO: 130 - DNA, 1822 bp, Homo sapiens
actcttcctccatcagcctggctggcagcagccttggactccgcccgtggagccctgggcctgttgacccaccagcttaggagcacccaccaagctctgggtcaacgtggaggtaccaggccaccatgctcagtctcaagctgccccaacttcttcaagtccaccaggtcccccgggtgttctgggaagatggcatcatgtctggctaccgccgccccaccagctcggctttggactgtgtcctcagctccttccagatgaccaacgagacggtcaacatctggactcacttcctgcccacctggtgaggggaggctctgccccaggccgcggccttgagctcagagggggtacccaggcgggcagggaccgtccaggcccacgggctgcagcggcagtcgcgggggtccgcggcggcctgtggcggcttccgtgcggagccgtaccactggccgctgctggtcttcctgctgcccgcctgcctctaccccttcgcgtcgtgctgcgcgcacaccttcagctccatgtcgccccgcatgcgccacatctgctacttcctcgactacggcgcgctcagcctctacagtctggtttcctggagctggaaagccctgggctcagtaaggtcctccgcacaggagccttcgcctatccattcctgttcgacaacctcccactcttttatcggctcgggctgtgctggggcaggggccacggctgtgggcaggaggccctgagcaccagccatggctaccatctcttctgcgcgctgctcactggcttcctcttcgcctcccacctgcctgaaaggctggcaccaggacgctttgattacatcggccacagccaccagttattccacatctgtgcagtgctgggcacccacttccagctggaggcagtgctggctgatatgggatcacgcagagcctggctggccacacaggaacctgccctgggcctggcaggcacagtggccacactggtcttggctgcagctgggaacctactcattattgctgctttcacagccaccctgcttcgggcccccagtacatgccctctgctgcagggtggcccactggaggggggtacccaggccaaacaacagtaaggccccatccctgaccctgtcctggagggggcagaggccaggccccagtgctgacgaggagcccagatttgggcctaatcaggtggggacgcatctcagcctggaaccaacaggggctgaggagagagggcacaggagagagggcagagaagaggaggggtgtctagggggactggcagagtgtgagagggaccgtgagggggctcttgatgggagtggaagaagtgctgagggtctgagaggggagatgcatgcgtgtccaggctgaagatgcccctatattctgtcaaaggttggcggggggaggtgttggggtcctttcatctggctccgtttctggtgcttctggaagtctctgctcagcacagggaagaactaacacgactaacctaggcctaccctgaatgcttcttgctaaccaggccgagaggccacacacttgcccccccatccccacaaaccaggtaatgccagtttgccagcagctatttgcctatagagatgagtctgtcctggtcataactgtgtgctcaaggtgtccaggcttttgggggtgggcctatctgggtgcattatggatggtttggtggattgaggtgtggggaggagggtcctaggctagagggggtatccctagttagactttgggaagccaccttcaatgttttctggaacaaggcaggtacaaataaaaaaataaaactttgg

SEQ ID NO: 131 - DNA, 2304 bp, Homo sapiens
cttgctataatctccagctctaaaaatcagagctctcaatgaaaacaatggaagaataagacattctttcggtcttctgtttgcctcactggtgtatccttcatctcctgcccctgtgagttgataccccagtgcacggagccaagggcttttcccctctgagctctgggagggaagggaatggagctctgggtttgagatgtcatggcctgtgatagtcagtttggttcctgccactagcaagtcccctgaagctcccaacccagcctgatgttagcccagaagctcctgctctggccaaagactcctatccttgagggctctcagccactgctccaacacacttgcccccttcctgcttgtgtatgtcacttatcctcctttgtccacaaagacttgagggcctcctgagtctccaagcatggaggaatatccatgccaacatccctgccatcaaactcaatccattttcttcagagataccttgtctgtcaccagcctccaacttcatattccttccacaggcaactgtgcacttgacccaaggtaaaatgaaagggctgccaatcactcggactccagaaggtgcctgccctgagaagagctggcatgttacctcccacatacatttcctgtcatcctgtccgaattgggaaattttgctctggagtattttcaagaaagcgcattgtgttttaatgaagtatttttcagggttccaatgttattttttataaatgcagcattttaatggcagattcaatatgaaggacatgtcttcctgggctctatatttgattttggaaggcagcatactctaggagaaaaaaagcatagggctgaggctctgaagacacagcttccagccctggctttgtctccgagggggagtcatgttccccactcagtgcctcagtttccccatctgtaaaatgaggggctttgactagatgagctctgaagtttcatccagctcttacactgtagggctttcattccctgccagcacctgctctccccgttcctccccacctccactgagctgcacacatcccacaatgcctgccccacagcgatgtcctcagatgtcctggacagccaccgcactcctcactagagcctggggtgggcctgatgggctcggccacccagggatgccctcgtacctgaagtttaagggcctaaccattcaataggtcaccaactgtgtgccatggaagccctcttgtaaagacacacctaaaccatcctaagtgactgtggaattctggggaattctgagtttggagtttccatttggatacggtccttatagctggagggaggcggttccaatttcagagagggagctggctggagagaaaggtctggaggttggcccataagggcatgaagtttgtacttgagggcagctgggaaattcatttcaagctgcagaggaacgtgttcacaggctgttgtgtggcaatgaatgtcatgataacccactctggaatatgtgtcctgaagaccaactctggacactgaggctccattccaactggaggaggaggcatctccatctgggctgctaggaaggggcactcatcccatcctagtacctttgtagcccttcgtcatgacactaccgtcctcccggtgaaggcttgtgaagcaagaatggagagtccaagtttgtgatattcaaacccatcttgtaaatcagcaaacacattaaccttccatcagtcagagaaataatgttgtggctgtgtgtttccttaatgctctccctcctgagggaggagaagaccctgctcaactttgctgcccaccctgcagtgacccctgaatgccacaccatgggaggactcattcattggctttgtagtggcaaatattcctctagttctataactcaactagacattttgtagtaaagaattcttgaaattctctaataaaaagcaattcttactgtaatatttttagtttggggacacaatttcctaaggggggattaatgaacatttttatgcattagcccaatttatgaattccatgtttattatatggtagtactgatgaaaagtacctttctatctgtatctttgcagtttcttcgttactcatatgtaagcctcatggtaagcagtgctctagtaactgcttctctgtacaaatctcatcgttctacttacctgtcaaagcacattctacatgtactgtaaacagatacactttagtaagatttagtcttaaggatttttccacttttgtcagtaacagatatttatggattaaaaaataaagccgtttcaacat

SEQ ID NO: 132 - DNA, 2212 bp, Homo sapiens
actacctggtgagtgccggcgcgcgggagggcgggtgagtccggccgggcgggagccggggtgaccatccgtgcccctcgcagcccgacgccgagggtgccttccgccgcggcccgggcctgaacttgaccagcggccagtacagggcgcccgtggctggcttctacgctctcgccgccacgctgcacgtggcgctcggggagccgccgaggagggggccgccgcgcccccgggaccacctgcgcctgctcatctgcatccagtcccggtgccagcgcaacgcctccctggaggccatcatgggcctggagagcagcagtgagctcttcaccatctctgtgaatggcgtcctgtacctgcagatggggtagtggacctccgtgttcttggacaacgccagcggctgctccctcacagtgcgcagtggctcccacttcagtgctgtcctcctgggcgtgtgagcggccaccacaggcccttcctctcaggggcaaatggagcacagatctagacaatgtgtggacagtgtcagagtagcagtggccacatggaggaggaggcccacccggaactctgcccacactggccactgcagttcagcccacagagccactgcaggcaggcctacggacgtgacacgcacgctggtggtcccggagccagggttgattcaggacaccatcttggactctttcctggcctgctcagcacctgcccagatggcctctgcgtctttcctgtgcccagccccaccttttccacctctcttcatgttctcatggagtgcaaagtgcaccagccagggcccctacctgggagagggtcagctgacgcagggctgagggggctgccacagggacgtacgctgtgtgttcttactgcttagaagggacggggtcactcaccactcccctggtctccatctgggctccttggtcttccctgcccctcccctaaccgtgttctacctgccagtggagctgagcactgcctagcctgggccagaggggcactggacaagggcctttgggggacagtaagtctgggcccagcttctagttctaatgtgtgcaagattaactcacaaattcacctcagaaggcctttccaaatgggagctccactcttcccctcctctgcaaatcttcacagccaaggccccttccaccctctccagaggtggatgagatcccttttcccctcccctctgaggtgctgactcactggtaggagccacccaccagaggaaagatctagaacgtctttacagattggagacagccgggcctgctgacccatcatccgaatagctgaagcagagtcttccaccaggggtgccagggcctggctgggtccagcggctctgggatgagcctcccaagcatctttcccacttgggtggccatgcggcgctgacattggacaggtggtggacgagagatggtcccgagaaagggtggtcttgggagggctggtcccaagcctgctgtgctcctgtggcagtgatggggcctggggatggggacggcagctctcatgaggacacacaggctgtgagcccgcagcctcctcaaatgtagcctcccacattttccccaaagtacaggactgtcccagagtaggtagtgaagaggacaaggccctcggcagcgacctccagggcctcctacctgctgaggaagagttaacccactgcctccccacacaacaggctacgaagaacctggtgcctcaggacctcctgggagccaagctggtctggcaagggcgctcaggcctgggagacaagggagcaatggccagtcaccttcaccttctaactaactagcctccggatgaggtggctgccaccaggcccgaatgatccccaggagcccggcttccaaaccccaacatcgaatcaaacatctccatccccaagtgcagtaacacacaaaaaccaaacactctgccctgggaaaggcctggtgcgattctcagtaggactcacacccaccctacctagaagtactgggctggcctgggtactgcatccgtgtgttttgataagggggtgatgtggccacgcccttatctagatttcactttgtatccactgggcacagatattctagagaacttatctttcactcttgtaaaagccacatatccacatctctttcattttctcagtgtgttatgcagcaatttattaaagtatttattgtctaat

SEQ ID NO: 133 - DNA, 2554 bp, Homo sapiens
atctgacgctcaggctccgccccctgcatgtctttgttggcaaacagttctgggggtcgtccgatcctgcaggctgggaagttcaagcacatggctctagcttctggtgagaggtttcaggctgcgtcataatatggcagagaagatcaatgggtaaatggacatgtgtgaagaaaggcaaaaccagagaccgtccaggctggacttgaactccttcctcggctgaagtgatcctcctgcctcagcgtcctgaataggaagtggagccagaatccacagatgtcattatccatctgcacactttgtttactacccagaaggcaagaatattgcattttaaaagtgcccggacttttgttctttcttatcacaaatgacttgggaagctccgaccactcatgtttaccccgagtgaaagtcccattcaaagccttgcttcctggagagctttgagattctggtacaaaaggcattttataagcacaaagtggaaaagcatcattcatattcatttgctgctgcggcatttctccctggaatcttcctcttgtctgtcaacattgggcaaaaggactggcctcatctacattacagatatccttgtgatggtctggagggacctgtgggagaggcggccatccagagggctctctgaggggtcatttagaatgcaactcttctgggcagaggatggtctgcactggcctccaccacgcaggaaggcttccagagtggagaaatgtccactaacatggcttctgtgaggtgtgggcagctcttttcttggtgtggggctctgtttggtgtgatgtaagaggtatcacagggctttcctgtcccagaagatcttagtggatgacacctatgggggttgccagctggattaggtgaggcagagcacacagctctacctaaggggtcccattctcatctgggaatattctaggacataggacactacccaagaggcagagcctggagtggcattatacgggtgaaagatctgagtgccaggtccatataaatgagtggggttggggggatcgaggtgcttagagaacaggagagctgccacaggaagggatggtacccacagggaggaagaaccatgtctcagattccttcctttatacctcttcctgggacctccttggagtctgcagatcagctggtgcttctccatctcctgtcatcttcttcaaatcttttcatcacaaaaaattttcagtgtaaacctaagtagagagaacagtaaaaggaacccccaggggccgtcaccatcacccaccatcaacagcgatcaatgggccgtctaagtccgttttccctactttcatccccgctccagattattatcaaaagtagctcatccctagttatatttcatttaatcctctcagttgcatttttttctggccacgttcttctgtctgtcaatcatggtcttaagtcagacagtctgctgggttggctaggaaaagactctttctttctcaagaaagagttgtaagtaattttgagagaaatgttgcagattgaccaaacaaggtatgcttaatttagttcaattcatcagttacttattgagtcctaggctcagtgctggattcaacatatcagtcaatcatggtttctggcctacagggttcagtgctctagttctgggtgtgcgacgaggaccacagcaagtattcactcaggaaaggcagaatgtggccacagggaaaggaaaggtacaaggtgtggtggaggttacaaggcatgacaaacacactgggctgggaatggtaacagtggaagaggatcaggaagggtcgtgaagcctgaggcattggagagggactttgaagcctgaggcattggagagggacttggaaacctgggcagacagtgggacggtgactgcaaaacactcaagtgtgcaggtgggaatggcagtgggggacaggcgagcctagcagcgagaacacatggtgcaaggggccccatgggggttctggggtggaggaggtaggcaattgggctctcaaagaaacccttgggctttttctagcttaataataaacaattattatttctaaggaaaaagaaaactggatttctagaagcatggctattaaaaaaaaacaactccagaccccaattaggaaactgaaaggaaatcaaagtgggcctaatggaaattaggtagtaggggcaataaaagaaaatgcaggtagctgcctaaaatccagtggactccaggtccaccagccaggcaccacattgttttaacctataaatgaagtatgtccatgactctcactacataaaatggaagttaagccatagtccttttccaatgtgatctgaaaatgtactgtttttgcctctagcaaagcaaatatatagacagaaaattcctagcactgctttcacgcgagggatgacaaaggtgacagactcgggcaaaatgttcatattctatacgtgaaatggaatggtaacttgatttttcaaaaggataagattcttgttacaaatttaagcatatttattaaagaaaactcaaatt

SEQ ID NO: 134 - DNA, 2334 bp, Homo sapiens
aaatcaaacagcctgtcagttcctttggccacgtcagaagatgtcatctcaaactaagttcaagaaagacaaagagatcattgctgaatatgaagcccaaataaaagagatccgcacgcagctggtggagcagttcaaatgtctggagcagcaatcagagtcgcgactgcagctgcttcaagacctccaggagtttttccgccggaaagctgagattgagctcgagtactcccgcagcctggagaagctggctgagcgcttctcctccaaaatccgcagctcccgggagcaccagttcaagaaggaccagtacctcctctcgcctgtgaactgttggtatctggttctgcatcagacccggcgggagagccgagaccatgccaccctcaatgacatcttcatgaacaatgtcatcgtccgcctctcccagatcagtgaggatgtcatcagactcttcaaaaagagcaaggagattggcctgcagatgcacgaggagctcctgaaggtgaccaatgagctctacacagtcatgaaaacctaccacatgtaccatgcagagagcatcagtgcggaaagcaagctgaaggaggctgagaagcaggaggagaagcagttcaataagtcaggagacctcagcatgaacctgctccggcacgaggaccggccccagcgccgcagctctgtgaagaagattgagaagatgaaggagaagaggcaggccaagtactctgagaacaagctgaaatgcacaaaggcccggaatgactacttgctcaatctggcagccaccaacgcagctataagcaaatactacatccatgatgtctctgatctgatcgatgtgagctccctggggagtctgggactgagcagggcccacaccagggctggcacatgtcactggctgaaggaggggctggtctttgtctttacctgacattctcgggtagccacagctcttttgagccctgctggaggggaagggcagtgatttggggaggtggaaaatgaatgttacctcgtggtgtctattttcacgagtgggacatgggcctctggtggccccagtgcagttggcttgggcagtcgtatatccaatggcaacttcccaagtaccctcctggacaccaggtcctttgctgggtttgaggggttcaggggggaaccatacacagttcatgccttgggggatttcccagtgtggtaaaggagatgttattagtaaaatgtttggcgcccctagggccactcagccagacacgtgtacatgcgaaagaaagtagcgaatgagacagacttaattatacagatcagctttgtgtggggaagttatctcgggagaaatcgggcagcttaagcaaatggagaacggaacactgactcccgagtacccgctgtgcaggacacgccacagggacaagcagactgggagaaagaacactgtgagcggtggtgctggggagggcttctgtgtcatctaagtaggagccaggactgtttctctcatgtcctccttcctgcaccgatgggggagctggccctgtccatgtttagtaaaggcttggtatggtcgatggactcttttcctggtgtatcctgtcgggaagtcagggggctcctgcttttcccgtggctccagagggggccccattgtcagcatcgcaaggagagggagctcccaaatggcccaaggccagaccttcctctttcctgcttttcgctttctttttttgccctttcagcccctttattcattcatttaccatatattaattgagcacctgctgttgtctggaacttgaggagcaggagcagtgggttggccctcggggagcttacctcgccaaggacatgttgataggtgattttaatactaagtggcaggggtcacagtgagagaggtagagggaaatgtggacccctggaggaggatcacctgaccagctctgagtggggagaacatcaaggaagctttcctggaggaagtgacctctaaactgaattccgaaagaagggtattccaggcagaggggatgcatgcacaccaccctaaagaagagaaagatgggctcacgcttgtaatctgagcactttgggaggccgaggcgggtagatcacaaggtcaggagttcgagaccagtctggccaacacagtaaaaccctgtctctgttaaaaatacaaaaattagctgggcttggtggtgggcacctgtaatctcagctactcgggaggctgaggcaggagaatcgattgaacccgggaggcggaggtagcagtgagccgagatcgtgccactgcactccagcctaagtgacagagctagactccgtctc

SEQ ID NO: 135 - DNA, 1949 bp, Homo sapiens
tttttcttaatttcagagtactctgcttttctcctcctcagcattgatgacaattgcaattaatgaaggcacacaattaatgttttaaatatattttaatatttgccctcacaggtaagtataagtagcttgactaggcagggaccaagcttatgttgtttgcagccatatccctagatgactagtacctgtggtcaaccagtgttagtttaatgaaagaatacattcaatgctttcaaagagtactgtcaatgctttgacaaataagggcttgccctgtcccatatggatttgtcacattggatagaaaggagtcaagcaaacagatgattaggacacatgctaaagattaaagagaccacaactcatggcccatgcttgtgattttgaatcttacaattgcacagtaaataaaaggtttccacatagggttaccccttaatagctgtaggggagcactgagagtctgacaggcctgggtttgaaacatagtgcttctacttgttgaatgatgtcggacatgttactgaacttccaagaatcatatttttccttagcatgttatacatttgatcttacagcatcatctgtccaacctcagtagttgaacataaggtgctgagcacagtgcctggtgcaaaggaaatgctgagaaatgttagctgtggtcttgaaactgtccagctggataggagctttgaggctacactgtctttcctctcacccagtcaaggagtcccttttctaactttcttccacagaacacagttatggtagaaagctggtccctgggaggtcactgcttcaaaaggaatcctattcagctgtgatgattagcaagctcttgcttgcattgatcccagatatgcctgctataacttctaaccttggactacaattctgttttcttgggcaatacagagcaagtctgattctcttctacatttcagaccttcaaatgtatgtatacagctctcaggtcaaacccagacttctttccttcagagtaaatatctgcaacatcttcaaccactcctcataccatagttttcacaccctcctggtttccagaccccttgtagtcttggctgctccagttattaggtttcttcagaaatacagaatcaatagggtgtatgtgtgtgtgtaaaggtttattttaagggattggctcgtataatttgttaaagtattggcttatatgttgttggcaagtccaaaatatgtagggcaggttgacaggctggagactgagacaggaattgatgcttcagtcctggggcagaatttcttcttccagggaaacagtttttgctttgaaggccttcacttgattggataagtcccacatacattatcaaggataaacttctttatttaaagtcaactgattatagatgttgatcgcatttacaaaacatcttcccagcaacagcaaaattaatatgattaaataactgggtacgatagcccagccaagttgatataacattagctgtcacaggctgtatccttaaagtatggtactcagaactaaacaggaaacattttctctgatcggggtccaacccagggagactgttagctcctttggtctagaaactagtttgaatatgttttaaggttttattaactttttaataaatagccagactatactgacttgtttgcattgggcatatatactactcttgcgagcaggaggcctgaaatctcctagagaagttcaggcagagggagcctggcaacaagggaaatcccgagattgtaggcaagagggtgaggaagagatgctttcaagaagcctggagggagtggagatgattatgtttaacgcattccttctttggttttggtaacctttaacaagtctttctcctccagcccttctcttcaatggtccctgccacctagagctgctagcatagtatggattaatagtgactggt

SEQ ID NO: 136 - DNA, 1587 bp, Homo sapiens
gtcctcctcgccctccaggccgcccgcgccgcgccggagtccgctgtccgccagctacccgcttcctgccgcccgccgctgccatgctgcccgccgcgctgctccgccgcccgggacttggccgcctcgtccgccacgcccgtgcctatgccgaggccgccgccgccccggctgccgcctctggccccaaccagatgtccttcaccttcgcctctcccacgcaggttcgggcgctgcgggtcgggaccctccgtggccgccgcccccggagtccagggtccccacccccagggcgcgacccccgcttccgggcccccggacccgcgcgccccggaagccgaggctactcagccctggaccctcggccctgcctctgctgcccgagccctgcgctgccctcgtcccgggcacctccccgagataagcgtctcctgggtgccctccccgatctccctggccaaagcctgggtgtcgccggatcgttgcattcccatttcgcggatcagtagaatgaggcgcaactgttgaggaccaaagctgcaacttcggatccctgcgctgggttgtctcagtgcctcacatcagcgccaggtcctgccctgacccattacttagcaggacaggccgagtgcccggtgggcgcggggccggcctgccccgccatcattccccacgctgttgtctgcaggtgttcttcaacggtgccaacgtccggcaggtggacgtgcccacgctgaccggagccttcggcatcctggcggcccacgtgcccacgctgcaggtcctgcggccggggctggtcgtggtgcatgcagaggacggcaccacctccaaatactttggtgagtccggtggagggctgcagggccaggccaggctggggctccacatcccaggtcagtctccgtctcagttgaggctgcgagaaaaaatagttttaggccgggcacggtggctcaagcctgtaatcccagcactttgggaggccgaggcaggtggatcacctgaggtcagaagttcggagaccagcctggccaacatgatgtaaccccgtctcttctaaaaatacagaaaactggccgggtgcggtggctcccgcctgtaatcccagcactttgggaggccgaggcggggggatcacgaggtcaggagatcgagaccatcctggctaacacggtgaaaccccgtctctactaaaaatacaaaaaattagccaggcgtggtggcgggtgcctgtagtcccagctagtcaggaggctgaggagattgtgccactgcactccagcctgggcaacaagagtgaaactccatctcaaataagaaaaatacagttttagcaggtttgtccactgaggagcctgggctggccggtgatgaaagcgaaccagaggggaccctgctctcagccggtttatgactggctctggaccaaccaatgtaggatggtcgaagcaagagatgtaaaaccacccaggcccagtggttcatgcctgtaatctcagcactttgggagactgaagtgggagaatcgcttaagcccaggagtttgagactagccttggcaacatagtgagaccctgtctctac

SEQ ID NO: 137 - DNA, 2154 bp, Homo sapiens
tgtgggggccttgacctggccttctttcctccagccgatctgcacaatgcaaccaacctgcggtctcggtccctgtcgggcacaggacggtccctggtcgggtcctggctgaagctgaacagagcagatggaaacttccttctctatgcacacttaacctacgtcacgttgccgctgcatcggattttaacaggtaatgctggcggatgtggggaagcagccgcaccttctcacagccagctctgcctccagggccttggtacttgtgagccacccggagtcatcccgccctgtcctgtcggttggttgggtttctttgcagggctcttggcctctttgtctcagactttgggtggagccgtagctttcccagagctgaagtcctccctttgttcacctttctggcgcacctgctgtcccctcttgagtggccacagatgcccaggtgtgtgttactcacgggcgaggggaggctctcaggccacctcgctgacccaggcctgcagcagctgtgacaggcagtggctctggcccccacaccagcttgcacctgaggccctgcagggtgtgccgttgctgcgagcccatttcccagtctgcagggtgaggatggtggagacacgtctcctctgcagtctgtgaggcctggagaggagatgcatgagtggctgaggcgggcttccttcagaagtggcactgccgtgaccatagcactcaccgctgttgagggttactgtttcacctgcttccctcctgccggccctagacatcctggaagttcggcagaagcccatcctgatgacctagccgcgtgcggagcctgcgcagagccccggccgggcccagccctcggagtgctgccaagtgcctacctgtccaccgccaccggggtctgcgatggcacgccagtgctggagccgcagccaggcgaggccactcgactcccggggccggggccgactccacgaacaccagcccaaactgaagtgcctcttccctcccctgctggcgctgctccgccctgtgccccccgcccatcgccccccacccatctctggagagccctctgcacccaaagaggactagagatgccgagcggccatgagagagagcggaaggagcagctgatgcccagagcggggccagagcggcgggtctatgttcacgtccccccagcagcaggcggaaccacccagccagggcactcagtgcattggactgtccacatgttcttgaggaaagccggtggaagattctggaatgccgtgcggatgaacttcagcacccgagtcagtcccagctcatcctccccagtttaccactttgttctaataggagatgggaacacgagaagtttgatggctttgccctgggctgggaatacctcacccacgcccagttccagaaaggcctccagctgagcagacggccccgatcccgccagaacggccttttgcttccagccaaagaacaccgccaacacgcacacctccaacctgggacatcccacgctgggcctcgcacggaggaacctgcagaatttggattctgagggtagtcgggaggcctcggtagccaggcagaacaggatatctgccaaagggtgtctgatgtggggtggggctggcatcctcccaggaaggttctaggtgggaccccgtcttctgggggcgggggtgtcttttcatcttccctggtttcctagaactcacttcctttgacggcgtgtgttggtcccatctctcagaccagctcactgaggcagaggagttgctcagaggctcacatgggcacccccattggttcgtgtgagcagctgcccagccccaggcctgccctcggcctggtccagcatgaaggcgtttccatctgcaaggatgcacggtaccctccccgagagcaggcctgtcccctacccaactgggaataaactggaagctgggtctctttgttgctatgtttttttgtttgaagttcccaggaatatttgaggggttccggtgatgtgtttagggatcttctctgtgggggaaaaggaagaggagggtcttgttctcccatctgtttattctttgggccctgggaacaggggactactttggggctttctccagacttttgtatgttgttattaaaagcgagctattgcatttc

SEQ ID NO: 138 - DNA, 2340 bp, Homo sapiens
gttttgcaggtgggagtgcagggtgagcccggcgcaggggataggaggtgggggagtcgagagctggagtcaggcgccgctcacgctgggatgatggagtgttaacctcagactctgggtccctttgggccgaagctttaagaaaacaggggcagcgagcccggcgtcccaaggagccttgccaaactgggcatggagaacgggcctcctggatggccacccgcccagctgccaaagaggccggagagctggagccgggacttggaggatcttcttcagagaggcaggagggcggtccgaacgtgcccccacccctgacctcaagcccatgtggagagggccaacagagcctcttggagagctggatttgcgtcctctgcagcttgggggacacgtcgttgatggtgactgacacgccccagagatagtgacatgatgattaagagtgacagcctgagggagctgagcgcagcatggctggtctggcagctgctgtcggtgtcgcgaccccaccccacttccccggctccctgcctccttcgctggagaagcatcctcagccaatggagccacaatacctgacagctgaaggcagggaacagcaggaggggccccaggaagctggccccaaggacgggatgctgcaggaggatgccccgctggcccctggtgactggagcccgttgcggaggcccctggcacgaggtggcagagcagctgctcaggcctccgcctgtggtcacctgggacaggactcaggtggacggggatgcccggctcgtttaatatcactgatgttgagagacagatgggaaaatagccgtgagaaggacgtggagtggggaggctgtcactgaatactactgacacttagaagagggaaaatgacaagttcagggccacgcatcaccaatttaaagcaaagtcaggattccttggcagaatttaacgaaatgcttctcttctatagccaggggtcagagggcagaagacaaggtgcaggactccagagaaggccaaatttccagcccagggaagtcccttctccaaagtcagggccccaaagggaagggtggggtccctgatatctgagatggactatctgaggagacactcttgagacattgaacccccagattctcctgtacctcctggcctgcagaagtgacccattgcctctgttggaagacagaggtcctcttttgcttaaagaccatgcagaaactaagggaagggaccttacaagataaggagttcctctctccagcatctgtccccacctcccctcctgaccaccaggctcaaagctggatcatatctcagcatgacctgaccaaggatgtgctttgcatgccagggaccaagagggattaacaagcagaggagtggtgggagcaagccagcagggaccagccgggtctagagaatgttcctagatgtggactctgaaggttctagatcaagggaggctgcatagtagctggagactggagagttaattagtacagaaagactccctaacccctaaaaaggccctgggaagattctaatatgttgcttgggagggttctttttttttgagacagaatttctctctgtcgcccaggctggagtacagtggtgcgatcttggctctgcaacctccacttcccaggttcaagcgatcctcctgtctcagcctcccgagtacctgggattacaggcatgcaccaccatgcccagataatgtattgtttttttttttttttagtggaggtgggattttgccatgttggccaggctggtctcgaactcttgacctcaagtgatctgtccaccttggcctcccaaagtgctgggattacaggtgtgagccacagtgcccagcacttgaggcagttcttgaaagcttggaagaagtgatagtgcataggcgatgaagtggagatgtcagaacagccctggaggaaggtatgcaaagtctcagagaagtggacacgccagaatggctcttctattgtaggttgtacaggaaaacagtgtgacaagagtgatgccatcttaaaaccgccatatgatgatgaatgtttcacccccatataccaagctgctctgcagtaagctctttaaacaatgcctgtaccatacataaccctttgtaaagatgcttagctaaccccctccccaagtggctatgagttttgcattaaaatcggagatatggccacctgcacatgttttaccctaaaagcttgctacataaaagtactttctgcagggcagatgtggggatctaccattttgtggcagcccggaacatcgcttctgctcctaagtccctattaaatatttctttacaag

SEQ ID NO: 139 - DNA, 1827 bp, Homo sapiens
agtcgccgtgggagccggaggatggcggcggtaacagcggccgccggagaggaggcggtggggaggcccggggcgccaagcgcgacggcagaaagcggcagcggcccgtcatggcgcaccgaaaccagcggcagtcgcacggccacctgagtcgccccttcctgctggagccagcgaggggtgcctgcagccgggacaccttcctctccgcgtctcctcgtctcccgcgcccgcgtcaggccgccagccttgcccaccgccccgagaagagcgcgccgggcgccgactgcccctcggggcgccgagcggcggccctggacgtgcgggggcctctctgggccggccgcggcgcctcggccctgccctctagctcccgcgttcgctcctaccctcttggctctcggggcacagcgcgcggcccggtccggagcagggcggacatgaacgccaggcagagcggcctggccgccgctaacggcgcacgcgcgcgtactcggctcggatctaccttccagtagcagcggagtggccaatgggaccgggaccagggctgggggccggggggccgccgccgcggggaggttcccggctcaggtgcccagcgctcaccagcccagcgcctcgggcggtgccgcggcggccccggcagccccgcgcagctgtttcctggggggcgtggcgtcgggggcccgcgcggcgcagtcctccttcagcatcccgaacagcagcagcggtccgcaggactcgcaggactcggtgcacagcagccctgaggatggcggcgacggcggccagcaccggccggtgggcgggagccccggcgggccgcgcctggtgatcggctccttaccagctcacctctcaccgcgcatgtttggaggtacggacccctctccacgcgcccgcgctcggttctcccgcggctgcacgtgggccgtggccgccggctatttttaccgttctccttttctccttccgccggggcgccgggggctgcttcccggcccagcccgcgccggtctccatcctgggaagaaacccggcacgtaacacctgcggtgtcgctgccgcgtagacacgtggttttgtttttaaacatcgtgagcacccacacctcagcgggtactcagtagagatagtctattttccagtgagttgactggagcaaatgttgttttacagcaaacccacgaaatagcccttgtggttgtggcttttagtaccaggaagtcaggaggagacggttgctaaatgtagttctatctggggactcgagtggggcacaatttttaaaagccaaaagtcagagggtctcaaatgaactctgagttaccatctttggaccgacttttaatataaagctgtaatccttaaatctgtgtcagtagtcccacttactatgtcactttaattggatgaatgcgttaatgaaaagtttgttttcaaacctcactaaactgctacttaagatcacagttaatgtgagtcctgcttaatttggaaagcatttaaaaaatggaaaagtttcttagggaagtaaaaattttgcaactctgcctacaaggtacagtaattggctaggttcttttgaagagcagtgttgactagagttaaggaaaagtcagttgtgaaaaatggacatttttaatagcaaaatgatgtgctttactgtagaaacaggaggaagggtgcattatcctggggaaaatgaattcttcagttatgttttatgctgctctactttattgcaaaacgctaatattaaatgaatcaagaccacctccccttcccgctttatgaaaataaatagaagtatagaagataagc

SEQ ID NO: 140 - DNA, 3001 bp, Homo sapiens
ctcttcctgtgtccctctctctcccctccctctctccttccctccctctccctctctctctccttccctctctccatggaaggatgttatgtatcttagcaacaaaggctttggattttcccctccagttactgacaagaaaccagaatgatttctggtgtcagaaaccttcctcgaacaaggagctttctctggagaacaggctccgagcagccacacgtcattcgacctctgttccccgttggggtgtcctcaggccaggacatcctggcaagtgggccgtcagcgggcagtggcatcgcagcctcagccgggagacccaagtcactcctctcagaagcgcggcacccgaaccacctctgttcatcacattttgtcccgtggagcagtgacaagacccagcaagatttcatggcgacagaacttgaaggtttcagggcgacggaacctgagagtgatacagacattttgattcctggtgcaacagggtatgaagaaaacacatacctaattttatcggaaaagatatactgagtgtctatgcatgctgtgatttgaaagaaaatcactcagtagagaagggcctcaggtcacaagccttttgtctaagtgagggggataaaaaggcttcacagtagagtgacaattactaatcctgcgacagtaatatatgcaacttttaaatttttttctaaacatttattttgtgactactctgtttcaatgctccctgggagtgaaaaacaagattctagccaggtgcggtggctcacgcctgtaatctcagcactgtgggaggctgaggcgggaggatggcttgaggccaaggagttcgagaccagcctgggtcacagagtgaggtgccctcccctacccactcccagactatctggaaacacccagtgcagacaaggtcaagtcagcttaacacacgcacgccgatagtggtgaacgctgctttctgagcggctggcgaggtcagtcttaggaaagttggtggcagacgcgaacagccccactggaattggtaacttggaaggcgcagctccacggacacagccacgatatgccttctgccgccacacagcccctgacctgccgcagtgccaggcatgaagcctctgcccagccaggcctcggggtcctctctagggaaacacaggctccttctcctctcctggctttctctaggccctccagacaccagatggaaatctaatggaacccacacaccatgcattctgcagggctgagctcggcttcctccaggacaccacaggagccgtcttggttgcatgtttgtccaaatttaaaacttcacccggccgaggtgggccatctgtggcttcgtctgagatgcttacttttcgcaggattttcttggagctctgggacctggtggggcgctcactccatgcagttgctttcactccaccagggacatcgggtatgtaaataaacaaaaatattgcaggattgtgcagggaacacagcattacagaggtgctggtggttttgctgtgaggagggaacatggaccagaggactgcgttttctacacacactgagctgtgaaggagctccgaccccgctcctctgggagcctgcaggatgctcagcagcggcacccaggctgcctcagggacccaggtgcattgggaacaacttggcaattttcatccactgatttctgttctccagatcctgctttcaggatagggaaagactcaggggcaaagtcatgggacaaagaggtctgagggcccccacctctgtggcactggaggcctgtgtaacatcagcctccctggtgattttgcagaagaggggttggcgttccttagatgctcacttaaaggcttttcttgaatttaacagaagctgggaagtaaatattactttctttatgaaacaactactttttccaagggaatctctttctctagatggcctgaaatgattcttctggtttttatctttttaaatccagatgaatgcaaataaccatgaatcagccccaaacggaggacctcatctgtttgcaccctcatgtcagcacacaaatgagaatttaaagatcctaattaaacccgggctcaaaatatcttcctgagtagaccagaaagcaccagtttcacaaaaaaacagaaatatgcatcttcccaatgtggtttttagtttattttctgtgttttaatggtattcaaatttgaagttgattgctaaagcagtaactaccgttaatgtgtgtaaacagatttgtggatatttaacgatttaggaaactgtggacgactactttacataatcaacaggtagacagacagatgtcagcacacacaaccgtcaaccctcagttgctcaaggctgaatgtgggatctctcatctcaggcttgtttgaaatcctcaattagtgaaaagcccttggaaggcacctctaacattgtggtcaggagcccagattttggagctagaatttaaacatagggatagggatttcattccaagcatcccaccaactgcctgagcctgtgtcagcgagccagcccacctccctgtgctgattgtctcatccgtgcagtgggggtgtggacacctggtcctggggaccccagcatctggcttcaatgtcgatgtccttccgccgaccaggagggaggcccttctccactctgctgcaggcgtgggtcacctgtgagtccctgcaggcctccactctctgctggaggtgcccgtgagctggacaatggctggggctgattcataaaataaacaacaacatgcagaggacagaatcctacttgtcagacatgggggaaaaggtagtcagctcctgaccttgcaaagcctcaggcaccaagagagactcagcctcgtatgactcagtccctgcttttgctctatacagatccttcattttaaagccgtattttcttcattttccctagatggattctttactgtaactaattatgtcggattaaaacatgctaacaacac

SEQ ID NO: 141 - DNA, 2143 bp, Homo sapiens
gtttgctggaggtccactccagaccctgtttgcctgggtatcactagcggaggctgcagaatagcacatattgcagaacggcaaatgttgctgcctgatccttcttctggaaggttcatcttagaggggcacccggctggattgaggtgtcagttggcccctaatgggaggtgtctcccagttaggctacttatgggtcagggacccacttgaggaggcagtctgtctgttctcagacctcagactccgtgctgggcaaaccactactctcttcaaagctgttagacagggacatttacgtctgcagaactgtctgctgccttttgttcagctataccctgcccccagaggtggagtctacagaggcaggcaggcctccttgagctgcggtgggctccacgcacttggagcttccctgccactttgtttacctattcaagccttagcaatggtagacacccctcccccagcttcgctgccatcttgcagttcaatctgagttgctgtgctagcagtgagcaaggctccatgggcatgggaccctccaagccaggcgcaggatataatctcctggtgtgctgtttgctaagaccattggaaaagcgcagtattagggtgggagtgtcccgattttccatgtaccatctgtcatggcttcctttggctatgaaaaggaattccccgaccccttgcacttcccgggtgaggtgatgccctgtcctccttgggctcacactccatgggctgcacccactgtctgacaagccctagtgagatgaacctggtacttcagttggaaatgcagaaatcacccatcctctgcatcactcatgctgggagctgtacactggagctgttcctatttggccatcttggaacctcccatttcatcttcttaaagaaatttctctgggagccttctggcctgctccaaattagactgcttgcttactataatctttaacacagctgttttttggccttctgtcataattatcctgagattccctttactcttatttgtgtcggatcttttaatagctaatagctaattaatatatggatttggctgctgtgacagagacctaaaattaaaataatttattgaaaactgtgaattttggttggtttggtttactatgtcctttaccataggatgagctgactgagttatttccttgggggtcctcctacctttagagccatacccttccctctgtccctcccttctgctcccctctcccctctctgtctccagtgttccttggaaaagagtcctgcagtcctttctagaggatatatacttggctaccccagtattctgggatttgagttacagaagagttaagctagcgggtccaaattcaagatgtgaacctttattttctatccctgttttcagtgtggtccataggcctctggtggaggtggtaggggtgggggtgttttgttttgtttttctccaaagaaaaatatccagttttccgtaggagtggaggtagggtatttattggctgctcagctttggggaagtgctctgggaggacctggttgcttctttaagtaggttttgaaccacttctacaacatttaatttagcctttcaaagacccctgaattcccaagcctttcgtgtaccctacaacttaaatttagacgtttctcagcattcttccctgtcagttaaggattctactcattgatatgctttccagcttctaaaattttctaatgccgcctcctattatttttgtctttgctgctttatgtttttttaaacaaaaactcttttctcttctagaagttacagttttaggagtccaagaagctaaatatttatattcagccatctctctttaactggaaaggaatttaagtttttaatggccttttttaattgttgtcattctgtttggtatcaactttaatattcctatctactatcttccgttatcaactttattcagatagtaaggtactaaataatgtatttgtgatcacctgtgtcagaacataaataagaataaaaataaacttttgatgaattagaaaaaactctttttttttcctataaggtgcatatatatttgtaattatctttgggacttaaatgtttagactggaaataaaaatattagagctg

SEQ ID NO: 142 - DNA, 2060 bp, Homo sapiens
attgctgatgctgctgctggcggacatggacgtggtgaatcagctggtggctgggggtcagttccgggtggtcaaggagcccctcggctttgtgaaggtgctgcaatgggtgagtgtggtccgggctgttggggcagagtgcagggagagagggaggtcatggggtccagaagagcaggggtggagtaggggcgagtagccagggatgagtgcgggggttgtaggggatgggggaattgggctccagggtgaggtttcaggggtctgaagccagaaaacagatgagctgtgacgtcacatagggctgagggtacccccgttgtgaagtgggagactgtgacgtcctacctcctctcttgaagtgagggaggggtgggggaggtggagcctgtagcagatgctgggtgagagatgcaaagtcagagaaacccagagacagtgaaggtgacagagagaatgagggacagggaatgataaagacagagatggaaatactgagaaaaaaaaaagaaatatggagatgagaagagatacagacataagagagaagagacaaacagaaacaaagaaaaaggagacacagaaaacagatgcaaagagaaacagacgcagggagagaggcaggaaaacagggtgagggagagagagacacagagagaaagagacactcagaaaaaagagaaaccaacacacagaggcaagagggagacagagagagaaccatccggagaccgagtgagagacaggacagagagacagagacaaacagaccaagaaacagaaagacacagacatacaggcatacacttacacagacagagaaaaaagagacaaaaagagacatcgacagatcagataggcagaggcagagaggatcagagacacagagagacaaagagacatctgagaaagacaaagacacatagagaaacagagataccgagagaaacagagacacagtgagatacatagagaacaacagagacaaacagagaagagggaggtcagcatggaaaggcagagacagagagagacacagagggagaaacaggaagagacagccatacccttgtaatcagcttgtccttggtcccgatgagccctgattagggggtgggggtggggactgctccatctgctgctgcctgtgctgggcccccgatctgtccagaggagggcacctccctcccacatgcacacaggttcactgtggccatccccatccctgctgcccagggtcttcgccatcttcgcctttgccacatgcggcagctacagtggggagctccagctgagcgtggattgtgccaacaagaccgagagtgacctcagcatcgaggtcgagttcgagtaccccttcaggtgtgctcccaccctgggataccaacagacctgggagaggaaggggcagggtggaaccggccaatacctccccccgcaagtagctcctgcccagctcccacctcgaggctacatccactgggatcactgagcacctgccttgtacctggcactgctctggactctaggactatgtggtgagcaaggcagacataggctgtggccctctggctctgttccagcgaaggggtaagggacaggcaataaacaagatacaaaagtaagacaggtgtatatacataccttaacccagtaggtacccaattaatgttagccaatattattatttaatccccattcattcattctatacacatttttgagaacttattttatatctggtactactcaaagtgctggaagcatgatagtaactaaaacagacccaactcccgccaggcacagtggctcacgcctgtaatcccagcactttgagaggccgaggtgggcggatcacctgaggtcaggagttcgagaccagcctgaccaacatggagaaaccccgtctctactaaaaatacaaaattagccaggcgtggtcatgcatgcctgtaatcccggctactcaggaggctgaagcaggagaatcacttgaacctgggagccgaaatcgcgccattgcactccagcctgggcaacaagagcgaaactccatctcc

SEQ ID NO: 143 - DNA, 2001 bp, Homo sapiens
tatatatgagaaaaccatggctcactgagatttgatgacttatccagagccacttacctagtcactacagcaaagatattcaaataaaaatttgtctagcttaagagtactctcctgtgtaagtagggtaccatgttgaaggttgcagaggaagtatgtatttattttctgttttctactataataaattaccacaacgttaatgacttaaaaatacaaaattttaatattgagttctgggccctcacgtgccaaaaaccacctggtgtggcaactgcacgccactctgcatcctacagcgtggatcctctgcatgtgcttttgggagatgagctcactgaaatggccatgtccagtcaaggacactttgagggaaattttgagtctctggatcttgcagaatttgctcaaaatcagccatgggggaataagatgtttggacaggaatctggatctctggctaaaaagtatcccgtgacaacccagctgttaattggaagcttcactagatgatgcatggagttcatattccaaaaggttgaaaattggctgcaacagctgtgggggggtgaattttttctccttcagcttgcaagtcatactgagtacatcaaagatgactggcaacaactagaggaggacatgaagaaagcaaaagaacagctgaagatccataaaagcaatcagatacctactaaggtcaagagcaaagctgaggaggtggtgtcatttgtgaagaagaatgttctaatgactggggaaattttcagaggtcttctgcttggcatggcatcataaggaggatgacctcatttctattgttcttgttttttttccagccaccagcctctatactccatcatagggcatagagccctgcctcttcttttcccatgacttcctccctgctgtggcaaatccaaatggctttgggaagcatctgttggtataagttaatatggtcctaccttgagcttgatggtggcagaagagacaatagatattagttctccttccagtcactattaaagatatgctttactcagaaaaaaaaagacaaaaaagctctggatgccaaaagtttgaaatgagtgtcactgggctaaaattaagatattggcgtgccttttctacgttccttggattgtagaactctgcctacattccttggatcacagccttcttcctctattttcaagccagtagcattgggctgagtcttcctcacactgccatctcccttgttctctcttctgtttccctctgctactgttaataagcattgtatttacattgggcacacctgtataactcaggacattctccctaatttcagaccaggtgaatagaaacctttattttatctaccaccttaatttctctttgccgaatgtattcactggttccagagatttgagcatggacatctttgactggctattattttgagcagaaggtcaaagagaggacaggtattagtagtctgtggaaaaagcagtatctaggaaatatttggtagaggagtgagggagccttaagagattggtagattgagggaagaacttgataaaaagtaagaatcttaaagctatatgaggtgagggatagccaagaaaggtcttagcacagtgatactcaatgtgaggttgggatgagggcactatatttccacaaggcagcatatgagtcttagagggtaggttagtggtctgaaattaaaacagtattttttatagtcctagaatttgtttttgtcatatttaatggcatttggatttaaaaaattgaaaaatgtataacactttatacttttcacagaaagagataggttttggaagagtagagaaatactaactgataagttgatcagggagataggatcagaaataaatacgtaaggctgaggcaggagagtcacttgaacccggagggcggaggttgcagtgagccgagactgcaccattccactcagcctgggcaacaagagtgagactctgtctc

SEQ ID NO: 144 - DNA, 2779 bp, Homo sapiens
atctcctatcccagcctgctgggcatggtcagtgaagtgtgggtgattgggaacgcaggctgggcccagctatgtggcttgtagggagatggccaaagtgcaaggcagggccaggcaggagatgctgaaggtgcgcccggctcggaggtgtgcaaaggctcaggagccagggccagctctccctgcttgaaggagagcgagtgtgtcagggtagctctccctggtaccagtgccggtccatctctaacagaagagcatatgtgtaccatctgtcttgtttctgctgttgtggccaacatcctgcagtgtaagccagtgcccactcctgaggggtggagggtaacatggggaggtgagtgtaatcattttcctcaaatgattacagaaactctctgggttcttgccctcctggtcattggaaggggaagtagttgtggaggggttaggcctgcaggtggggcagccctaggactgtgtggtgggtgggccctctgcccaagccagctgccaagagcagggcctgcctttaggtccctgagaccgaggcctcggcactgtccccgaagaggcctttactctggacatgataagggagggtgagggggctcacacgggccaccagggcatgttaaggaacttgagagagatttttgggaagcaagttgaaatgtaggtagcacttgcttctgcccttgctgtgcatggtccttggctgtgacggagggagagaaggcaagccccactctggcccgggggtgggaaacttccctgagcaggagggggaaaggtcccagccaggcacagccacagcttgggggagctctggcatcccgaggaaccacagcacccttggggctggcctaagacgggaaggggctgaggccagcctgatgctgctctgcattcatggagtgtgcagagagctcagtgcctgaggctgatgggctgggctgcagcgtgctgttcttactggctatggccacactctggtttcactccttgatgaggactctgggcaccacgagcacctcacctccctactctgcccatggcaggaggccatataagtggcgtggtgtgggcagaaaggcctggcagctatggactgcccctcgctctctgctgctgtcagtgggcctggcatcactgaggcgggccagtcagcatgcagttatgttgccacagctcctggctgtttcgtgtctgccagaccctgggcgcgcctaccttgccagaccctgggcacgcctgccttcagggtcccaggcacacagctgctgggcagcgggcaggccgtagagctacagcctgcagtcctgagcgtgaggtgctatacttcccaggagacatcggacaagagtgtgattgagctgcagcagtatgccaagaagaacaagcccaacctgcacatcctcagcaagctccaagaggagatgaagaggctagctgaggaaagggaggagactcgaaagaagcccaagatgtccattgtggcgtccgcccagcctggcggtgagcccctgtgcaccgtggacgtgtgagggaggtggcacgggccagggcgcgggggccgccagccgcacttctgaggagaccagcagtcatgcatcgtgcaccacagtgtcaggcctccaacccatgctccttccctgtggccaacctgtgggcccggccttagggtggaggctttagtgtacagggacagccatggccacacagcacacatgtggagcagcggctctccctggaaagctccaggcctgaatggatggactcagcgactgcaccagtggcagctggtgactgtggacagtggtggaccctgcttctgtgcacctgctgcaggctctttttatgaaggctttcatgaattttagtatgtaatacgcactgacgacacatgatgcttggatgacagatgagaggggatggctgagtcctgtggctggcccgtgatgccaggtggcccatgtgcccagggcgcctgcagggctgctacagggacctggtcaggaggtgcacatggtgccctgccctcacccaccctctgtgtttccccttctttgaaaaggtagaagagaaaggaatattttaaacctttttggcttaaacagaattttagcatcagaactagctttctgggattggaggcaaaccatcaaggtggtccctctccagtctggacacgatgccagcaaggatgacgtcctgccacctcctggagttaccctggcctcctagggtccctttttctgatgaagtcttaatgccctaaaagcgcctctttggacactgaggccctctctgcctttcctggcctccggcaacagttttttacaaagattttttgcagtcgagtccatatgtccacccattgatttttaaagcttttgtgatattttagcattttgaaagactttcacagtgagagtagaaggtagatttggaatcatgcattttagcaagtggacttgttgaaacaggaagcaagggccttcagtgtagcccattcttgatccagagctgttgcctgtgacagcggtttctctggatgtcaaaggcagctgcctggtgcccagcttgcttctcgactggtggcccctatgggtgggtgtgcgatggaaatgtgttcctgccggagtctgaggcaccagggtgtgctcaaaggctggccctggtggtggactggcacctgtgctgatgccatccagggcactgggctgtgcctggaaggcgagccttgattgtctgaacacataaagcaaactgtccagaaggg

SEQ ID NO: 145 - DNA, 2513 bp, Homo sapiens
actcccgggaaagacccggagacgggaccaccgcatgtggaaaccaccgggaagcacagcgcgtgggccgcctgagcggtgccggggcggggaggcagggccgccgctcaggccgtggacctcggggccgcgggacggacgtggatggcgccgccgttctctcgcgggcccagcgaggctatgcgtgcgcggcccgggcagtctctgcgagcccgggctgctgctcatctgggggggacggcggccgcccgactgagcccagagctgtgggccgcgcccgggttcctgcctcgggccggaggagggagggcgccgcggcccgtctcgggcctcccgccgcgctggggcctggctccctcctggctgcgctgagcgcctgcggctccgcttggggctgctgcgctctccacaggccgggccgccgggctggagggcgctgcaggcggcctctgttctccaagttctccgcgggagagggaggggaacgagggcccagccttccgcggggtgggctcggccgggagaagcgcggagcctcctggctgcccccagccggtgcggccgccaccgtggccgtgagggcgcctgggtcccctctggaggttttgccgcagcgctggccggcgccgagatatgaccagaggcgttgaaagttggcgcgttgaggtacctaggatgggcgaggaaatgaacaagcttcaggggagaagaaatgactgtgggaacagtgaagatagtgatccggggagacaggaacacgggcaagacagcgctgtggcaccgcctgcagggccggccgttcgtggaggagtacatccccacacaggagatccaggtcaccagcatccactggagctacaagaccacggatgacatcgtgaaggttgaagtctgggatgtagtagacaaaggaaaatgcaaaaagcgaggcgacggcttaaagatggagaacgacccccaggaggcggagtctgaaatggccctggatgctgagttcctggacgtgtacaagaactgcaacggggtggtcatgatgttcgacattaccaagcagtggaccttcaattacattctccgggagcttccaaaagtgcccacccacgtgccagtgtgcgtgctggggaactaccgggacatgggcgagcaccgagtcatcctgccggacgacgtgcgtgacttcatcgacaacctggacagacctccaggttcctcctacttccgctatgctgagtcttccatgaagaacagcttcggcctaaagtaccttcataagttcttcaatatcccatttttgcagcttcagagggagacgctgttgcggcagctggagacgaaccagctggacatggacgccacgctggaggagctgtcggtgcagcaggagacggaggaccagaactacggcatcttcctggagatgatggaggctcgcagccgtggccatgcgtccccactggcggccaacgggcagagcccatccccgggctcccagtcaccagtggtgcctgcaggcgctgtgtccacggggagctccagccccggcacaccccagcccgccccacagctgcccctcaatgctgccccaccatcctctgtgccccctgtaccaccctcagaggccctgcccccacctgcgtgcccctcagcccccgccccacggcgcagcatcatctctaggctgtttgggacgtcacctgccaccgaggcagcccctccacctccagagccagtcccggccgcacagggcccagcaacggtccagagtgtggaggactttgttcctgacgaccgcctggaccgcagcttcctggaagacacaacccccgccagggacgagaagaaggtgggggccaaggctgcccagcaggacagcgacagtgatggggaggccctgggcggcaacccgatggtggcagggttccaggacgatgtggacctcgaagaccagccacgtgggagtcccccgctgcctgcaggccccgtccccagtcaagacatcactctttcgagtgaggaggaagcagaagtggcagctcccacaaaaggccctgccccagctccccagcagtgctcagagccagagaccaagtggtccggagaagcgcagcagcaccaggccccctgctgagatggagccggggaagggtgagcaggcctcctcgtcggagagtgaccccgagggacccattgctgcacaaatgctgtccttcgtcatggatgaccccgactttgagagcgagggatcagacacacagcgcagggcggatgactttcccgtgcgagatgacccctccgatgtgactgacgaggatgagggccctgccgagccgcccccaccccccaagctccctctccccgccttcagactgaagaatgactcggacctcttcgggctggggctggaggaggccggacccaaggagagcagtgaggaaggtaaggagggcaaaaccccctctaaggagaagaagaagaagaagaaaaaaggcaaagaggaagaagaaaaagctgcc

SEQ ID NO: 146 - DNA, 1530 bp, Homo sapiens
aaaaaaaaaaaaacgaaagaaagaaaagaaaagggtagaaccaggtaatcaggaccttaaaagaaacaaactccacttctgacacacagaagcatggagtgcagatggcctgggaaggaactagaagaatacttatgtatatttacaattcactgggtatttcacacacatacagaggatgagaattcacagagatgtcatcacagaggacacagggggaatggaggcaattggtcctgcataccaagcccaaatattcataccacagacatgaaattgggtcagctgaggctgaaggtcagaatgtttcacatgctaaaaatgagttggccctgtgccaatggcacaggccttttacaaagcgattctgggaacatggagcagagcccctctctcctaaccccataggaagtggcctggctggaaccccagcagaaggcaagactaagctgtctctgggcccctttccagttctggaatccgacgatactatttcctattgatcttatgtcctctcccaagaacaaactaaccaggagactgaaggatgacacaatgggcagtagcatgcaagcctgacctgggtatcctaaaaagactaagggaaaggaatgggctcagtgcaggaccagggagctaaaggttagtgttgaagggctatggtcaaaggtggtcttagaggacagggatccagactggggtcaggagggaggaagtggcaggaagtctgacctggtagcaatgtcgtcatcctcaccaccccagccccagtattcattggggaagccattcatcttcaggtactggtcaggagtaagtgctgagactcctccgaagtactgggggtacgggaggctagggagagaaagatccttgcataccccgagtcttctggggacacatccccaaccacaatccgcttggctctcctccttccacaggatagtaggcttccctgtttcccagtacccttccatgccctctacctgtatccaaacttgttcatagcaacggcaacatggcggggtccccgggggtcacacacatacagattgtggtcattttctggcaagaggtccacatcgtgcaagaacaggcagtcccactcttcatcacgcagggcctctcgcaccccaacattcaacagttttgccctgttaaatgttccatttccagcctggaagataatggaggggaaccagactatgtctgtaggtggcacggagaaaagggggctaaagaataaaagtgaaggccgggcgcggtggcttacgcctgtaatcccagtactttgggaggccaaggcgggcagatcacaaggtcaggagattgagaccaccctggctaacacggtaaaaccccatctctactaaaaatacaaaaaattagctgggcatggtggtacacgcctgtagtcccagctactcaggaggctgaggcaggagaatggcgtaaaacccgggaggtggagcttgcagtcagccgagatcgtgccactgcactccagcctgggggacagagtgagatctc

SEQ ID NO: 147 - DNA, 1852 bp, Homo sapiens
tccggcaatggcggcgctgacgagagtcctggtcagctgagtggaaatagaaggatttctgctgccatcatcttccatgggctttccaggtcacacgacctacaagtagggagcagggaaagaagagtgagcctgcatgccaattctaagctcttcaggatcaaaaatggcagcctgtggaggcacctgcaagaacaaagtgactgtgtccaagcccgtgtgggacttcctgagcaaagagaccccagcccggctggcccggcttcgggaggagcaccgtgtgtccatcctcatagatggcgagacttctgacatctatgttctccagctttccccacagggtcctcccccggcccctccaaatgggctctacctagcccggaaggctctcaaggggctgctaaaagaggcagagaaagagctgaagaaagctcagaggcagggggagctgatgggctgcctggctctggggggtggaggggagcaccctgagatgcaccgcgcaggcccaccccctctccgagcagccccacttctgcccccaggagctcgggggctcccccctcctcctccccccctgcccccacctcttcctcctcgccttcgggaggaggcagaagagcaggagagcacctgccccatctgtctgggggagatccagaatgccaagacattggagaagtgccggcattcattctgcgagggctgcatcacccgggctctgcaggtgaaaaaggcctgccccatgtgcggccgcttctatgggcagctggtgggcaaccagccccagaatgggcggatgctggtctctaaggacgccaccctcctactgcccagctatgagaagtacggcaccattgtcatccagtacgtcttcccgcccggtgtccagggggctgaacacccaaacccaggagttcggtatcctggcaccacacgggtggcctacctcccggactgccctgagggcaacaaggtgctgaccctgttccgcaaggcgtttgaccagcgtctcaccttcactatcggcacgtccatgaccacagggagaccgaatgtcatcacctggaacgacatccaccacaagaccagctgcacagggggaccccagctgtttgggtacccagaccccacctacctgacccgggtgcaagaggagctgagagcgaagggtatcacagatgactgaaggacatcgcctttgccaaggcccctgctgtctgcctctactaggacccagcagaagcctctttctcctctctgccccctgccccccacaccacacctgtaggggacctgtctgactgggaagggagttccgagagggagggggcaatcccttcccccatcccccactggccaagtgtttcaatgcagtgtgagccactcccttctggcagaggccgacctccaaggctctgttctcccctccccgtgtacatatactcccggtttccctgcccctccattgcccttggctttttctggtatgtgctgtgctccacgaccaagccgagaaaggacctagggtggggaagggagggtctcttgattcctaaccgcccccacatactgctccaccgctgaacttcgggtgccggggaggagaaattgggctgatgtgagctccccgtcacccgccatggagccggctgtgtgtgttcatcagatacagttctcccttaaccttgtcctttctctcctgtgtctcagtctccgtcagtctgtctttctccgctcttctctgacccctgtgaggaacctccttaccctgttctggaatcgctgccagactgtagcttttaatttaataaaaataaagtaaaatatgcaactctttaaaaaaaaaaag

SEQ ID NO: 148 - DNA, 1636 bp, Homo sapiens
taagacttctttaagaggaaaatgaattggaaccgtagtgggcattagtctataatatgatgctctcctccctgccagaacttcaggacaaatatttgaaatggcctatcttggcctggtgtggtggcttatgcctgtaatcccggcacttcgggaggccaaggctggaggattgcttgagccgagtttagaccagcctaggcaatatggagagaccccatctctataaaaaaaaccacacaagaaaaattagctggctgtggtggtgcatgcctgtagtcccagctactcaggaggctataagctcacagccaaaggggagaggtggaatccaggtaggcctagttcaggagctggtatgtgcttatagttcaggctatggggatgagagaccttactggcatttgtgcttgtcatctttatcagccagtgaatgcagggcgaggggcttaaacagccagagcaggactaggtccctgaatgtcagccagactcaactgtgtgctcaacttcactcaaatgtgaagcccagcagggcagtgagcgcctcttgcgtttgcaggttactaccggtactacaacaagtacatcaatgtgaagaaggggagcatctcggggattaccatggtgctggcatgctacgtgctctttagctactccttttcctacaagcatctcagtgagtgcctctgcggcgtcttgcctttagttcccatgagagggtggtggtgactgatttcattagatacagcagcccaccttcttctgaggctgagggacctttagttaaagttccttatgtttccacctaaaagaattggagggacctatcagagtacagtatgtgggatattgtttgaaatgagaaaattgtgacaaagagaacacaggaaaatcaagatgaagccagggtaaagagagtacttagaagcattctttaaaatacagcacactgtgaaaatttggctcgattttcctagtagccaatgcagaaagagaaatgagttgagtgggataatctggtaccccagaaaagcatggctgttccggctctgaggcttgagaggagcttgtctggtgggagattggcgggaggtgtcggtggcagcctctggctaggctgtttctgacagtgtagtgtacaccccctacccccacctcactcccattctgtggcaccagggcggtcctgcctctgaaggacgggttctctggggctgtttgtctgagcgtgtgttccctctgttccttctggaaagaaagtggttggccaggtggcaggttggctcctgaggtgtctttgtgccccccgggtctgctgattctgcagagacaccggcaggcgggtcatgggtcatctctgaagggaattctcaggaaggctttgtgtgatctcagcctgcttcctgccatgctgtgccttcactgtaaccttttaagatacttaccatcttgccttcctgacttcagagcacgagcggctccgcaaataccactgaagaggacacactctgcacccccccaccccacgaccttggcccgagcccctccgtgaggaacacaatctcaatcgttgctgaatcctttcatatcctaataggaattaacctccaaataaaacatgactggtacgtgt

SEQ ID NO: 149 - DNA, 1662 bp, Homo sapiens
ttcatgaagatgctgctggaggttggcagctggtagctgtggatgtcaacaagccccagggacgcgccccagcctgcctccagaaaatgatgcggtcatccgttttccacatgttcatcctgagcatggtgaccgtggacgtgatcgtggcggctagcaactactacaaaggagaaaacttcaggaggcagtacgacgagttctacctggcggaggtggcttttacagtactttttgatttggaagcacttctgaagatatggtgtttgggatttactggatatattagctcatctctccacaaattcgaactactactcgtaattggaactactcttcatgtatacccagatctttatcattcacaattcacgtactttcaggttctccgagtagttcggctgattaagatttcacctgcattagaagactttgtgtacaagatatttggtcctggaaaaaagcttgggagtttggttgtatttactgccagcctcttgattgttatgtcagcaattagtttgcagatgttctgctttgttgaagaactggacagatttactacgtttccgagggcatttatgtccatgttccagatcctcacccaggaaggatgggtggacgtaatggaccaaactctaaatgctgtgggacatatgtgggcacccgtggttgccatctatttcattctctatcatctttttgccactctgcctccctctcttatccgtgacctctgtggcactcaagacgcctgtccatcctgccttcctctccagcctccaaaccctctgcctggaagccagactctggccagacttactcaccaggccctcaccacaccacctggaatgcgttcctcacagctcttttccaaaatcagtcttctccttggcatctgcgtggcttgggagagcatccttggctctctgtcattgtctcacaatcttcaataagtagtgttcggaaagtgcccccctggcccatgtgcccagatgggctctccaagtctaaaggcttcaaaatggtacagaactaaatgtgtgaatttatgatggggcttcatttctggtcctccttcttcacacttgcgtggccgcccttcccatccactctccaattttctttcacgtttctgctttctgagaagaaataagactgatttctgggatggagcatgagagagacagatgcagagagagagagacaaagcttgtttccgtgggagatgcccacacacctcacttgggagcatcggcagtgttggtacccacacaggtgtgttttgacatccaagacttgaccctaattcttcttggaacctgatggggagagaaccttgctgggggccccacatgggccaggggcagccagggcagagttgggcagctgcctgagagttctcggtggagaggcccggaatatcccacaagaacaagtctccgttagttccaagtggaatgacagccctttctgagtttccctgagttgagagctaatacatgtgttgtgggaacaacagcccaagccaaaggccacgcggaggccaggcgtggtgactcacacctgtaatcctagcactttgggaggccaagatccacggatctcatgagctcaggagttcaagaccagcctggtcaaccttgtctctacaaaaaatac

SEQ ID NO: 150 - DNA, 2239 bp, Homo sapiens
agtctggctggcccccggacatcctggccgcctacaggctgcagcgggagcgcgacttcgaagacccctactccggggggtcgtccggctccgccgccctcgccacccctgtcgcccccggacccacgccgcccccgcgccacggctctcccccacaccgccttattcgggtcgagaccccggggcccccggcgccgcctgctgatgagcggatctccggaccccccgccagcagcgataggctagctatcctagaagactatgcggacccgtttgatgttcaggagactggcgaaggctcagcaggagcttcaggagccccagagaaggtccctgaaaatgatggctacatggagccctatgaggctcaaaagatgatggccgagatccggggctccaaggagacagcaactcagcccttgcctctgtatgacacaccctatgagccagaggaggatggggccaccccggaaggtgagggggccccctggccccgggagtcccgcctgccagaggatgatgagaggccccctgaggagtatgaccagccctgggagtggaagaaggagcggatttccaaagcctttgcagttgacattaaggtcatcaaagacctaccttggcctccacctgtgggacagctggacagcagcccctccctgcctgatggggacagggacatctccggtccagcctcgcccctccctgagcccagcctggaggacagcagcgcccagtttgaaggaccggagaagagctgcctgtcacctggccgggaggagaaggggcggctacctccccgactctctgcagggaaccccaagtcagccaaacccctaagcatggagcccagcagccccctgggggagtggacagatccagcactgcctctggaaaaccagctggtatcacggggccatcagccgaaccgacgccgagaacctgctccggctgtgcaaagaggccagctacctggtgcgcaacagtgagaccagcaagaatgacttctccctctccctcaagtgagtggggacagttgtggtttcagggacagcaagcagggtggaaggggactccagtattccccttatgcccaaccaagctggggaggtccccatcccccatgaacaatccccaggcactgggggtcctgagatgtctgagactcagcccctgctctcaaggagctcagagtccattgggagaaatagttgatccgcagcatccagctcagaagggttctgttctagttgtgtggcctggcccccttaacctctctaggcctcagtttccttactaatgaaatggatgggggataatatagggaaggattaggtgaaataatgcatgggaagtgcttagcatagtgctaagggctcaataaattatcactgtcattattaatggaagcccaagatgttctagaagcataggcaaggagataggagctttgcgtgagggagtctgtagggtgttggcgggggctggttcctggaaggagggcagggcagtggacacaaagtatttctgtttactctgaggaagagtgtgtgtgtctgtgtgtgtgttcggggatggggggtgtctgagcttttgggtcctggaagacgtagaggaggcaaggccctccctccccatcaggctttcctcccaggagcagcagatcagcctcccagactccctggtagcatggccagccctgccctgggcaaccaggagttctgcctggtagaccctgcaccccgttaggaagccagtggggtggtatgttcatttgccccccaccatcactagtaggacacctgcaccactttctaccacattctctgggaccatcagagtacagatataccctcccattcagacaaatccaatctatgggaacttggggctgctaaacaagacatatttgggggataattattcaacttccctcaaagataatagaaaaagtggtgggtgtgttggctcacatctgtaatcccagcactttcaaaggccgtggcaggtggatcacctgaagtcaggagttcgagaccaacctgaccaacatggtgaaaccccgtctctactaaaaatacaaaaattagttgggtgtgatggtgagcactggtaatgccagctactcgggaggctgaggcaggaaaatcgcttgaacccaggaggcggaggttgcagtgagccgatattgcgccattgcactccagcccaggccaacaacagcaagactctgtctcag

SEQ ID NO: 151 - DNA, 2245 bp, Homo sapiens
attcattcaacaagtttttttttttgagacggagtctcactctgtcacccaggctggagtgcagtggcgcaatctccactcactgcagcctccgcctctggggttcaagcgatcctcccacctcagcctcccaagtagctgggattacaggtgcacaccaccatgcccggcaaatgtttgtatttttagtagagacagggtttcattatgttggccagactggtctcaaacttctgacctcaagtgatccgcccgcctcagcctcccaaagtgctgggattacaggcgtgagccaccgcgcccagcctcaacaagtatttattagcaggtgttcggatcgggcagagacatggtcccctttccctgcagataggtgaagaaaagcaaaatgatcaacatggaatttgcaagtaaccaatgaccgtcagattccatttggagaaggcaggtgtctctaaggccagggctcaggggaaactgaggcaggaagccctggccgctgctgggatggggctcggggcctgggatggcctgtaatcagctttttcttcccggcagcgcccgcaagcgtcctattccatactaccggcccagcccctcttcctcctccagctgcttgagcagcgactactcgacccggagccacagccgcagccccagccccggccacagccacgggagctacagcagtcgcagccatgggacccgcagccggacacgcagcccctcgaggacccccagtcccagctaccacagccggagcagctctgagagcgggggcttctgagcccagacagactcagcttggtgcccccctggcactgggagaggcgaggggcgggccccaggaccccagtggggagggggctatatctccttgcccccaaggctacaaagaggtctcagggccagtgcacgggcagatgggaccggggaagactttgagggtgggcatccagtggacaaggagaagccagatgtgctgcttctacgggtgtcctctcccacctcctgtccacccactgtgcccggggaacaaagagccgttacgaacacaggaatctccccatcccccttcctgctgatgccaactcaccaggcttgggactgctgccggtggatggtaccagagtccatgatctgctctgtcacttcaccttagctcagtgcagccagggacaccttgcaaggtgccagccctgggagcccctcttccgcactacacagctccctccactcctctcttatcactgggcagacgaggaggtggtacagcacatgggtttggagctagacagaaggaagaacagcctaacccttggtgcacccccatccaagctggggagctgcatccttttgagctggctgcaggaggaccctggctgagggctggtggctggccccacagcctcccccaagctcctccactgacccaggagtgcccagacgggtggcccccaaaatcccagcctggggagctaggcacctcactcttggtctgacctctccaggccaggctctcctcaccccatgccctgggccaaggtcctaccagccatgactactgcatgacaagaggtggggggtacagacctcaggtacatttgaccctgaggttaaaaggggttcaggtcaagaggtgggagaggaaaggggtagatgggaggtggaatctgtaggaaagagaaaaagcaaagtcgttcactgactgagtagcccccagggagtggagacgggtccctggggagggagcagctgacaggtcagcagtgcccccagccccacccaagaggagggcagcgtgtgcctgtggtctgggacgtgggctggatggcagcccagggtcacaggcataggataacatgtgctttggacctgacaagggagtaccttgggggtctgatggggtcatggccagccgagcctctgtagagatggaggctacagccctcagaagggaggggaggaaagagactgagggccctggcctggggcgtcgatggggaagcggtggcccccagtcctcttctgctgctcccagccccctcctcctggggccctcagggatctcatgaagtcttccttggcccaaccaggcagatgccccgggctccagtggggggaggggtctggggtctggtccgggttccccgctttctctatgtcccccctccctctttctccgcagtgcggataaaaattggactcgaataaaacccttggtgcccggatggtaggtggtgag

SEQ ID NO: 152 - DNA, 1959 bp, Homo sapiens
atcacttggctcttctctgatatgaactgggcagcatctaaatgtatctttcttgattttgttgtctctttgcatagagcatatcttgtgaaaacagaaatatccatgtaatggttttttcttgtagtgaccgctcgaaattgcttgagcaacatagagataatgggcaggggtccctgtgtgaagcacctagaggctggaaagctgatggcaaagctggaggggtgaggcagggagaggataaacacagtggaaatgcaggaggaaagctgtgctctgtggtggcctaattacaaggacctgccctacagccagaatcagccagcaaatgcttttgtaaaggaactaaaagaaagggaaaagaggaagtaaacaaaaggtcccttttcagagagggaaccagtgggagacttaagagcaaggaacaacccatttcgtcgttatggtaagtggagattattccttgggcctgaatgacttgaatgtttccccgcctgagctaacagtccatgtgggtgattcagctctgatgggatgtgttttccagagcacagaagacaaatgtatattcaagatagactggactctgtcaccaggagagcacgccaaggacgaatatgtgctatactattactccaatctcagtgtgcctattgggcgcttccagaaccgcgtacacttgatgggggacaacttatgcaatgatggctctctcctgctccaagatgtgcaagaggctgaccagggaacctatatctgtgaaatccgcctcaaaggggagagccaggtgttcaagaaggcggtggtactgcatgtgcttccagaggagcccaaagagctcatggtccatgtgggtggattgattcagatgggatgtgttttccagagcacagaagtgaaacacgtgaccaaggtagaatggatattttcaggacggcgcgcaaaggaggagattgtatttcgttactaccacaaactcaggatgtctgcggagtactcccagagctggggccacttccagaatcgtgtgaacctggtgggggacattttccgcaatgacggttccatcatgcttcaaggagtgagggagtcagatggaggaaactacacctgcagtatccacctagggaacctggtgttcaagaaaaccattgtgctgcatgtcagcccggaagagcctcgaacactggtgaccccggcagccctgaggcctctggtcttgggtggtaatcagttggtgatcattgtgggaattgtctgtgccacaatcctgctgctccctgttctgatattgatcgtgaagaagacctgtggaaataagagttcagtgaattctacagtcttggtgaagaacacgaagaagactaatccagagataaaagaaaaaccctgccattttgaaagatgtgaaggggagaaacacatttactccccaataattgtacgggaggtgatcgaggaagaagaaccaagtgaaaaatcagaggccacctacatgaccatgcacccagtttggccttctctgaggtcagatcggaacaactcacttgaaaaaaagtcaggtgggggaatgccaaaaacacagcaagccttttgagaagaatggagagtcccttcatctcagcagcggtggagactctctcctgtgtgtgtcctgggccactctaccagtgatttcagactcccgctctcccagctgtcctcctgtctcattgtttggtcaatacactgaagatggagaatttggagcctggcagagagactggacagctctggaggaacaggcctgctgaggggaggggagcatggacttggcctctggagtgggacactggccctgggaaccaggctgagctgagtggcctcaaaccccccgttggatcagaccctcctgtgggcagggttcttagtggatgagttactgggaagaatcagagataaaaaccaacccaaatcatt

SEQ ID NO: 153 - DNA, 2151 bp, Homo sapiens
tttttctgtgcgtcgactggggctccggcaggccggggtagtgctctcacggatactttcaaaagaggccgctgtcttacgagggaaacttaggctctgcctgacatccagcgacagagacggaaggggtcgcggcggctcgcgggcctgggctgcgcggcccaggtccaagtccccagcacgcgcattgggaccgcagcgctgccggcagcccgatcccgcgctctgcaaaccgtgccgcggccccccagagagggtcactcgctcctatttgggtcagccctttccagcagctactgtgtggccggcccggggccagcgccgcccgggtacctcgcggggcgggagggagcggctgagccaggctggcagcagcgcggtcgctggaaactgaggcttcatgcggggacccggacagagcgggggctccgttccagaaagatttattggcgccccctataacccgggccggttcttggtgccgggcacagagatgcattgcgccacggccctgctcgcggaagctcccgagggcccggaatcggcagggcagtcagagagggcttcagggaggaggcagctagagctgcgaccggaaggtgaggtgagggtcatcccccccggcgcaaggaggagtggacccatggaaggacaggggagcagcagaggccaggcttctaggggctggaatgtcacacccagaagttagacattcagctggtatttgaggacctgggaactgacttggagtgtgtccctcagtggacaccagctagagtcaggaaggtgggagttggctgctgaggagcctagatacggaatacactggagtgagcagaactgggggatagggcagcgtcccacagaagaagtgaggaagtctggggccattgcattgaccctgagggaggagggccctactccggagcctgtttccctggcctccccaccccatctgtttgcctgaggctgcagcaaaaacaaagcaaagaagatactcaattggcaggagataagcccagataagaggccgccttcccctggaggagggatgcaggcgggcagcctgggaagagccaggaagctgggagaggccttgaagaggtgccaagccgaccctgctgcgagcccagccccgccctggagcccgcactgtgggctctctgccacttttcgctggtcttgaggcatgggacaggtccaggctggctgaagacagtccaccacggagggtccaggcctgccctgcctccaggtcaggacgtcttgacttagctgtggcctagcacacgacagatggctccgggcctcagtctcctcatctgtaaaacaggcataacatctccctcacagggatgaggggatgctgggtggcccagcccctgcgtgtctgtgactgtccacttcccttcccccagagtcacaggcaggcctactgcccacctatttctgaagacccaggtcccccggtgttgggcaggttctgagctgccctgctccaccctggccgatccatcacctgatagagtcaactgcctgtcgggggctcagagcagccccagcggaagatgctaggcgtttgggtcatatcaggccacaggaagcggggcagggaaggcttcctgaagcagaggcctgagcctcagaaaagagagaacagggagagcctcggagagacgaaagtcatggggatgggggaacaggaacagcggcttgggggcagagggcacaagcagaaggccacggaagctcagcagactcggcagggcaagctcaggttcaacccagcagcccttggctggaggcgtgacctcaaccccaccaaatgcccaaagtccattttatagatgaggaaacttagggcccagagtcctgtcaccccaaatcacactgcacacagggtccctgaaatccacttttattcatgtaaaaaaaatccccaaagaatagagaaaaaaatgtgactcctacttcccggagctccaagtctccagccagctctcccggggaagggaggagacgctgctagctcgagggtgtgggtgtcacagggagcaaagccctgaccaaggccctaacctaagactgagggcaggaaggaggggccccaggaggatgaagggagttagctgaggtacttgccccgggttt

SEQ ID NO: 154 - DNA, 2072 bp, Homo sapiens
aattcttgtgattctgttccttgcaggctttgagctgctcggagcaggggctggagcagccatgacccgctggaagtccctcaaggcccctgggccacacaaatccagcccctgtcagctggtggcctcacgccggcgtctgagtgccccggccctggctgcctctttctggagggtccaggaatctggggctgagcccccttcccagcacagcctcaggggtcccccctgctgccggctccctacttccaggcccaggcagaagcagtgtccaccattccggccctgcgtcccagctcctcagcgtcatggtgaggtggtcagccacagcggtgttgggggaggacggcagagtaaggaaaggcatccctgcagagcttgggggcccatggtgggggacggcgttagaggtggtttaaaactcaactctcctgcttaatggctgtgtggcctgggggaagtcacttaacttctctgaacctggatggtggctgcacccccgggttgttgagacggcgatctgagggcagctgttgatggatctgtcccccaaggcgcccaggaccccgcctgctctccctgtgtctctctcaggcggcagttgctgtgtgctgctcggaccagcgggctcggggctaagcaaccaggcagcccctgggagtgttccacagcctggccgggcaggcggctccaccatcacctgttgctcaggtgtttggagcagagctcagaggccgcacccgctccgaggcccagactagtgtggacgtggccagaagctgggtcacacagaccggggctgagtcctggcattgctgcctcctgcctatgggactgggacaagtccattctggcttctgggcctccaggtccttgtttgtaaagcagggtggcccacccctccctggagggcttgagaggcctgcagaaggctgtgtgcagcgcctggttcacagtggtgccatccccccaggatgttctcttggggcctcagtgtcttcgtaactgagtaatgtggctgcaggtgtgctaagggagaaggctttgtctagctctgaggttatggtgtgactggactgggactgggggtgctgggtccctgtgggcggggaggggtgggcctgtccagctcctccgtcggggctaatgctggaaggcccaggtctccctgcttccagcctagcccagccaaggcaggctgccatccagatgtggctgtgggccaggcggtgccatagcccctagcttgcagatgccctagcctgtcactgacaggccagtgtggggcctttagtgggggcagcacagcctgtgtgtcccgggggtgggcacgtcagtggctgagagcaggctttgttctggctggcatggatgccctgctgcggggcctgtcctggggtgcctgaatgtgcagtaggctggcctggagccaggtgctgcctgcagtgagctgagggtggtgctgggaacaggtgacacccctgagcactgcccaggtgctagggtagcagccttgcaatcttccttagagatgcgggaagcaggggctggggagggccctcggctgaggtcagccagggagcagcccatgtctgggtgccagatcttaccctctttggcactgctggtgaccaagaagctgcaagcatggcatgtgggtggacactgtagagtggggcatgtgggtgtcaggagggtggtgggacccagcttggggtgttcaaagtgggtggcgacaggggtggcaggccgcattctaggccctgggaaggacaacaagaagcaaaagagaaaacgtctcacgcctgtaatcccagcacttcaggaggccgaggcaggtggatcacctgaggtcaagagtttgagaccagcctggccaacatggtgaaaccccgtctctacttaaaatacaaaagttagctggatgtggtggcgggcacctataatcccagctgctctggaagctgaggcaggagaatcgcttgaacccaggaggcggagatggcagtgagctgaaatcgcaccattgcattccagcctaggtgacgagaggaagattctgtctaaaaaag

SEQ ID NO: 155 - DNA, 1910 bp, Homo sapiens
ggccaagtcaaaggcaattatggccaaatatgacctggaggctcgccaagctatgcaggaacagttgtctaagaacaaagaactgacacagaaactccaggtagcctctgagagtgaggaagaggagggaggcacagaagatgtggaagaactccttgtccctgatgtagtgaatgaagtgcagatgaatgcagatgggccgaatccctggatgctcaggagctgcaccagtgacaccaaagaggctgcaacccaggaggaccctgagcaactgccagagcttgaggcccatggagtttctgaaagtgagggagaagaaagaccagtggcagaagaagaaattttgttgagagaatttgaggaaaggcgatcccttagaaaaagatctgagctcagccaagatgctgagccagcaggcagtcaagaaacaaaaggtgagctgtgatcaaatggaagagggaaattcctagtgctgtggacagactatgggagaaaaaaaaaatgtgtccacccacacacaaaactgcatagtgattaggcgctggggacttgcaagagtgcgtacactggatccctgaagagaaattagattcataactatttttcttcgaagacatttaataagcagtcatctgcatggccgtgcaacgtggttcaggcacattttctgttcttgggggcttacagccttcagaaacccataataactaaaccatactcgaagtcagggtatgagttagcgttcctggtacctacacaccagggagaagtacgtatggtagaatggcaaatctgaaagtccattcacacctgtagacacagataggtcaattttgagacattaggaaacattgtctagttgctggatttttttgttttgttggttaagtaggagtggcatttttagcacttcttaatgctagttgatgtgtgtatacatggggtgagactttacggaatgaatgactccacagggccacatggcaaattagaattgtgactccatactcaggctctatttgtatgttatattttctacctgttatcttgaagagatcttattgacaatgttagcacctgtgagattggtcagagagttcccattctggcaataaaccaggacactaaaagacctgcctaggaaactagctacattgagaaatcacttggctatctggacaaattaccaggtctggtttggtttcacataggaatgcatttagatgatggcaaaaatctggttttacacggcaaaagaattatttttttctacttttttttgtttaagagacagggttttgctctgtcatccaggctggaatacagcagtgcaatcataccttactgcagcctaagacctcccaggctcaagcgatcctcttggctcagcctcccaactagctgggactacatgcacgtgccaccatgctgagctaagtttttgtagagactgaggtcttgctctgttgcccaggctggtcttgaattcctggcctcaagctatcctctcacctcagcctcccaaagtgttaggattacaagtgtgagccaccgcacccagcctccttttttttttcctttttttttttcaggtttccacatacaaaaatttattttaaaagagctatcatttagaatatattatagggacctttacttaatagttttggctggatatttttgggattaataattgcaagtagtcacttctgagagaattttggaaagcagcacagcgggctgagattgtgggggtgtacatatatgaccacaggaccctagtggctttctcttgagccccctcaacaactggccatctagctaaatgtgcagagcggctgactgtgatatgaaagaatgaaagatagatttgcatttccttggacagtaaataaattgaattttctcac

SEQ ID NO: 156 - DNA, 1522 bp, Homo sapiens
ttttttggttttgttttttgtttttctgagacggaatttcactcttgttgcccaggctggagtgcaatggcgcaatcttggctcactgcaacctctgtctcccaggttcaagtgattctcctgcctaagtctgggattacaggcatgcaccaccacacccggctaatttttgtatttttagtagagatggggtttcaccatattggccaggctggtcttgaacttctgacttcaggtgatccacctgcctcggcctcccaaagtgctgggattgcaggcgtgaagcaccacgcccagcctgaaataatattttaccttttactttgtgctttttgtgttttactcaggaagtcctcccctacatctgttttcttctgtatttcttttcatatttaggtctttaatccacctggattttttgtttgggtttttgttgttctttagtcaaagatccaattcttttttctatttaaataaccatcattgactgactagtccatccttaccccacccctactgattatgatgtcactgctgtcacatattgtcatacgtggggggctgttactgggttctccagtctcctccctttatctgtttgtgtatccctgtgctggtgccacactgcctcgttcactgatgtttttaataagcctgcaccatttgtatgtcaattcttcctgctcttcttatccatcaaaaatcactttaacttttcttgttcctttactcttccatataaattgtttattcaaccatcaggttccaggaaaaagcctgttagtattttcattggacttacatggaatttgtagattttgaaaaaacagatatttttatgagtcttcctattcataaaaatagtatgtctccatttacttatgtctttaagtgtatttcagtaaagctttctatcttttccacattggtcagctcctctttttattagaattattccctagcatttcatattttctgttgctgttgtaaagggtaattttacatttttatctattactgatataaagaattgtaatttatttcacatattgatctagtattaagcagcatgctgaattacttaattctatatgactataaactttgcagggacttgctgttgcccaggctggagtgcagtggcgtgatcatggctcaccactgccttgacctcctgggcccaagcaatgattctcctatctcagccctctgagtagctgggaccacaggcctgtgccaccactcctgactaatttttctgtactttttgtagagatggggttttgccgtgttgcccaggctggtcttgagctcttgggttcaggccatctgcctgtctggtcttcccagagagctgggatgacaggtgtgagccaccacacctgtcttgttgaattttctataaacagtcatacaatttgcaaaagaaaacaaaaactttagttccttgtgtggttcctaaggcctccaataaaacaaagtgacaatagcagcctgggcgacagagtgagactccgtatcc

SEQ ID NO: 157 - DNA, 2178 bp, Homo sapiens
cgtttgaatcatttccttgggggtcttccctgatgccctgtgctgctcccagagcctgggtcaggttgtgggttgttgtgtgtgcatcataagttggttctgggctcctgggcatctgggcagagccatctgtgtagccagcagtgtcttgtgcccatcatgggcccttggtagacagggaaagtggcagtgggtagaggctggcttctgggtaaggtgtcgaagaggctgtgggctgggtcggggcggggtgtgaagggggcatgcagggggcttggcatccgctgtggcaggctgcagtagacgagacccccccccagctcccagttcagatagtgacgtgtaggggtatcctgggggtgcatgtggcctggactgggcatgggcacctgggatggtctgggttctcagggagctgttctgaagagtggtcacctgcagggccatctccccttggggctgcctgtgcctggggagttggggtggaggcgtccattgcaggccgtggctctgtctcctgtgccctccaggcttcagtcatggggatgcaggtgggcactcctgcatcaatcatggggatgcatggccacggcccccagtgggctcccttctggcaactgccccactttctagccttctgctgccccccactttcagataggctggctctatgtgttgggttcccttaggaaagactgtgccccctgggccttgtgccctgatatctgaccctgggcttctgacttcacggccagggtcagaatcaaggggatcagggttgggcttgagtgcagccctgggatacagctggggcctgctttgccagctctgcttctctgcatttctggaggtgggggtctgtgtgccaagtgatcttgaacacagctcaggagctcctcgtggagatggccttacggtcagggaacaggtgcccattcctatttaggatggtcctggttttaagtgaatatggaggattttcaaagaggtttgaataaaactcaggcgccgtggtactttgtctaagcctggttctccaaccccagactgtccccgtgttgtctgaagcagacccctcaggttggtgagcagggtgctctgtggccgagggctgggtgggctggcctttgcagtcatctcaccatcttcacgagcttctctctcttcagtcacgccgatgatggagctgaagcccaacgcaggtagcgaccgtgcctgggtctggaacacccacgctgacttcgccgacgagtgccccaagccagagctgctggccatccgcttcctgaatgctgagaatgcacagaaattcaaaacaaagtttgaagaatgcaggaaagagatcgaagagagagaaaagaaaggtgacgtggtgccatgggttggggggcttctttgcagactcactctgcatctgactatacttccaggcgggtgctttttctgtctgccagataaacattccagggtgctgtggccgcctcacgtatccagagtgatgcagctccctggggacacaggtgcttcctggggagccctgagcacttgtcagtgttgctggcctcagtccaattgggcaggcattggagtccgggcactgcctggagctcaccagaaggtgctttatgatggtcctcggtttgtctctcagagggcttggtcacctctgccatgaggctggactgcagctgtggtggcaagtgaccagatgtcactgagcagcctgaccatggtctaggcagtgcttgagtgcatccacctggcttcctttcgtcactgaatttcaagaagacagactccaggaggcggcttggccaggcaggagtctgtcccgagggcgggcaagccgctgtgggtgggtgacggcacttgggaccagcctggcgagggccatgtgcttgaatgcaccgtgcttctgttttctcactgtgctgcttgtgtttttagcaggatcaggcaaaaatgatcatgccgaaaaagtggcggaaaagctagaagctctctcggtgaaggaggagaccaaggaggatgctgaggagaagcaataaatcgtcttattttattttcttttcctctctttcctttcctttttttaaaaaaattttaccctgcccctctttttcggtttgtttttattctttcatttttacaagggacgttatataaagaactgaactc

SEQ ID NO: 158 - DNA, 2158 bp, Homo sapiens
agtcctccagtcctccgtgcgcgtcgggcccgagcccacagagtccatggaacccacggagccgatggaacctacggagcccatggaacctacggagcccatggaacctacggagcccatggaacctacggagcccatggaacctacggagcccatggaaccggcgcggagcgcgcaccgtgggggcgaggcgctgctgcgggagctggaggtgctggtgcaggacgtggtgaggacgagctcctggtgggagcgccacggcgtggactgcgccatcctcgcgctcagcctcttcgccttgccggcaggcttcctgtgcctgcgctgggagaatgccctggtctttgcatccggcatcaccatcttgggtgtgtgccactacacactcactgtcaagggcagccacctggccactcatggggccctcaccgagtccaaacgctggagcaagatctggctgcttttctttgtggaggtgtgcacagccttcactgcagagcacgccacgcatgggcacgtcaagatgcaccatgcctacaccaacgtggtgggcctgggggactccagcacgtggaggctgccttgcctcaaccgctatgtctacatgttccttgctcctttcctcctccccatcgccactccactggtggctgtcgagcggctgaggaaggtggagctcgggacagccctgcggacgctggccctgatttctctgggcctttattctcactactggctgctcctgaacgtgtcaggcttcaagaaccccagctcagccctgggctgcatgttcctcaccagatccctgttggcccacccctacctccacgtcaacatcttccagcacatcggactgcccatgttctcccgggacaacaagccccgtcggattcacatgatgagcctgggggtgcttaacctggcccggctgcccgtgctggactgggcgttcggccactcgatcatcagctgccatgtggaacaccatctattccccaggctctctgataacatgtgcctgaaggtggagcccgtggtgtcccagttcctacgtgagaagcagctaccgtacaacgaggactcatacctggctcgcttccagctgtttctccgtcgctatgaggaattcatggtgcaggccccacccatcactgagcttgtggggctgtaatgaggccgggccggtgcagccaccctgcccctccctggcctggccctggccctcctgctgctgctggtccagggggtgtggctcagtggctggtggtggacctggagagtggaggcaccggccaggcaggggggcaggggagctcaggcctggggtctgggggccacctgccttgcgtgcttttctgggttttgaggggtgtctgggggaagcggtaatggtggctgtgcattctggtcagtctggacctcagcaacttcatctcaggactaaagagctgggtccttccccctgctccatctgagccttggtagggttaaagggaggtgacagggtgaagagggatcctgtgcaggggccacctgggagatagcagggggcacagagagagcagggtcagctccctcggctgggacctccctggcattgggagagccccacacggccttggctattgcttccttcaggctctgcccaccaaggtgccctctccccggggaccttagggtgagcttgcttttggcaggccttcctcgatcctcagccaaaggaacctgtgcaagacactggctcagcagttccccaggccacagtatcagcaagataaaagtgagtgtgttttgtcgggagggaactccaggggaagtgaggggagaaggttccccagggacagagttagggaaagagtataaatagccagccaggggcggtggctcatgcctgtaatcccagcactttgggaggccaaggcgggtggatcgcgagatcaggagctcgagaccaccctggccaacatggtgaaaccccgtctctactaaaaatacaaaaaattagctggatgtggtggcatacacttgtagtcccagctacttggcaggctgaggcagaagaatcacctgaacccgggaggtggaggttgcagtgagccaagattgcaccattgcattccagcctgggtgacagagcgagactccatctcaaaaaaat

SEQ ID NO: 159 - DNA, 2245 bp, Homo sapiens
aaaaaggaaaacgaggcaccgagaagttaaggaacttgctcaaggtcacagagtttgaactcaggctacagatgctgcagcaactggagaaagtcctcatcgccccatatcacccaccaccgacccccagcaggacgtgacccccgccaggacggaggccggcagctggggggctggagcatgggacccagaacacggactcaggcttgcgcagcctcctggcttctaggcgggagcctagaaaggcgccagcccctttcgcgtgctgctgagactccaggggtggggttcactctcaggggcgcacaaaggcatgaaaaccttggcttcagcctctgagatgcggaactgaccgacctattgtcttgggacccaccagtgcgcttgggtgcaccagcccccttaacgttggtgccggctccctcccggctcctccccatcccagagggtcccctcgccccaggccctgagcctgcgtcttggggtcctgggccgcacgtgcctctggcagctcgaagaagctgtcggggcttgcaggagagcgtgcaaactgaaaccaaaacaggccgactcgaggaacatccgggtgggaccgcagactcaccggagcgcagcgcctgggccagggcctgggaccctgctccgccccgcgctcccctgcaccccttccccacgctgctcccctcttcctaagcggccccccctctcccgggcagcagaagaaggggtgggacccgggcgggctccgggagggggccctggaggaatggatggtggcggaagggcggagcaggggcggggcccgcggagactccacggggcgccccgggcgcgaggcacccactctgggagcacagagagctcaggtagcctgcctagatggcggcgcgcaccctgggccgcggcgtcgggaggctgctgggcagcctgcgagggctctcggggcagcccgcgcggccgccgtgcggggtgagcgcgccgcgcagggcggcctcgggaccctcgggcagcgctcccgcagttgcagcagcagcagcacagccaggctcgtatcccgcgctgagtgcacaggcagcccgggagccggccgccttctgggggcctctggcgcgggacactctcgtgtgggacacaccctaccacaccgtctgggactgcgacttcagcactggcaagatcggctggttcctgggaggccagttaaatgtctctgtcaactgcttggaccagcatgttcggaagtcccccgagagcgttgctttgatctgggagcgcgatgagcctggaacggaagtgaggatcacctacagtccctggttgcagatgccgtgtggcccataggccagcagcattcttctgccctggatcctcgggccccactggacaactgagcggccccccaggtggcccctgcacattggagtgtgcttggctctgaagacccaagctgctgcagctgcccctcgccacggtgggcccagctccatctgcctgcgaacaaagccccttctgagaaggaacttgaggctgctgcccctggagtagttcttcagtaaaagatgaaaaccctctgttgggggtcgggggctaaggagctaactggacacctggaggtccggcagggagggcccagccatggcactccccgaagggccagtttctctccatcagtctctcaggtgtgcctggaccctggggcaggcaggttgtgtgccacgccccctcggctggacgctgcccatgggagcactgagtgtgtgctaagtagcggttcggtctgtgagcggggctggagccctgtggagacgtgtggttaaacataaaccatgtgagaattctcaggaccacagccagcctgtggaagctaaggacagcttcaggtccatgacactgaaatggccctggcaaagtacttattactctgtctctaaaaataaacaggggccggtcgcggtggctcatgccggtaatcccagcactttgggatggtgaggatcacttgaggacggtgggtggatcgcttgaggtcaggagtttgagaccaacctggccaacatggtgaaaccccgtctctactgaaaatacaaaaattagttgggtgtggtgatgtgcgcctgtagtcccagctacttgggaggctgaggcaggagaactgcttgaaactgggaggtggatgttgcagtgagccaagattgtgccactgcgctccatcctgggtgacagagtcagactccatctcaaaaat

SEQ ID NO: 160 - DNA, 3347 bp, Homo sapiens
tcgggtgacagtgttcagtactcatttcatggatgaagctgacattcttgcagataggaaagctgtgatatcacaaggaatgctgaaatgtgttggttcttcaatgttcctcaaaagtaaatgggggatcggctaccgcctgagcatgtacatagacaaatattgtgccacagaatctctttcttcactggttaaacaacatatacctggagctactttattacaacagaatgaccaacaacttgtgtatagcttgcctttcaaggacatggacaaattttcaggtttgttttctgccctagacagtcattcaaatttgggtgtcatttcttatggtgtttccatgacgactttggaagacgtatttttaaagctagaagttgaagcagaaattgaccaagcagattatagtgtatttactcagcagccactggaggaagaaatggattcaaaatcttttgatgaaatggaacagagcttacttattctttctgaaaccaaggcttctctagtgagcaccatgagcctttggaaacaacagatgtatacaatagcaaagtttcatttctttaccttgaaacgtgaaagtaaatcagtgagatcagtgttgcttctgcttttaatttttttcacagttcagatttttatgtttttggttcatcactcttttaaaaatgctgtggttcccatcaaacttgttccagacttatattttctaaaacctggagacaaaccacataaatacaaaacaagtctgcttcttcaaaattctgctggtgagagtgtgtgaagactcagatatctgtgatcttattagctttttcacaagccagaacataatggtgacgatgattaatgacagtgactatgtatccgtggctccccatagtgcggctttaaatgtgatgcattcagaaaaggactatgtttttgcagctgttttcaacagtactatggtttattctttacctatattagtgaatatcattagtaactactatctttatcatttaaatgtgactgaaaccatccagatctggagtaccccattctttcaagaaattactgatatagtttttaaaattgagctgtattttcaagcagctttgcttggaatcattgttactgcaatgccaccttactttgccatggaaaatgcagagaatcataaggtcttttgccatctgcatattggattggacaagctgttgttgatatccccttattttttatcattcttattttgatgctaggaagcttactggcatttcattatggattatatttttatactgtaaagttccttgctgtggttttttgccttattggttatgttccatcagttattctgttcacttatattgcttctttcacctttaagaaaattttaaataccaaagaattttggtcatttatctattctgtggcagcgttggcttgtattgcaatcactgaaataactttctttatgggatacacaattgcaactattcttcattatgccttttgtatcatcattccaatctatccacttctaggttgcctgatttctttcataaaaatttcttggaagaatgtacgaaaaaatgtggacacctataatccatgggataggctttcagtagctgttatatcgccttacctgcagtgtgtactgtggattttcctcttacaatactatgagaaaaaatatggaggcagatcaataagaaaagatccctttttcagaaacctttcaacgaagtctaaaaataggaagcttccagaaccaccagacaatgaggatgaagatgaagatgtcaaagctgaaagactaaaggtcaaagagctgatgggttgccagtgttgtgaggagaaaccatccattatggtcagcaatttgcataaagaatatgatgacaagaaagattttcttctttcaagaaaagtaaagaaagtggcaactaaatacatctctttctgtgtgaaaaaaggagagatcttaggactattgggtccaaatggtgctggcaaaagcacaattattaatattctggttggtgatattgaaccaacttcaggccaggtatttttaggagattattcttcagagacaagtgaagatgatgattcactgaagtgtatgggttactgtcctcagataaaccctttgtggccagatactacattgcaggaacattttgaaatttatggagctgtcaaaggaatgagtgcaagtgacatgaaagaagtcataagtcgaataacacatgcacttgatttaaaagaacatcttcagaagactgtaaagaaactacctgcaggaatcaaacgaaagttgtgttttgctctaagtatgctagggaatcctcagattactttgctagatgaaccatctacaggtatggatcccaaagccaaacagcacatgtggcgagcaattcgaactgcatttaaaaacagaaagcgggctgctattctgaccactcactatatggaggaggcagaggctgtctgtgatcgagtagctatcatggtgtctgggcagttaagatgtatcggaacagtacaacatctaaagagtaaatttggaaaaggctactttttggaaattaaattgaaggactggatagaaaacctagaagtagaccgccttcaaagagaaattcagtatattttcccaaatgcaagccgtcaggaaagtttttcttctattttggctcataaaattcctaaggaagatgttcagtccctttcacaatctttttttaagctggaagaagctaaacatgcttttgccattgaagaatatagcttttctcaagcaacattggaacaggtttttgtagaactcactaaagaacaagaggaggaagataatagttgtggaactttaaacagcacactttggtgggaacgaacacaagaagatagagtagtattttgaatttgtattgttcggtctgcttactgggacttctttctttttcacttaattttaactttggtttaaaaagttttttattggaatggtaactggagaaccaagaacgcacttgaaatttttctaagctccttaattgaaatgctgtggttgtgtgttttgcttttctttaaataaaacgtatgtataattaagtgaagctgcatgtttgtattgaagtatattgaactatatagtttgtatgtcatctttttcaccattcagaaacagtgcttctgaatttgtgatttaaaggaattgtaatagaatagttttatttttaagttatctttaagtttatgccatcttcttaaataagtacgtaatgttccaatctaaataaaaaactaatacataactaatgcatagaaaagatacataaagc

SEQ ID NO: 161 - DNA, 1733 bp, Homo sapiens
cccagatgcaacttaatctaacactctatactttagattttctagacatacatagaaatcagaccactacttctgcagaacattttactagtaaaaataataggccacgtgagggaaaactgatttggtggaaagacaacaaaaacaaaatatgggaaataggtaaggtgataatatgggggagaggttgtgcttgtgtttcacccggagaaaatcagcttcctgtttggatacccactagacatttgaagttctacaatgaacctatcaagatgcaaatgaaagtgcctctgcagagacagaaaacccgcagtcgagcatcatcgactcgcagggtgaacaaaatggtgatatcagaagaacagatgaagttacaatccaccaaggaaacggcacatgttgggagccagggagaggaagagaaagaaaaagagacagagatcagagagagacacagaaagtgagactggggagagagaccgtaaaagaagggagacaaagagataaaaggtgcgagtgagcaggtgaggagaaagactgaaaactatgagaaacagcaactaagacacaaaggaggtgggagactgccttggtgccgcagcacccacaccgtcctcttgccccgtcacttgggttcaaaccaccggaaattccactattgcaaattttttattaatccttgtatgtctgtcctttctatttttagtctacaggtgtatccagcagctccagagagacagcgaccagcgagaaggggccatgatgatggaggtggttttgtcaaaacgaaaatggggatatgtagggaaaagaaagagagatcagactgttactgtgtctacatagaaagggaagacataagagactccattttgaaaaagacctgtactttaaacaattgctttgctgagatgttgttaatctgtagctttgccccagccactttgccccaaccactttgacccaatctggagctcataagaacatgtgttgtatgaaatcaaggtttaaggcatgtagggctgtgcaggacgtgccttgttaaccaaatgtttgcaagcagtatacttggtaaaagtcatcaccattctctcatctcaataaaccaggggcacaatgcactgtggaaagccgcagggacctctgcccttgaaagctgggtattgtccaaagtttctccccatgtgatagtctgaaatatggcctcgtgggatgagaaagacctgacggtcccccagcgtgacacccataaaagatctgtgctgaggtggattagtcaaagaggaaagacttgcagttgagatggaggaaggccactgtctcctgactgcccctgggaactgaatgtctcggtataaaacacgattgtacatttgttcagttctgagatgggagaaaaaccgccctatggtgggaggcgagacatgtttacagcaatgctgccttgttatcctttactccactgagatgtctgggtggagagaaacataaatctggcttacgtgcacgtccagtcatagtaccttcccttgaacttcattatgacatggattctattgctcacgtttgttgctgaccttctccttattatcaccctgccctcctactacattcctttttgctgaaataatgaagataataatcaataaaaactgagggaactcagagacctgtgccagtgcaggtccttagcatgctaagcgcaggtcccctgggcccgctgttgtttctct

SEQ ID NO: 162 - DNA, 1726 bp, Homo sapiens
attatctcaccatcttaggagtgcctttatgtagttgaattacttaatagattacaggtatgtttttacatatgcaatgtatatgaattatgtagggataggtgggcaatgttttagtggagttttaaattaggaaattataaaatgtgttaacatatttttgtgtcattttaacaggattattcaagatcaggttgtagccattttcaacaaggatcactgatcaaaattttctttttacaaagagatttacaagttaaacatgaagggaaaatactggaatcatttggattctgacaggataaagaatacaatatttcacatttacttgtaatggaacctttgtaagattcatcacttgtcattcacccagttgggaacatggatgttggtttttctcgtactactgttcagacactgtcaagaagccactgcaaaaacatcaaacaaaaaatttctcaatgggaaggaagggctaatggtatatctaatccagaaaagtggtgtccaaaggactttggagtgagatataactgtcaccaagagatccgtcttaagaaaaatcctatagctgagagaaagagcaaaaacttggatgtaaccagccgtgaaaatgtgggtctagatataaatgaaaataccaaaagccatgatcaaagtgagaatgaaaataagaaacatgaatatgacgatacacacttctttaaaaatgaatcagaatccaactgggtatgttctcgggtcaaagaaattgaaagctgtaaagaagatgtcttagatccagagacttcattacctccaggaaacttctatacctcacaaatactgtggaagaaaatagaagcacctcccccagataaactcttaaatttggctttagaacattgtgactcttcagaaaaagaactgaacttcagagttctggatagttcatacggaataaccaagagcttagaaaatatttactctgaacctgaggggcaagaatgtggaccttccataaatcctttgccaaaacctcgtaggacattcagatatttatccgaatctggtgttacgccgtataaagaaagaaactgtgacaaaaaatactgtgaaaataactcttgtgcacaatcttctttggcctcttctcaggaacctgaaccaaagaaatatggtggaaaaatcagaggaagatctaaaaggtatgtttttatcctacagataaagacttgtaggtattttccttacaggattattgagcttctttttccttttcaaaccagtttccatttcccagcttaggtgatgcccctgctttgaacatgcaggtgttgattaatgtggaaggaaaataagaagtgaaaaaagtagaaatgtagtaatagctaagataatctgttgacataagagcatcggaacaccttccattttattaatatatctttaagaatctgggccagcgccaggcacggtagctcgctcctgtaatcccagcactttgggaggctgaggctggcagatcacttgaggtcaggagttcaagaccagcctggccaacatggtgaaaccctgtctctactaaaaatacaaaattagctgggcgtggtggtgtgcacctgtagtcccagctatatgggatgctgaggcagaagaaacgcttgaacctgggaggctgagcttgcagtgagctgagatcgtgacactgcacttcagcctggctgacagagcaagactcagtctc

SEQ ID NO: 163 - DNA, 2089 bp, Homo sapiens
agcctgtacttctaagatttaccaaatacatgaatggaaggacagaaaagcaattaaaaaatcaatgtgccatttgtaagtgcttcaaattcagtctcataaccatgaagtaaaaccactgtcaccatacatgcctctgttaacatttggtagtaattaacacctgccttaccttgagaatgatctttatagtttatgaggttagcactttgatttatgtcacagtgttttctgacaggctcagttattcttgcagtgggctggcttccttcctggagaggtccctttcccatagtgtgttcctatctgctatataccatcagatgtattgaaaaattgttaacagttaattatattagaagtttatcaattggtgtttatgaatcaccaagcattttatgtactgcatcctcataaataaacccctaagatgacactcgcttttggagttggcactacaagatgcacgagaaatacagttgatcctagaacaacacaggtttgaactgcatggggtccacatatatgtggattttcctccacctttgccacccctgagagaagaccaacccctcctcttgctcctcctcctcagcctacttgatgtgaagacaatgaggatgaagacctttatggtgatccacttccacttaatagtaaatatattttctcttctttatgattttcttaatgacatttcttttctctagcttgctgtattgtaagaatacagtatataatacatatggcatacaaaatatgtgttaatcaactgcttatgttattcataaggctttcagtcaacagtaagctattagtaagtttttgaggagtcaaagttatacacagattttcaactgcacagggggtctgtttccctaactcccaagttgttcaggggtcaactaagtagtcaaatgagatcatgtgtacagaaaaaaaaaaaaaagtgaaaccaaaatgctatgtaaatctggtttattctaatagccacttgtcttggggacagtatcaccatgagttagtctggccagagtcacctgctagtccgctttatcagtgtagacttcctgtgtgtggatctgaaagtctagagaacagcatttccctcacacttgcagttacagcctccacaacctcacacacaccctgccatgtaccacaatgtcagaccaagggaataagtgattgaattttaatgaactcttcttactactttcttaggatggctgctctttttctaaagaggttaacactacaaactgtaaagtctgaaaatagttgcattagatgttttggtaaacacatcctgcaaaagacagcaccagcacagttgtcccctattgcttctgccccaagactctccttcctaattcatgcaaaagcctttagtaccgctgaagacacccagaatgaaggaaaaaagacaaaaaagaataaaacagcttttagtaacgttggaagaaaaattagtcagcgagttattcacttatttgatgagaagggcaatgatttgggaaacatgcaccgagcaaatgtgattagacttatggatgagcgagacctgcgactggttcaaaggaacaccagcacagagcctgcagagtatcagctcatgacaggattgcagatcctccaggagcggcagaggctgagggagatggagaaggcgaaccccaaaactggaccaaccctgagaaaggaactgattttgtcttcaaatattggacaacatgatttggacacaaagactaaacagattcagcagtggattaagaaaaaacacctagtccagattaccataaagaaaggaaaaaatgtagacgtgtcagaaaatgaaatggaggagatatttcatcaaatactccagactatgcctggaatagctacattctcatctaggccacaagctgttcaaggaggaaaagctttaatgtgtgttcttcgtgctttgagcaaaaatgaggagaaggcatataaagaaactcaagagacccaggaaagagacactttgaacaaagaccatggaaatgataaggaatcaaatgttctgcatcagtaattttaataaagaaaagcatgctctgag

SEQ ID NO: 164 - DNA, 2778 bp, Homo sapiens
ataagcatcatctccattttacaaataagtaaactgagcttgagagaggctaagtaacttttctaagtttacaaaactagtacaacgattccaatatatattggactggctccaaagcctttccattttccgggagggaggaaaatacaaagactcgtgtacctaccactcagaactagcaaatgaaaatgtgctctcatatttgcttcgggccttttctttcctctggccatgatgaaagcagcagaacatgcagacgcatgaggtccctgctccaggccctcctcagtcccattcccctctcttcgtcccctggggcatcctctgttttgtatttggtgcctcctgctacctgactgtcgtcctcttgccacacgtggatgtgtccggaagcacacatccgtcgcatgcttcacactccagcatgccagcacactgtatgtcttgttgtacaaccgtgtctttccctcatgttggtcttggagctctacccatgttccaacacagagacctggcttatccatgttatttgcctgctctgtggtattctcccatacgaatacaccactgcatatgtacccgttcctttatggaccggcgcctgggcactctttggtttttccttatgaaaatgacccccgtaggccaggcgcagtggctcacacctgtaattccagcactttgggaggccgagacaggtggatcacctgaggtcaggagtttgagaccggcctgaccaacatggcgaatccccctctactaaaaatacaaaaattagctgggcttggtggtgggcgcctgtaatcccagctactccagaggctgagggaggagaatcggctgaacccgggaggcggaggttgcagtgagccaagatcgagccattgcactccaacctgggtgacagggcaagactccgtctcaagaaagaaagacagacagacagacagaaagaaagaaaagaagagagagagagaaagacagacagaaagaaaagaaatagagaaagaaagaaagaaagaaagaaagaaagaaagaaagaaagaaagaaagaaaggaaggaagaaagaaagaaagaaagaaagaaagaaagaaaatggccccatagtgcttaagtcctcagacatgtgtcctggtgctggggacagggcttctgacattctctcaggtcagtatttgcaggtcatccaccttcgacttcaacacatgtgaccagaaaccttcccaaggcagccatccactttgctgtccctccgacggccatggctgaccactgctgctgctgtgtatcctcggtgacatctggccttggcagcctatggatttctgccattctcctggcatgaaatcactccttcttgttgttttaatttgcatttcttcagttaccagcgcagttgagcatcttttcatacacttactgaccattctactttatgctgtgaactgcctttaatttctgtaatgggttgaactgtgtccccctgaaaagacattgaagtcctaaccccctaggttctctgaatgtgagcttatctgaaatagggtctttaccgaagaccaagtaagctgtggttatgagggcgtgctctaatccaatgtgactggtgtcctattagaaaacactggaaatctggatacagtgacagacacatacggagggaagaagatgtgaagacagagagaagaccgtcatcaacaagccatggaatgccagaggccaccagcagctgagagaaaggcctgcacagacgctccccacagccctcagaagcagccagccctgctgacaccttgatctcaggcaccaggaacggcttttataaaacttcaaaataaggctaaagaaaacacaggagaggaaggttgctgcagaagtggagacgctccgaaggcaagatgcatgcaactccacagcagggctgcagccggcccctcagagaaggaatgccagaaatcccctattctctgctgcagccgcaactacagtctcactcctgcactgtaggaagcaacttccttctgcctcccttccaccagcagaaccctaggtgagaggctattctcttaggactcaggctgccacagatggtgactccaggcactggagaagcaaaggtgccacagccatcctaggtttgtcttggtgaacttacaggtgggtgcaagaagttgctaagtctgcagatgtcttagccatacgccagcatcaagtagcccggagaagtgaagcagaagattttcagcccaatttaaatttccacctgcccactacctgagttcttttacacccaggtcagttttgcaaacaagaccctgatatacccaagcccagctgctttcagaaagtaacaccaattgaagcaccacggtatttatcagagtaaactctgatcaaccagatatagtattttataaaccagaggttctaattataaaagacaagataaaagcagattatgaaaatagcatttctgttctggtgaaaaacacatcttcaaccccaaaatgatgtgaaaattgtcttccaaatcctgccctgacagaatcactgtctatagcaacagtgtccataacattccaaatctcaggagtgtaactttctagtaaatggtacatctgtcaagccacaggaaacatctggtaaaatggttaaataaaagcagaatttaaacttttctgatttcagagcttactaatggtactcaacaagagactatcaaatactctaaaagctcaatgtgacagtgaaaaatatcctggaggggaccaggtgag

SEQ ID NO: 165 - DNA, 2950 bp, Homo sapiens
attatctaggtctcggaggatggagaaatcaaaagtgccattttctggccatttagaaccattgtcgagtttgtattggggccaagcagtgttgcagaagaaaataagacatttagattttagttcaggtgatagttgaagaaattttaagttcttgagaacacaggctaagggagaagaaggaggaatggagggtggaagtttgcccatagtgaaggaggcaagtttaaagagaaaggtagagacatggagaaagggttggggagcagccctgggctgcaatgtgggtgagcagccaaagcaggcatccccgcaattgacttgccaccaagggaatgtggttgaatgaccaaggcaggcatccctgaagatatcagacgccaatggaatgtgggtgaataatcaggcaggcatccccggaatgattaaacactaagggaaggctgccttcctgagtacatgaccagcaccagagttttgggtccatggataaaatgtgtctcctttgtctctactagaaaatgaaaggaattgaaattaagagaagagagggagtgaagggtggcaccaagaatgaaaggagaaagaggttgagggatagtgagaaaggttggagaagagagtaaaaagaggccacttacccgatttaaaatttgtgagatgttccttgggctggttggtctgaggaccaaaggtcgtaggtggatctcttcatggagtgagggtgaggacaggggacagtctcctgaaggagtcctgctgacctgggtctttggcaccaaatgtgtcatgcatccatgtgaagagaccaccaaacaggctttgtgtgagcaacagggctgtttgtttcacctgggtgcagacgagttgagtccaaaaagagagtcagcccagtctatatcttttaaatgggaaaattcaatctatttacatgcaacgttattcttgataggtgagtacttacatctagcattctattattttctgcttgttttgtatatcctttgttccttcctctcttactgtttacttttgtggttgggcagttttctgtagggataagatttgagtcttatctctttctccctatgtgttagctttaccagtgagtttttatagtttcacatatttttatgatgctggttatcatcttctctgtggggaacaggccccccaaaacctggccataaactggccccaaaactggccataaacaaaatctctgcagcactgtgacatgtacatgatggtcttaacgcccacgctggaaggttgtgggtttaccagaatgagggcaaggaacacctggcccacccagggtggaaaaccgcttaaaggcattcttaaaccacaaacaatagcatgagtgatctgtgccttaaggccatgctcctgctgcagatagctagtccaacccatccctttatttcagcccatctcttcatttcccataaggaataattttagttaatctaatatctatagaaagaatgctaatgactagcttgctgttaataaatacatgggtaaacctctgttggaggctctcagctctgaaggctgtgagacccttgatttcctacttcactcctctatatttctgtgtctttaattcctctagtgccactgggttagagtctccccgaccaagctggtctcagcaagtggtctccatcatgggggctcgaatccaggttgaagggtcaccagagtgatggttggagaacatggaactagctggaggacacctgagtactcttaaagcaaaccccgtggtgagtaagaaggggagctcagaagcatcagggtaacaatgggacaagtgtggggtctggttcgttccatcttggaactttttcacactgatgatgaggaagaaggagagtataatgaagtaacagaagaggttatagagcaggtttatttgccagctaaagctaaagtggcaaaggagggagaggttcatccctacccttctgcaccccctcattattattttgaagaaaaagagtggcctgaccctccagatctttcttttccagaggacagtgggcaaaaattagttgccccagtgactgttcaagcagcacctcgagcgactgctcttagttctattcagtcaggaattcagcaagctagatgagaaggtgattaagaggcttggcagttccctgttagactacactgcccagaccaacagggaaatattgtagctacatttgagcctttttgttttaaattactcaaagaatttaaacaagctattaatcagtatggaccaggttctccttttgtaatgggactattaaagaacattgctgtttccagtcagatgattcctactgactgggacgctcttactcaagcttgtctaactcctgcttagttcttacaatttaaaacttggtgggcagatgaagcttccattcaggcttctcacaacacgcaggaccaacctcaaattaatataactgcagaccaacttttgggggttggcagttgggctggtttagatgcacaaatggtcatgcaggatgatgccatagaacagcttagaggagcgtgcattagagcttggggaaaaaaaatcacttcaagtggagaacaataccctttctttagtgctataaaacagggaccagaagaatcatatgtggattttatagctcagttacaggagtctcttaaaaagatgactgcagatttggctgctcaggatatagtgttgcaattattagctttcaacaatgctaatcctgattgccaggctgctctgtgacctatcagagggaaagcacatttagttgattatatcaaggcctgtggtggtatcagaggtaatctgcatcaggccacctgctagcacgggcaatggcaggactgagagtggatacagaaagtactccatttcctggagcttgttttaactgtgggaagcatggtcatactg

SEQ ID NO: 166 - DNA, 3269 bp, Homo sapiens
tcgttttgctactgttgtggagatccttaacgcagcagcgcctgtcataaacaagcctcttgtagcttcttacagaaaacagatttagtctagcatgaaacacctctgcatctcattgaaactgaagaggcttgcagatttgctttcgttgatgtccacgttactgaggattgactgagtatagactggagacaggtttttggcttatcacagcactgaggaaaatacaaatgcacagactgtcagcatgatgtcagaggccagagtttggtgggggcagatggcagggcgacccaaaagatgcagaaaaggtagactggggccactgggtcttaagaggagctgtgaagttgtgtggaagccaaggctgggtctgacatccctgccaggaagcaggttggacagaaaccacttgctaaaagcgtctctatggtgcagtgattatgtgtaccctgtgctgttgctcagtagtttccttgaatgttcaagtatctcatccactcagttttgtgattcctggatatttgtgtgttgtaaagtgttttgttaggtggtatgaaccaatgtgaggaggcttgagacagggttatggatttccagagctcttccatgtagaataccctgccttcttgaagcagttccaccaccaatatgatggggaagggcaggaacttatggcagggtggggagaggatttgcctggaagttaagagagtggcatccacttgtggtaaccccttacgatgatgacatcccacacactaagaggtacaagcaggaccaaagttttggactgttccctcttctcccctccactgtgtttaatgttcactcactgcattaaataacaacaaagatgggacaaaacccactaatactgtggggaaaaaaattttcaagagcagaggaaagtctttctgcctttttataattactttttttatcatttaatttacctgcctaaataaacatcttctacagaatatctgtcattcaaccatgccaaggagtttgtgccagccttttcagactcccagaattgggtgttcctgggttatttacatagctgagcagtgtccaggggaggtgcgcagtgaactgtcaaggactttccagactgtcttctcttcagactcttttataatctccagtggcatctttcccttttcttttgttcatgacctgacctgaagcagcagatttgatagactggcaaagatgaataggaaaaactttgactcttgcccagtgcctgcctgcctctctctctctcctctctctctctctctttttaaaccaccatagactctcacttattttggaggagtgtatgtgcatgtgtacacatatgtacatatataaaaacagttgatgttttggtgtatggggtaaaagccccaggagcatacagaacttgagctgaacctggtcagtagaaagggaaaccccaaccctttcttgatttttggagacacccaggactaatggatactgtagtagacatgtagtactatagtaccgtaatattcatctctcctcattttagttgcctttcagattctaaatgtttgggatcattcctatcatcttagtctcttcaggatctttagtattttcctggttctgaggaggcttgagacagggttatggatttccttgttctgtgtctttatccctactgatagttcctctttctcattttgcaaactacccagagctccaaggacagcctgaagatctcagtgcctcaggctctgaggtactctgctcacaggccccagacagatgctgttgggtaaactcaaagcttcctatgagaagcttctgagatgtagcaggtcacagaagtgttcacctgtttcatctgaggatttcagttctgaagtgatctaggcatgtttggtaaaaatgtttttgtgagagttctttttttaagaaagcattatgcaaaaagtcacttttaagggcatttaaaaatttttaagtaaagccattctttggcttttttggactatttgtggatactttgtttacattttgaatattaaaatgtgcatcatcttgtcggccatgcagtcctgcaggcatcagtgccctggctgtcctgtgagtcctcatgcagagcagggccatcatggtcagcccttgtgagtaagtgggtatacgctgaagctgacttccgtctgtgtcctgccctcccatccagcactctctatggaaatagttgtcatttcctcagtgatggtgtgtcttatagtgatggttgtaatggtgaatggctagtgtcattttgtttaattttgttttgctttttgatggtggataagatgaaattttagctgtttcagcatcaatccaacttaaaagcatcttggactttgttttcccttccaaactaaaagatcaaggcatgtattagacacaagcatatttgctgcctcaactcctctgacacccatattaggaaaaggcctgccaccaaagcaggaagctgcacactcctaacccttctcccagggtgtggggtcccttgacgtcatgaagagctattgcaaggtgcttctgtacttttccagcctggaaatggagggtgactggccctggctcctgctatgagaagataaccagcctcattttctcagtgccccagaggtctaggataggatttctaaactggaatcatccttaatcaccttgaagatcccttaagaggcatttgactggtgctgccgtctgtgtcctcaaagcaatgctggtggcagcgtcctgtgtacacatgcagagctaatacccaaactaaaaactgggtaactggccctgaagtgcttcccaatcagtaagccacagggaaatgtttgatttttatgttctgttggattttggtttgcttggcatatctaaaggtgcctttacttttctttttttttttttttctttctgctttgttttgtaggacttgttctaacatggaaaacaagtccagaagactctcctctgactgttacctttgccccaagccaccccaaacttttatgctcatgttttattaaagcaggtgctccctggaatctctgggacatttttgaggcatttgaagcagaatatagagtggtctcatctccttccttaatcttcctggtggttgggatgttccacttgtatcatagatttttttattacagatatgctccactgtttttaaatgtgaacttgtgcgcaaatgtgcagattcaatgttcttgttacagattgaataaatttttatcttg

SEQ ID NO: 167 - DNA, 1981 bp, Homo sapiens
acatataaacccacagccactgcgggtggaaggagaagggcagggtggaaaaagtttgagagaaggagggaggaaaaggtgtcctggctagcaccatgtggattctcttgagatgagaagaaaatgccccgctacgtcccccttctgctgctcctgcttctcctgaggtgttcagaacggggtggaggagttaattttggtgagaaggatgcaaaagtccccgggacctggagagatggagtcagggtccctggagaaggagcctcttgggactcagacagggccagtcccgagcgaaggtacggaatagatggagcacctggccagctgtctcattttaaatcatataccaagcatgacctgagtgtaatctctaacatgaatcacagcttctgcctcattggtttgccagaaccgcaggcacaaatggatgagaggagacacctatgaacatggagccagaataccccaattgctgaaacaccagttcagagaggagtgagcttgagaaagagtcaggtttagtgtcccacggaaagagaccagacctggaaaagacagagtcaaagctgggtgagcaggccttcgaagggcgtggctcagcaaagataatccatattgtagtgcaagaggattctttgtggaatatgttttaccagaattaaaccaaaaatgccaaatgatccctaactggaataaatctcaccacattacctggggagaggtgtcatttggatgtgaggatagttatgaaaatactgagcagagcagatgaggataggccatcaacaattcacattaaatgagattactttttagtaggactaagccaaagcatttccactaagcacccagagaccagccctaaagactcaagaataagagaaaatgatgtaactgcagatggaaggaccactgaggaccacatcactgcagacccagggaccaccgaggactctgtcactgcagacccagggaccactgaggacaatgtgactgtggacccagggaccaccgagggctctgtcactgcagacccagcgaccaccaaggactatgtgtctgcagacccagggaccaccaaggattctgtcactgcagacccagggaccactcactgagaactttgtcactgcagacccagggaccaccaaggactccatcactgcagacccaaggaccacagaggactccgtcactgcagacccagggaccaccaaacactccatcactgtagacccagggaccactgaggactctgtcactgcagacccagggaccaccaaacactccatcactgcagacccagggaccaccgaggactccgtcactgcagacccagggaccacagaagatgaaaccactaaacatggtgacactcaccttctgtgaactacttcagtcacagcagtgaaacccaccaggctcctgacacccatgggaattatcctcatatccctggctgcaaccacagtcactgttgtgctctttgttggattgggcttcattgtgaaagagtgtttcctgcctccattaaatccatccaccagggttatttatcatccccatgtcatggactacagtacaccataaagaggaccccagcagtgactacagttggttctagaaaaaggagacccctcatccgcctctgcaagactatgcagcatgatgtgtatcctcaggcctccactcctccgccctagtctggagccctgggaccaccacatgaggaaggcagctggcccctggaataagcatgtggaggacactcagaaggatgcccatctgctctgagtgtctcctaattctgcctgaccttggttacttcctctggacaatcgcctttacctatctaccaggttttgaggaattacacacagctcaggtataagagatattcggtaagtctgatcaaatcaataaagcaaattttatctgtttttgtctgggacatatctctacattcattcatttaacc

SEQ ID NO: 168 - DNA, 2262 bp, Homo sapiens
acataatgaagtgtccgatgctaaggtcaaggctgggccaggaaagcgtccactgtgggcccatgttcatccaggtctcccggcccctgcccctgtggagggacaatagacagactccatggctgctgtcccttcgaggggagctggtggcttctcttgaagacgccagcctgatgggactgtatgtggacatgaatgccaccactgtcaccgtccaaagcccgagacaaggccttcttcagaggtgggaggtcagtggtgggcagcaggctctgccaggagtgtcattccagccagagtcggaggtcttagttcacatccccaagcagagactgggtctagtcaaaagaggttcctacattgaggaaaccctgagcctcagactcctccgagtccaccagtccaacatctttatggtgactgagaacaaggactttgtggtggtcagcattccggcggccggggtgctccaggtccagcgatgccaagaagtcggaggaaccccgggaacacaagctttctatagggtagacctgagcctggaatttgccgagatggctgccccggtcctctggacagtggagagcttcttccagtgtgtgggttcaggaacagagccgcctgcctcaactgctgcactgaggaccactccctccccaccatccccaggaccagagacccctccagcgggagtgccacctgctgcttcctcccaggtgtgggctgcagggccagctgcccaggaatggctttctcgggacctcctgcaccggccttccgacgcactggccaaaaaggggcttggaccattcctgcaaacagccaaaccggcgagaagaggccagacatctgcctccattctccccagagtggtgcaagctcagcgaggtccccagcctcccccaggggaagcagggatccctggacaccccacacctccagccacgctcccctcggagcctgtagagggtgtccaggctagtccctggcggccacgtccagtcttgccaacgcacccggctctgaccctgcccgtgtcctcagatgcctcctctccttcaccgccagccccgaggcctgaacgacctgaatcacttctggtctcaggaccatctgtcaccctgactgaaggtctaggaactgtgaggcctgaacaggaccccgccaagtctccaggaagtcccctcctgctgagaggcttgtcaagcggggatgtggctgcacctgagcccatcatgggggagcccggccaagccagtgaggagttccagccattggcgaggccctggcgggccacactggctgcagaggagctggtttctcaccgttctcccggagagccccaggaaacgtgctctggaacggaggtggagaggccacgccagacagggcctggtctccccagggagggggccagggggcacatggacctttcatcctcagaaccaagccaggacatagaggggccgggactctccatcctgccagcgagggatgccacattctccaccccaagtgtgaggcagccagaccccagtgcctggctgagttcaggacctgaactcaccgggatgcccagggtgaggctggcagcgcccctggcagttcttcctatggaacctctgccaccagaacctgttcgcccagcagctcttctgacacccgaagcctcatctgtgggagggccagaccaggcccgatacctggagtcagcccctggctggcctgtgggccaggaggagtggggggttgcacacacgtccagccctccatccacgcaaaccctgagcctgtgggctcccacaggagtgttgctacccagcctggtggagcttgaataccccttccaggctggccggggggcctcactccagcaggagctgacagagcccaccttggccctcagtgctgaaagccacaggcctcctgagcttcaagacagtgtggaggggctttctgagaggccctcacgctgagcctccatggagactccaggcagccggtaccccgctggcttggacggccccagtgaccctcagtgacccagctgtccccaggctccctggcttagatgcccagctgtggctgggtacagtgttctgggccggaagagcactcactcagtgcttccctggaaaggtggacccccagacgcccacctccaggcagacccatcactggaagtgggatttgaaatgcagccaagaagaggagaccgtcggcaacgcccgcccggaacaagaaataaataaataaataatc

SEQ ID NO: 169 - DNA, 2772 bp, Homo sapiens
aaggttccgcgccgggcgtggacggtgtggggcggtcccggccccgcagatcctcgttcctagctgcctgccagcgtcctcggcccggccctgaggatggacccaggagatcccgctggtgaccctgccgctggcgagcgccaccgcatgggccgggaccccctcctgctcctgcaggccctgcagaccctgtggtccacgcgggagcggaagcagctccgggaggaagcctggcgggggtttgctgccttggacgaccccctggccgggcttctggacatgctggagagctgccggggccagcggggagagggcccctccctggcggcctggatctcccaccagctgcagtgctggctacaggcacagccatgcccgagcctggcccagcacagcctgaggctgaagcggctgcaggcccgagcggtcaaagtcctcactgagagcccccccagccttgcggcaccactggccagcatcttccagctgcaggatgcagacaggagctgcctgctggcacacgtccaccgcctccaccacgagggcaggttcagagaagcagccacgctgggcacgacgttgaagctgcagtcggagcttggcgttgaaaagatgagcatcccactgctcctccaggacaaggtggccctcgtggagcgctatgtggccggcttcccggacctccagaggaggctgctggtcctcatggattcctggtgccagcccggctttgacatcaaggacgttgccagacagtaccctgaggtgacctccttgagcctggagaagctgagtccgaaggcgctgagcaggcaggtcttgcgtctgcaggagcggtacagcgtagccccagcgctgtgtcccaacgcggccattcagcagcgcctggcggccctgcggcacctgtgccacaagcggtttgtggagaagagcctgtcacaggagaactggaccgaccatgtgcagggcctggtggggcagagcccgtggcttcaggagcagctgtctcagctgctggtctcccacagtgacccagtcacggccgcccagtgtgccatggacctcttgctgcccgaggagcggctgccggctgcggtggctgtggaactccgccggttcaggctccaggggagggcgactgaggctgactcgaggctggaggtgaaggacatgaaggaccgttactaccagctgcccatccccagggagaacgtccacctcctggcctcgtgggaagacctgaccagacacgagggtgcactcctgcagtgccaccaagtggttggtgtagacgtggagtggacacctgtgtttgttgctgggggccggcctcggccgtcactcctgcaggtggccgtggagggccacgtgttccttctggacgtcctggcactctcgcagccaccaacagggcagggagcccaggccttttcccggctggtggcccagctcctctcggacccctctatcaccaagctgggctacgggatggtgggggacctgcaaaaactgggcacgtcctgccccgccctggcccatgtggagaagcagattctgggcggcatggacctgctgctggtgcacagacagatgcgggtggcgagcgtgccagccccagccgtggacagggccagggagctgaggggcctgagcctcctggtgcagcaggtgctgggcacagccctggacaagacgcagcagctgtccaactgggaccggaggccgctctacgaggagcaggtcatctacgcagctgccgacgcctactgcctgctggaggtgcaccaagccctgtgcagagagcccgcccgcttccacctgtcggaggacctggctgggagccggaggcccaggcacagagagagaccaggggcacggaagccacccggcctgcagaaagcgtcagcaccggccgcacccaggcaggtccctgtggctgtggctgtgtctgagggcgctgcccctcagattccggccagggccttccgtgtggtgtgtgacaacatgctgcaggggctggcacggagcctccgctgtctcggtgtggatgcacgcatgctgggcaatggtgaagaccaccgcagggcggccgaggttgccaggcaggaggggaggatcattctgacgtcggggcagccattccacaagctccgggcccaggtcggggctgggcgctgcctctcggtcgactgctccctgaaggcccagcagcaggccaaggctgtgctcaagcatttcaacgtgcgtgtcacccacgcagacatcttcagccgctgccaggcctgtaactgtgaccagtacctaaaggtctccagggacatgatgaagcagctcatgtggctcagcagtcaccaggaggggcccaggagctgaggtgacgaggccacccagagccaggcggtgcaggagccaggcccagccccagacgcagcccctgagggctgcacctatgaccgcccctgccgctggctgcagatggctgacctgcgggcggagacaccggacatgctggccgacggcacccggctgcagctggcaggggtcccggtgggtgtgctgaggacacctgggctgcggtgcttctactgctgcacgggctgtggaaaggtcttctgggacggctcccacctgggtcgtgttgccacccacttccgagacatgctggagagcgcccccagcccctgcgagccgagcccagcccccagcccggccagcagtcccttctgaggacagccagacaataaacatggaaagtgcccgactgctgggccc

SEQ ID NO: 170 - DNA, 2417 bp, Homo sapiens
ttcctcagcacccatgaggccccaacaatgtctttgctgacccaactttagcaactctcactctactgatccccacttagtcataagaacagagactttaacctccatgaactcccagtacagtgtctgccgattccacattagctttggctttctggtcacccattggccatgaatacagtggctttggctctcataagacccaatcacagtgtttgctgaccctgtattgactgccttcactgcctggtgatcctccatcaaccatgcatagaatgtctttgaatgcaatgatgccccaccacagcacacgctgtcctgcattgcagcccatcactgtctgctaatctgattatatgagcctcaacactgtgtctgccgactactagacaccactatggagtctgcctcatgtttctcaatcacagtatctgccaaccctatattagtgtcaccactgtgtctgctaatctttttttttttagatggagtttcactcttgttgcccaggctggagggcaatggtgcaatctcggctcactccaatctccacctcccggattcaagcagttttcctgcctcagcctccccagtagctgggattacaggcacccgccatcatgcccagctatgtgtctgctaatcttggtcacaagtacagtgtcttcaatcttcataaaaaatcagcctgtttgctctccccacattagcccttagtcactctgctgattagccaccagtaaagtggttttgtctccatcgtggtattagccccatccctgccacactgatgtgtcattgtcccttagtacagtgtgctgacctcatgagccctggcataatgcctggggttcattagagcctacccttcattttcattaagggtacaacatggtttcagatgatcctgtattagctaccggtacagtgtctttaaccttcatgagttcccacagccatgtctgctgatgctatcatagctcccaacactgtgtctgttgaatcctcattggtcatcaacatagtggctttgatctctgtgatgacaccatacagtttctgattaccctctatgaggtgcagttattgttccctgatctccgtacactggtttgttgactgttctttcaatctcagcaatgtttccttcaatctcagcaatgtttccttcaactctggcagttccccaggccttcaggctgttttcttatttttctgactgtttatttagcatcagggattgtcccttggtctttttggctgtggagtcttatccccttttcctctgtcttccaaatgcgaggactgtttgtggtctccagatgttcaacaatcctgctgttcctcaaggccagacacttttcctttaagcctccggctgtttgtttatttctctggctgtttccaaggtagttctcactgttgcatgacatgtggtgacaatttcctcttctgtttgactattgtagagtctttgcctgtcccaactacaaggactgtactcgggctgttcatgtcactgcaagactctttctcagtccccgtggctgttttctagtgtcctggcatgttcactcagcccttggctattgtctggaaccagactgttcgagctgcttctagtgactccccagtgcctagaataggctaccttaccctccctcttgctacctcaatcctgggtatgttcatacttcctcttgcctcttttctggtctcctactgtttctccatcccaaggactgttgcataccctggatgcagctggggggcattaaacagcaagtgggaatggcaggctgcagggggagcaccttccttccaggtagacctctttagctgtggatgccctggggaaacagtccctgcagagacgctgcctgcttcagagccctggtgtggcctcctggcaggatatctatagcccaagagtcactagatttgcttccatcaccctgctagaaaattcattaaagtgaacacctcccagcattaggggtgtctgtgtgtgaatctctgtttgggagagactgtgacggccgagaggaagcacatggagatcacagtggtgtgtggtgtgcagcatggggaccagtcctgctcttgcccgagcctcattccttctccctaatacatggcatcacagttccagcccagaatccttcagaagtccatgctgatgttggaggatgaatatagggtgtctgccccatgggtgttttttagttcacaacatgaaacccttataataacttaatgtgcaatattactaacagcctttagtttctagacaggcagtgtagtgtaatggctaagaacatgaatgctggagccagatattcattcaaatcctgtgccttaatggtttcttaggtatgggacaaaaagcacacataaagaacacttaaactttgctt

SEQ ID NO: 171 - DNA, 2413 bp, Homo sapiens
ctagagggtgctaagacatggggccaggtgcccaggggctgcccattgtggtagggacagagtccccagtggcgggagtgttgtggcaatctcacccttttagctctttccgaaattgtgccgggggtccctgcggtgctgctctggggccttatctgaggtgccgtatctagaagcacccttgggaattctccctagatacactcgattggccacagaggaatccgaggctgtgcaatggggtgtcctttccacgtgcacggactgggggccagcacggctcaggtcagtgtgtagtgggggcatgaactccttgaagaacaatctggccgggcacggtggctcacgcttgtaatcccaacactttgggaggccgagccggggcgtatcacctgaggtcaggagtttgagaccagcttggccaacatggtgaaaccccatctccacaaaaaatacaaaaattagctaggtgtcctggcgcacacctgtaatcccagctactcaggaggctaaggcatgagaatcgcttgaacctgggaggcggaggttgcagtgagccaagattgcaccactgcactccagcctgggcgacagagggagactccgtctcagaaaaaggaaaagaaaaacaatctacttagatcttaaaatggatatttaaaaaattctccagagaaagccagaagaaaataggtgactttttcactatgtgcttaggtgactgcagatgcccggcaatgttccctcccaggccctcctgggtgagcccgcctcccaggcaggggtcagcatggccggggtccctctgtctgagcccaggattcgtgcaacaccaggaagacaacagttgaaggttccttagtgagctaagggaagtatacacaaacttactacataaacattagaaagtgctgtccgtaaaaaacacgtcttcacagagccaacaagcagagaaatagctgcccagtgttaggaagtgcatcatgatccagaggttcagcccgtgtgcagcgcacagacctgaggccccagagagaccgaggacgcagaccagtggcacgacggaaacgcagaacgtttatgagaaaactttcctactaattgagataaagctgtaaagaggcagatagccccactgggtgtgtacgtttgaaacttgtgccccctgggctagggcattcggggtgtggccctcagtcccctgtagctgctgcctggaaaccgctgccacccacccacctcctccctctgctcttccactcaggtgagaattctccaagccctgccctccggcgcccccgtcccgcccctgcccggcctggccccgcccctgcccggccccgccccccaacgtgtcttcaggtctctttccctccagccggcccttaggacggctgttggacgtgctcgtgagtccttcgcctgtctgccttccacctctctgcagctccttctccaatctcatggtcttcttgagcttggccgccctccacgccccatgctgggcttggtcggttctggggtctacctctctggcttcatccctcccacagtttcgagggtttccctgtgctcaggcccctggcagccgccccctgtgcagaccactgggcagatccagctgacctccaggggcacttcctcggctcatcactgggccggtgctctgcagaatgagctgtgagagccactgtggctggccagagggtgccactcacagtcacttcagactcacaggagccttcgtcccgacccctgcattcatctgtgttctgttttatgttttttcccagtcacctgagctgcaggccttggtcaccccagactcctccctcctgtcacccttatcctcaccccagcacctttacgtctgccccaggctccatttccccctcttctgcctggatcaaaccaccctgactttcctgggtcttcgtgcaacagcctgctccggccgctgcctcactgcacctgcaaatccacttgcacccacacccaggccagggtttttaaacagaagcctcagcagatccctctctctggccagctccctgttgaaccaggaagcaggtccctgttgaacctcagcatgacccgcccccacccctgcatcccacttctgctctgggagcctctgggttcctgggcgcacctgctgcccttccctgtttgtcactgggtgacctcccgtccttgtgggcgctcccgggccctggtctcgggccttctgaggacttgctctcctggtagcggctgctgactgtgagcccagagagcaggcgtggctgttgaccttaggtcctcccagaacctggcggatcgcctggctcccaggcaggaggcgctgcatgacgcctccaacttccgccaatctagcccaaggatggcgctctaaataaaacgcgttctacag

SEQ ID NO: 172 - DNA, 2345 bp, Homo sapiens
aatataccagtatggttttgttaatattcctatatccaatactatctgcagacttaatgctttttctttttgcttatttcttttctctttgatgctactcataagtttcttcttccctctctgtttctgtgccaactttaggttgagttgagacaatgtgcttgacaggtaaacctgtaatttgtgattggataataaagcattattatctgaaacttgttcttacagatacctttagaaaatgcttgaagaggccaggtgcggtggctcacgcctgtaatcacagcactttgggaggccaaggcaggtggattccttgagcccgggagttcaagaccagcctgggcaaataacaagactatttaaaagaaaaaaaaaagaaaacacttgaagaacctgaatgtattgaattagagttggaaggaaccctaaaaatagttttctttcttcttttttttttttttttttttgagacagagtcttactctgtcactcaagctggagtgcagtggtgcgatcttggctcaccataacctccgcctcccaggttcaagtgattctcctgcctcagcctcccgagtagctgggattacaggtgcatgccaccatgcctggctaatttttgtatttttagtagagatggggtttcaccatgttggtcaggctggtcttgaactcctgacctcatgatccgcccacctcggcctcccaaagtgctgggattacaggcgtgagccactgcacccagccaaaataattttctagataatatttaaattactccaagtatgatcttcagaggaaaagattatatgatgtggaaactccttttctaaactattgtagaatttgaataatactcattttcagaattctctgcaacagaacaacatctctttagactgtagtttgttaggtttttgctctgaggagacagaacagttgctgctttaccatttgtcttttacgtgcttaaaataaaattataaagtctttcttcagccttcttatacccagtttctttaatctttcctatggttcctgtttctctactttttccctgtggtttcttgtgaaaatataaatcctccatgctgctttgtttaaatagtactatgtaaactctaaagtgttatgcaaatgataagttattttattattacaaagatggtagacccttgaactgcacgtttatgaaagtagttcagtgcttgctttgttgttgttttggtttttttgattcccaagttctgccttaggatctccaatgcttgcttttaatggttcttggacaatcgatgctgttactgaaaaatttggagttcatatctttacactccatggtccatatctcatcactttcctaattcttataaccattttatttaaattcagttctgatgaacatacaccagtggaggatgaagagccaaagaaaagcactacttcagcttctacttcagaagaagaaaaaaagaagaagtctagccgttcaaaagaaaggtccaagaaaaggagaaagaaaaaatcatcgaaaagaaaacataagaagtattctgaagatagcgacagtgactctgattctgaaacagactccagtgatgaagataacaaaaggagagcaaagaaagccaagaaaaaggaaaagaagaagaaacacagatcgaagaaatataagaaaaagaggtctaagaagagcagaaaagagtccagtgattcaagctctaaagaatcccaagaagagtttctggaaaatccctggaaggatcgaacaaaggctgaagaaccatcagatttaattggcccagaggctccaaaaacacttacctctcaagatgataaacctttgaactatggccatgctctgttacctggtgaaggtgcagctatggctgaatatgtaaaagctggaaaacgtatcccacgaagaggtgaaattggcttgacaagtgaagaaattgcatcatttgaatgctcaggttatgtaatgagtggtagcaggcatcgccgaatggaggctgtgcgactgcgaaaagagaaccagatctacagtgctgatgagaagagagcccttgcatcctttaaccaagaagagagacgaaagagagagaacaagattctggccagttttcgagaaatggtttacagaaagaccaaagggaaggatgacaaataaagattttctgattgtccagaagacatttttaacaacaaaaaagaaagtctgggttccacacatacatagaaaaagattattatgttctgagaaagctttacagtgctactgtgccttctatttaattctttcagtccttcaataaaaagctgcttattgatataacttt

SEQ ID NO: 173 - DNA, 1714 bp, Homo sapiens
cctcacaagatccagaccccacaagatccagacctcggctatctggcttctcttttttttgcgacagagtctcaatctgtcacccaggctggagcgcagtggtgtggtctcggctcactgcaacctctgcttcccgggttcaagcagttctcctgcctcggcctcccgagtggctgggatcacaggtgtgcgccatgcctggctaaattttttttttttttttgtatttttagtggagatggggtttcgctatgttggccgggctggtctcggacccctgacctcaggtgatccacctgccttgacctctcagagtgctgggattgcaggcgtgagccactgcacccagccccatctgacttctatacccgcagccccttcctttaccctcaggctgcctcagtctccacactggggcccagagctgggctggactcagcgcagtcagaacctcgccttgcacgtggcgaaggagcggcaggcaggcaggcaggcaagcaggacagccagcttcctcctagtccgcagtttcgcggagcagcctggaaagggaggcccaggcttccctgtctcgtcgcacgtgtgtctgcagtgtctgtgctatctcccaggggcctggatgtcgatggaatgcctgagggtggagagagctgtagctgaggcctaccctggcggcctcagcatctgtggagatgtgtagagacagggagagtgaatggggaccaacctcaggagatgctgggtcccagaagcaccatgtgcttctcctttggtgagacttaattactctctaaaatgtaaggctactcccacttatcaaattatagatgagtttaattacagcacactgagtaaccacactgggctccttcagaaatagcagcaggctggttgctcttctcagcttcagctgtagccaccccagtttcaggaggaagtgcccgtggttcctggggcctggaagtgccgctcaactctgctgccagacaagtgcgggcgtggtggactgcactgggtacactgctgtaccggccaccaccctccggccactctcagccggtgagtgctctgcggggccatctggccacgtgttctgtgactgggtcatttactctgctgcaacctctctttctcctacctacatcgtgttctggataaaggttttggctcataatgtccgaccagaggtggacaaagtggtgtgggacctgccgtaagaaacagggagcatggcgcggggagagaagcctgtgccttatggagactcggggcaccttcaggaagcagggtcaacagcagcaggccactagggagtcgggagagctcggtgatgtcacgaggggcatcagactcttccctgcaggctggcgggactgatgggctctcgttccaatggaggtacaatgggacttccggggctgtgatgggaagggcggaggagctgccgatggtcccagtgccatattagtgtcacattctgaggggcagccctgtgccggacggcagctgctacctctccctctgcccctttattacttgaatctcttcgttgtgccctgtctaggcacggtcgtccgacagcaggcagcccactgccctcccagagctcactgtctagcccagggtgacacagggtaaccgtgggcatgacttgggccgggaagtgagaggctcgattccatcacatgtaaataaaaatactcattttcaatct

SEQ ID NO: 174 - DNA, 1876 bp, Homo sapiens
ttgcgtggtatcaagaggtgcattgaggcgctcctgcagcctcctcccggcacgggactcctcacaacccccagcctcagcttccctgacagggcaggggctcactcttctccactccgggccaggaacgcagcctgcttgccttttgtccaattgggtgctctttctttgcgactgatacaaagtgggaacaaactccgcttccggtgatgcccgggccccaggaggctgggggagaagtgcacgctgcccagccttcaacctgaactgcccccagcacttccgagccccgacccctgcagctgtgagggaagccccgacctctgccctggccacatccttcccctgatctcatggctgaaaagccacaccagaattcctgcaattcagtgaggcagctcttcaaaaccaagcagctggtgacgcacagggacagagggagctgtacgcacagggcccaggggctgctggctgccaggaccaccgcattgcagaggtctcccttgcagcaagagatctgggagtccacaacggcacttaacctgccctctgccctggcaccccagggactcactgccaaagacgctcactttctgggagacacagaccccatccaggaaggggcacgagaccacgctgcaggaggccccttccaagaccgccaagcatctgtagcagcgcagaccctgagctgggagagagggcaaggattctctcggcaccacgggaaccaccttctctactctcactgaacacccctgggatgtatctgtaaaaattggaacacctttcggctagaaaccagaggaagccgctcatgacacccgggagctcacagaggctctgaagtttctattcaagaaaacaactccagatggggctgatctggaagacaagtaacatcttccttttcttggtgctcgcctgccgtgctctaggtgcttttagagatgctggtctgtgtgctagggaagcgatgaaccatactgttagtctattaaacataactcaacctggctggctttccatgactaccaaacgctgggaatatgccagacctgtgcccgtggaagactctggcctcccagcacacctccaggaacaaactccctggcctgcaggatagggatagcagccccaaccgtcaatacaaagggattttactgagtgggctcatgggttctttaagttccccctcttaacgatcaacggtaattcaaacgtcccaaaaggagaaatgctttcttagcatatcttttacctggagtatttccccttctgcctttacagcaatcatgccagttctaccacttttgcaagaaagctccaagagagtcagtgtagctgaaactttgtcactgggtcacctatctagtccatatgtctgcaggaattatactgataaatggacaactcaccatgcaatcaatctcccgctctatcctgttccctgaccggcatggtttctacttcctgtcagcacaactaggacgtctggtttctgctgggctgccctctcatgggaagcctttaatcactctagctcaatatatcctctggggaccatcaacatttcctattaaagataactacacctggccgagcgcggtggctaacgcctgtaatcccagaactttgggaagccaaggcgggtggatcacaaagtcgggagatcaagaccatcctggctaacacagtgaaacccctcctctactaaaaatacaaaaaattagccaggcgtggtggtgggtgcctgtaatcccagctacttgggaggctgaggcaagagaatggcgaacctaggaggcagagtttgcagtgagctgagatggtgccactgcactccagcctgggggacagagctacactccatccc

SEQ ID NO: 175 - DNA, 2072 bp, Homo sapiens
cccttttgaaacttgttggctgacacgcaagagcgtgcgttctgtctgttttacaacaatttcggccaagttcgcagcatgtcgcgcagaaaggagaacgaggaggtggacaagcagacgcgtattgccatcgtcagcgatgacaagtgcaagcccaaacggtgtcggcaggagtgcaagaagacctgcccagtggtgcgcatgggcaacctctgcatcgaggtgacgcccacgtccaagatagcctcgttgtccgaggagctgtgcatcggttgcggtatttgcgtcaagaaatgccccttcgaggccatcacaatcatcaacttgcccagcaatctggagaagcacacaacgcatcgatacagcaagaactccttcaagctgcatcgtctgcccattccgcgtcccggtgaagtgctcggtcttgtgggacagaacggtattggcaagtcgaccgctttgaagatcctcgcggggaaacaaaagccgaacctggggaagtacgccaatccgcccgactggacggagatccttagctacttccgcggctccgagctgcagaactacttcaccaagatcttggaggacaatctgaaggcgctggtcaagccgcagtatgtggatcagatccccaaggcggtgcgtggcgctgtgggcgatcttctggataagaaggacgagagggagctgcagactaagatttgtgaaatgctggatctatcgcacatccgtgatcgtgagatcgctcagctttctggcggagaactgcaacgctttgccatcgccatggtatgcatacagaatgcagacatcttcatgttcgacgagccgtcctcgtatttggatgttaagcagcgtctgaacgctgccttgaccattcgatcactcctgcatcccaccaagtttattattgtggtggagcacgatttgtctgtgctggattacttgtctgactttatatgctgcctttacggagttcccggctgctacggtgtggttactatgcctttctctgtgcgcgaaggcatcaacattttcctcgatggctttgtgcccaccgaaaacatgcgattccgcactgagtcacttactttcaaagtatctgagtccgctacggaggaggagatcaagcgcatgaaccactacgtatatcccgccatggtcaagaccctgggcaagttcgagttgacggtggaaaagggtcacttcagcgactccgagatcctggtgctcctgggcgagaacggtacaggaaagacgacgttcattcgcatgctggccggtaacctccaacccgatggcgaggtggaactgcctatgctgaatatttcctacaagccccagaagatttccccgaaattccaaaatcatgttcgccatttattgcacgataagattcgtgacgcctacgtgcatcctcagtttattgccgatgttatgaaacccatgaaaattgaggaaatcatggaccaggaggtgcagaacctttccggtggtgagttgcagcgagtcgccttggtcctgtgtcttggcaagccagcggatgtctacctcatcgacgaaccctctgcctacttggattcagagcagcgtctggtggccgccaaggttatcaaacgttacattctgcacgccaagaaaactggatttgtggtggagcacgatttcatcatggccacctacctcgccgaccgtgtcatcgtgatcgagggtcagccttcagtgaagacgacagccttttcgccgcagtcgctgctaaatggcatgaaccgcttcctcgaactgcttggacacagaacagaaacgctccggccagttcttcttcttggaggacgaagcctgcaactaagacaggatcacgggcaacttcgatgggacagctcgtttctctatgttctcctcagctttccttcgttcattttgcattctttcgttgaagaacacatttgctttcaaattaatttgttattgttgtcgaggattgcgtacaatcgaaaattggggattaattgtacttgattaaagtgagttttatatacgtttttacagcgaaataaatagtgaaccgaaac

SEQ ID NO: 176 - DNA, 1872 bp, Homo sapiens
gcacttcattgtactccatgctcagtgctgctcaccgtctgctttataatacaggccacggtgtgcttcgctcagcccctgaaatagatggtagtcactctgggagcaagaactgtttgatttctttttgttgctctggcagtatctggcaagggtcttgtacaagatcttgatcgaatttatggaagtgattagccacactgtagataacgatggctttctgcttgcagaaacaagtggaagccggtgtctgtgttaccatggagatggtgaaagatgccttggaccagcttcgaggcgcggtgatgattgtttaccccatggggttgccaccgtatgatcccatccgcatggagtttgaaaataaggaagacttgtcgggaacacaggcagggctcaacgtcattaaagaggcagaggcgcagctgtggtgggcagccaaggagctgagaagaacgaagaagctttcagactacgtggggaagaatgaaaaaaccaaaattatcgccaagattcagcaagtaagtactttttgctttaatgtgtcagtagtttttgttatttcccttcaaactgataaaaatgtacagtgaatccgaaagatttaaactactggtacaaatattttaatcttattggctcgggtttaaactaaaaatatcctcttcctgcacaccaacaaaaactggaagaaaatatggattgagtaccaatatctagagtttgttttaatatgtgggggagaggaaatatactatgttaatttcaagcgtaaaaatagggctgcaagtaaacagatatgttccttgaaatgtaaaatttcgcccgtcactgatttcaggctttttcaaactgctgatgctgtgtacaggagggggaggaggaaaggttcgagacctttgaaggacatcgtgtagcgctgtaacctgaggggccgccttggttttgtgggtgctcctacgtcactaggctgtgattttggggaaatggggccctccaccttatgtagatccagagtccgtggctctgagcatcctccctttcccactggacctgcctgcagtgtctgccttgggaatggtcaagacagagatggtatcgtgcagcctctggtctccacacagtgagagtccagggctcagggctgctcaagaccaaggcttcccttgatgcttcacttcgggtgatcagacatgggggacctgtttatctttagtagccggcaaaggcaatcgtaaaacatttgttgtaacttcaggattgtcactctaagaacaccttaatccacaatttgctctgctctcctctttgcagaggggacagggagctccagcccgagagcctattattagcagtgaggagcagaagcagctgatgctgtactatcacagaagacaagaggagctcaaggtagcaggggacagatgggctttctgcagtgctggcgcccacacatagcctgtgtgccttacctggggctgctggggagcagtgagctctgcagaatgccggggaggggtctttctagagcttctgtctgcaggtctgtcggggtcctgccaggtgtcccctggtgttagacatggcagtatcctgctcctagagggcagggagagggggaggtcagtcatggactctttcttcagtctctttatgtgcaaaacactttcctgaaatgcctgcctgaataaaacatacttatttccagagattggaagaaaatgatgatgatgcctatttaaactcaccatgggcggataacactgctttgaaaagacattttcatggagtgaaagacataaagtggagaccaagatgaagttcaccagctgatgacacttccaaagagattagctcacctttctcctaggc

SEQ ID NO: 177 - DNA, 2069 bp, Homo sapiens
acatgcccagcggggcctatgtctatcccccgccagtcgccaatggaatgtacccctgccctcctggctacccctatccaccgcccccacctggtgagtgtgtcctttgctgcccccactcccctcatgagcccacctacccaggctccccccaggccagggagactttattccttgagctgcttcaggaccaacgaaggagctggagaggcccccctcacccgggagggggccgcagccgggtgctcaccatgtccttgttactctctcaccgagcagagttctatccaggaccccccatgatggacggggccatgggatacgtgcagcccccaccaccgccctaccctgggcccatggaacctccggtcagcggccccgatgtcccctccactcctgcaggtgagggcccttgggtgctggcagcccttcgggaccagccctctcctccccgatgtcgcacagagagcctcagaatggccagagactgctgagagccgcagatgatggatgacccctggactaccccaggggcccagcagggctgtggcctggtggagcggagctagattctggccccacccccatcccttagctatccatgtgccctgggcggggaaggtcaccctgtgtgcctctcgatcctctcatctacactcagctggtcggtcacagtggcacctggggcattggctcaaggattagatgaggtgagacatgcgatgggcctggaaaggaccgtgccagcgcgtggcatgtgctcaggaaacctcacctgctgctctcattggtggaactggacccccagcaccagctgccccgagccatgggggcccggggtctcttagctgagctcagggggaggagaacttgtcaccgacaccaggtgtgtttgctctcacagccgaagccaaggccgcagaagcagccgccagcgcctattacaacccaggcaatcctcacaacgtctacatgcccacgagccagccgccgccacctccctactacccaccggaagataagaagacccagtaggccctcctgcctccctgcctcccaccctcatctctctaccctacccctcccatcggggctgtgctggggcttggggaggggagggggcgccttgttctccctccaggtctgatcataaacaattaccaggaactagcattgtgggacattagggcccccggcctcgggagaggtgccgcccagcttcccatgccagcccggagcccacagtgctgcccagcgtacctccctcaccgtctggggctcttctgggagcacggagcatcccctgttcctgtttcactctcagcttctcccctcgaagggactctctggccacctcctccaccgcagtccagctccctcagtctggcacccactgctacactcagcctcatgagccacttcagaccagccaggtgtcttcccgggccctgccagaccctgctcacattccctctgctggtctgtgctggtctcagaaggccaccgcgcccgcattccactcagccagggtccagctgcagcccccgccacccttccttcccttccctgtcctgggtcatgttgttgccaccctgtgtgacttttgaagctgtaaaatgagcttccagggcttgggtggcgtcggggcagggccgccgaggctgggaggaagcccttctgccttttgctggtgtttctggaatttgctttccctcacctctcacttccttctagaaggagcttcctgactggaaccagagaatgcatgtctgtccacttggtggctgctgggtggggccgggaacaagggcccctgaccctgtgtgctggccgggacctgccaccagccccccagcctgcttcttccccttaagctttgtgcccctggatgcgctaacattcactcttgtttgtccctggactggccatgaagtgaggagatggttatttaaagagaattccctatttatttgacaaaaaatccagttaatatattaatgtgaaataaaccctgtttgcacctcgatttgtttgctgaaaatgtgaaatagtaaaaatgaaataactgg

SEQ ID NO: 178 - DNA, 1883 bp, Homo sapiens
agatcgcgaactccttacagaggtcacagcagccaaagtgaccttaaaatataaatcgtatcatgtcaccccctatttaaaacccatccaaggcaatcaaaaaatgtaaactctctaccaccgtctggaatgaaatgcacacttctaccactgaccctacctgctggcacctgcacctctctggtgcctcccccaccactctttgctcacacagagctaagctgtgtgctgcctcagggcctgacacactcttctccctctccctggctctgctcttggctggccccttctcattcctcagctcttctctaccagaactgtttatttactttagagggcttaccacacggtcactactttgcctatttcttgcctgggtagactgctcattcaacaaggacagagagtatgactaccttatttcttgccatatctaaagtgctaccacagtgccacacatgtgactggcatttgatttttgctaaatagatgaacctgtattttaaaaaataactctggctagggagcataagagttacaagaggtatggagaatagttaaaatgaaggtgactgctatggtctgaatgttgtgttcccccaacatccatatgttgggacctaatacccaatgtattagtattaaatagtggtgcctttaggaggcaattaagacatgagggcttggccaggtgtggtggctcacgcctgtaatcccagtactttgggaggctgagacaggtggatcacctgaggtcaggagttcaagatcagcctggctaacatggcaaaaccacatctctactaaaaatactaaaattactcaggcgtggtggcacacacctgtaatcccagctactagggaggctgaggcaggagaattgcttgaatttggcgggggtgggggcggccagggatggcggttgcagtgaactgagattacgacactgcactccagcctgggcaatatagagcgagactctgtctcaaaagaaaagaaacaggcatgagagctctgccctcatgcatgggattcgtgtccttataaaagaggcttgagggagccagttgacccttctaccatgtgaggaagcagtgagaagatgccatctttgaagcagggagcaagccctcaccggacaccaaatctgctggtgccttggtcctggatttcccagcctccagaactgtgagcaataaatttctattgtttataaattatccagtctaaggtattttgttatagcagcccaagcagactaagacagtgttcacaggtcacactttaagcaacatggattttgatgctactaaagaccaccattttcaaatactttttctttcttttggacaattatacaatcatattggttatgcaatgaacagacttgattagactaatgtaacaccgaccgcctgaatatttgctcacgggggtctgtatgctttattctgtgcacacaatcccgtttttccttgagtctcctccataaagcagagcccggggtaggcctcagggctatatgtagctagactttctggagtatgactaagtgtccgtaccggactaacacagtaacaactactaggtaactgcaatttaattgctcaaatcagaactaacttctaaaacatgtttcttcccttatagtcatagactaaattctagcctaactagtgacagatacaagctgtaataatgtgttatctgtgtcttagcctcctaggtgaaaattttttcttcctttatttttatccctatggttgaagaaagtagcagagaccaactgaatgaaggtaaaaaccactggctttcttaggaagaactgtagagcaaaacaaaattcatttctggagaggaataattcctacttgaacgaatgg

SEQ ID NO: 179 - DNA, 1702 bp, Homo sapiens
agtacatggagggagctgctcgccagagacagtactgcatcctgctcctcttctacttggcctacatccatgaagacagactatggtcagtgcaatcagaaaattcctagaaggcatcccagacctgcagctagtctatactcaccatccgctcctgctcaggttctttctgttgtatccagagctcatgagtaggtatgggcaccgtgtcctggaactttggttcttctgggaagagagcagctatgaggaactggatgatgtcacctctgctgggcagcccgcccttcctgccagcttagtagtcctgttccagttgctcagaagcatccccagcatcctgctcatcttgctggacctcatctattccagcccagtggacacagctcacaaggtactgattagcctgaggaccttcctgaggaggaatgaggatatccaagtgggcggtcttatccgaggccacttcctgctgatcctgcagcgtctgctagtggagcatggggcatccccatcaggagcctcggggaacctaccattgctgctgagcctcctctccctgatgcagctcaggaatgtgtcagagcaagaactggacagcgtggccatgaagctccttcaccaagtaagcaagctgtgtgggaagtgcagccccactgacgtggacatcctgcagccctccttcaacttcctgtattggagccttcatcagaccacacccagcagtcagaaaagagctgctgcagtgctcctgagcagcacaggcctgatggagcttctggagaagatgctggccctcaccttggcaaaggcagattctcccaggactgcactcctctgctctgcctggctgctcactgcctccttctctgcccagcagcacaagggcagtttgcaggttcaccagacactctctgtggaaatggaccaagtattgaaggctctcagctttccaaagaaaaaggctgcactactctcagctgccatcttatgcttcctgcggacagccctgcgacaaagcttttcctctgccctggtagccctggtgccctcaggggcccagccactgccagccaccaaggacactgtcctagctccactgcgaatgtcgcaagtccggtccctggtcattgggctgcagaacctcctggtgcagaaggaccctctattgtcccaggcctgtgttggctgcctggaggccttgcttgactacctggatgcccggagcccagacattgctctccacgtggcctcccagccttggaatcggtttttgctgtttaccctcttggatgctggagagaattccttcctcagacctgagattttgaggctcatgaccctgtttatgcggtaccggagtagcagtgtcctctctcatgaagagctccagagcatgggacacctggctgaccacagcatggcccagaccctgcaggcctccttggagggccttccccctagcacctcctcaggccagccacccctgcaggacatgctctgcctgggaggggtggctgtatccctgtcccacatcagaaactgatcctcaggacttgaaggcccagaagtggagagagaatgagacctggagacaaagggcataattgttggggaaatggatgacagctgaagctattcatatggagccatatactctattgttgaaatagaataaggaaataaaatgatacactcacat

SEQ ID NO: 180 - DNA, 2001 bp, Homo sapiens
aagctgtgcgacgcgccgggcctcctcgcctttgtgccatccgggtctctcgcgcgagcgatttagtctgaggcgaagcttcggagcggccggtactgttgaaagcgacaagtggaggcgccgctctagcggccgggactctgaactatggcggctagtgatacagagcgagatggactagccccagaaaagacatcaccagatagagataagaaaaaagagcagtcagaagtatctgtttctcctagagcttcaaaacatcattattcaagatcacgatcaaggtcaagagaaagaaaacgaaagtcagataatgaaggaagaaaacacaggagccggagcagaagcaaagagcgtgcttatgcgcgaagagactgaactgaagacgctgcagactcagatagcaaaataataagcctacttcatgataagggaagaagacatgaatccaaagataaatcctctaagaaacataagtctgaggaacataatgacaaagaacattcttctgataaaggaagagagcgactaaattcatctgaaaatggtgaggacaggcacaaacgcaaagaaagaaagtcatcaagaggcagaagtcactcaagatctaggtctcgtgaaagacgccatcgtagtagaagcagggagcggaagaagtctcgatccaggagtagggagcggatgaaatcgagatccagaagcagagagaggaagaaatcgagatccagaagcagggaaagaaaacggcggatcaggtctcgttcccgctcaagatcaagacacaggcataggactagaagcaggagtaggacaaggagtaggagtcgagatagaaagaagagaattgaaaagccgagaagatttagcagaagtttaagccggactccaagtccacctcccttcagaggcagaaacacagcaatggatgcacaggaagctttagctagaaggttggaaagggcaaagaaattacaagaacagcgagaaaaggaaatggttgaaaaacaaaaacaacaagaaatagctgcagcagctgcagctactggaggttctgttctcaatgttgctgccctgttggcatcaggaacacaagtaacacctcagatagccatggcagctcagatggcagccctgcaagctaaagctttggcagagacaggaatagctgttcctagctactataacccagccgctgttaatccaatgaaatttgctgaacaagagaaaaaaaggaaaatgctttggcagggcaagaaagaaggggacaaatcccaatctgctgaaatatgggaaaaattgaattttggaaacaaggaccaaaatgtcaaatttaggaaattgatgggtattaagagtgaagatgaagctggatgcagctcagttgatgaagaaagttacaagactctgaagcagcaggaagaagtatttcgaaatttagatgctcagtatgaaatggcaagatcacaaacccacacacaaagaggaatgggtttgggtttcacatcttcaatgcgaggaatggatgcagtttgaaaatgatcacacttgtaaagtttgggacttatagacttcttgttctgatgtcacgtccttgttcaccaaacagctagcactctagcttgcatgggtgttgcattgactttaatttattgaaaaatacaaatttttgtaaatatcagatcagtgatactggtgttagtgttgtaatcaggttaaacccacttccattaaacttgacaggactatagaaggataatattttttagttcatgaattctacttttcaaatatataaaagctgcaggtggggataaaatctcatacatggattttttcgtgtccgctgtcttgtgtacttttgtacttaaccttgtacagttattttcatctcttgaaacatgaaagaaatgttatgtagatgttctttagaagatctggccatttggtacataatccagcacagataagctgggtggtaatgataataaaaatggttttctc

SEQ ID NO: 181 - DNA, 1738 bp, Homo sapiens
gcgcgcagcggcaggcggcggcgggatggagcccgatcccgagcccgcggccgtggaggttcccgcggggcgcgtgctcagcgcccgggagctcttcgccgcccgctcgcggtcgcagaagctgccccagcgctcgcatggccccaaggactttctgcccgacggctcggcagctcaggccgagcggctgcgccggtgccgggaagagctctggcagctgctggcagagcagcgcgtggagcgcctgggcagcttggtggctgccgagtggaggccagaagagggcttcgtggagttgaagtctcccgcgggcaaattctggcagaccatgggcttctcagagcagggccggcagcgccttcacccggaagaggccttgtatcttctggagtgtggctccatccacctcttccaccaagacctgccactgtctatccaggaagcttaccagctgctgctgaccgaccacactgtgaccttcctgcagtaccagccacctgaagaggttgggttatgtggttcgacgattccaaccaagctctgtcctgtccccgtatgagaggcagcttaacctggatgccagcgtgcagcacttggaggatggagatggcaagagaaagaggagcagctccagccctcggtaactcccacatcacggtggccccccagggagtgctggtgtctgggaccttggaaaatgcacaggctttctaagaaccagcagctcccatgcaggctcagggagacactaggggacctgccttcagctcccatgggacgtgtgcaccttagcaaccaggggcagatgtgctgcttttcccccacgtccctcaggtccattaataagaaggccaaggccctggacaactccctgcaacccaagagtctggcagcctccagccccagagctgctcccggccaacgtggctgggcgggagacagacgctgagtcctggtgccagaagctgaaccagcgcaaggagaacctctccaggcgggaacgggagcaccacgcggaggccgcgcagttccaggaagatgtcaacgccgatcccgaggtgcagcgctgctccagctggcgggagtacaaggagctgctgcagcggcggcaggtgcagaggagccagcgccgggcccctcacctgtggggccagcccgtcaccccgctgctgagtcctggccaggccagctccccaggtaccccctcagcctgccacatcttcgagggccactggcagctgaggaatcacaggactttggaaagggcatggatgaactgggatggattgaggcttaaggaagatgtgggaggagggagtggacccacaagcacggtcagttctccggcggctgcagcagggcctgtgtgggaaggcttagagatggtgagtcaggagaggtaaggaggggtggaaactatgaccatatccttaaaaagataaacaacatgcatgtggatggctttgccaccaactagctgtgatcccaacctgttagatgggaaaaggaggtgccttcttggccaagtgaaagaaaggcctgctgtctgctctaagcccagggaaccaatggggaaagaataagctaaatgtgttaacggattccaaattacttaaagcctttatgggaacacggtagattgtaggtaactagatagggttgccagatcagtttgatttgactttcagtataatttttcagtatatgttccaaaaattgcatgggatatgcttatact

SEQ ID NO: 182 - DNA, 1508 bp, Homo sapiens
agacgccgcgcggggcggggattggtctgtggtcctctctcggctcctcgcggctcgcggcggccgacggttcctgggacacctgcttgcttggcccgtccggcggctcagggcttctctgctgcgctcccggttcgctggacgggaagaagggctgggccgtcccgtcccgtccccatcggaaccccaagtcgcgccgctgacccgtcgcagggcgagatgagcgcggacgcagcggccggggcgcccctgccccggctctgctgcctggagaaggagacccaccagcaggtggtgagccgcatccgcgccgcactcaacgccgtgcgcctgctggtggtcgaccccgagacggacgagcagctgcagaagctcggcgtccaggtccgagaggagctgctgcgcgcccaggaagcgccggggcaggccgagccgccggccgccgccgaggtgcagggggctggcaacgaaaatgagcctcgcgaggccgacaagagccacccggagcagcgcgagcttcggcctcggctctgtaccatgaagaagggccccagtggctatggcttcaacctgcacagcgacaagtccaagccaggccagttcatccggtcagtggacccagactccccggctgaggcttcagggctccgggcccaggatcgcattgtggaggtgaacggggtctgcatggaggggaagcagcatggggacgtggtgtccgccatcagggctggcgggggactggctggtggaggtgaacagcgaggagctgaattcccaagacagccccccaaaacaggactccacagcgccctcgtctacctcctcctccgaccccatcctagacttcaacatctccctggccatggccaaagagagggcccaccagaaacgcagcagcaaacgggccccgcagatggactggagcaagaaaaacgaactcttcagcaacctctgagcgccctgctgccacccagtgactggcagggccgagccagcattccaccccacctttttccttctccccaattactcccctgaatcaatgtacaaatcagcacccacatcccctttcttgacaaatgatttttctagagaactatgttcttccctgactttagggaaggtgaatgtgttcccgtcctcccgcagtcagaaaggagactctgcctccctcctcctcactgagtgcctcatcctaccgggtgtccctttgccaccctgcctgggacatcgctggaacctgcaccatgccaggatcatgggaccaggcgagagggcaccctcccttcctcccccatgtgataaatgggtccagggctgatcaaagaactctgactgcagaactgccgctctcagtggacagggcatctgttaccctgagacctgtggcagacacgtcttgttttcatttgatttttgttaagagtgcagtattgcagagtctagaggaatttttgtttccttgattaacatgattttcctggttgttacatccagggcatggc

SEQ ID NO: 183 - DNA, 2231 bp, Homo sapiens
agttctgctggatgtgaagtaaaaggttgtcagcttagtgaaaagagttagctatggagcccagcacatcttagatgcctttcctaggccaggtcctctcccaccccgtcctggcagagtccattgctgtggcttctgtggatctcgaggcgtctgcatggatatcttccctgactgtgtgtgtagagggcacggtgggcccttactcggtatttgtgaatgggtgactgctaagagtgtggtagcctggcttctataagtaggaaatactgccctggaagagctgtgatgtcccaggtggcagagccactatcctgctatagtcctctcatttcccattgctctgagaacaaagcctcccaggcctgtgtcttctgtcccatttgtcctcccttgcttcattttttgttgtccctactctccatcacccactaaccttgcaatgcacacaggtttttttttagctccctaaagtcatttctgttttcctttgagcctttgtaccctccttgagtcttggagtttaaatgggaaccagcttctgactggtcttacatcttggagtttaaatgggagccagcacctgactggtcttggaaacgagcctcttttctatgtgtcttgtccttctgcatggtgatctatctcagcctgcttttgcaccaaaaataaataaataaaaggtaaatagctcagatgccaaaaaccgtaccgttgaaactgtggcccgctctgtgctctttgtaaatgaggaggtgacatataagagagaaatgcagatctctgttgattgtatcaaatctgacaaatactgaaaatactgattattactggtttaatgtattcagataattagctggaattagcctagaagcacatctaaatggaggagagaggtagatgttagctttattttaagaaattttctcattgctatctataatagtataaaaaaatagattgaacataactggattttttttttttttggaagcagagtcttgctttgttgcccaggctggagtgcagtggcactatctcagctcactgcaacccccaccttctgggttcaagcgattctcatgccttagcctcctgagtctgggattacaggcacacgccaccatgcccagctaatttttgtatttttagtacagacggggtttcaccatgttggccaggctggtctcgaaccccacctcggcctcccagagtgctgggattataggcatgaaccactgcgcccagccaaaacatgcagatttttaaatgagtttttgacacatgtatgtaatatcccttgggcaacccaatcaatatgtaacattttgtcactccagaaagttccctcatgtcctcttcagtcatttccccaactctcctcccaaaaagcctttacattttaaatttatcataggatttttcttactgtgcattctatactgttacttctcttacctactgtggtggttggacttggcttcccgtaatgattctaggacattcttacataaatgggctggtcatcctttagctaatggaagtttataaccagatgtcagatgttcacatgttcctactgaatgtttacgtgaactcaaaatagtctgtctctgtgctccactcttctgctgcttatgcctgtttccacatggtccctattctgggcctggctactggcttctgcacttcggtacaaaatgaccattgtcactctccaggttgcaggcgccccactggttactgcaacgaccactgcagtgtcttcagtcctgctggccccaagtgttttccagcagacagttacaagatcttcggaccttgagaggaaagccagctccccttctcctctaactattggaacgccagaaagtcagagaaagccttccattattctcagcaagtctcagctccaggatacattaatacatctaataaagaatgattccagcttcctcagtacacttcatgaagtctacttgcaggtgctgaccaagaacaaagacaaccacaacctatgactggagcagaataagtctaaaggcagagccccagcctcagagacaaataggcttcatcatggaaacttctgagcagaacattgagtttgagaatcctgaaattgagcctatgagaaagagactcatttcttaagaatgttttccaagtgacattctcagtgataatggaggtttcactgtgaagcatcaccagcagatccttgttttgac

SEQ ID NO: 184 - DNA, 2251 bp, Homo sapiens
cagttctcagaccagaaatctttgcatttctttctggttctcacacctcatgttttagccattagcaggtcctgtgagccctgccttcatgtttggcttctcattacaacctacactgactcctaggccaggccaccgccagccatcctctggatttttgcaggcacttccagattggcttccctatgcccaccctggtgtccctaggtgtgctggcagctggcaaccaggagcccctggtaacacacggtagcgatgtcattcttccctgctcagactcctgcagtggttcccctcgcaccccagtcaatgccaaagctgccaggtggcctaccaggtcccgcaccgtctcgttgccctgctcacctcatgacccagcacctcctgctgagctcgtgctctttccatgcctggaggactcccagtgaccccgtgctggctccttcggtccttgctctgctcctgctcgcctcagaatctccctggcacagcttagtgcttcctctcctccttccccactttgcgggcccccctgggtcaaatttgaccccggggcgggtgtctgtttccaaatctgcctccttccccccaccctctcacccccatggtccttccctaagcggacggggacacggtctcacacccacgggatctgttcccggagccccttgccaatcctgaacaggtccagttccagaacagttcgcagagctcctggagtctccttcccacacacactcctgggcggggtgttccagggtgcatgtttccttcccatatgctgggttcgcatgtgtggtacctgtcccctcactagaacgaagctccatgaggacaggaatttttgttttgttcactcttctgccttcagtgcctggcacatagagtgaacagtaaatatttgctgacttcatttattctgcatccattatgtcctaggaccaggcttcaggacacatgcacacgcatgtacacagaggcctacatacacacaggggaagaggacatgaatcgctgacccccagtgagctcactgcctagcacggagcccgtagcaacagtgtagtgagaacagcacccatgaagagatgcggaagctactgtaggaatgggagtgagctagccatgctggggcagggagccacagccgcgctcagcctggagggaagatgccttccgggaactgtggtgctgctttctgtgcacaccttctcttcctgtgtccccatgaggctgagagagaagcctccttttgctcatcagtttatccacagacgttaagtgctctttgcttacagagtgcactcctaggcattgggatgccattgagtcttgaaggtagggaaggtatcatgagcttttcgtccatgtcaaatgagttcagttccttcagccttgccttataaggtctgtcttccatccagttaattttttttttctgtaccctttccatgtttttcccccctttatttgcctttatttttctgtcccagaaggattctgttcttatgggcagggagagctatctatttccctaacctacttaattccttactaacaaaaacagtcctgacccactcaaccccaccattttccacacgtaggcagtcatctttgtaaacctccactggtgctggctgcgtttagaacatactccatataaaacaggccctgaggtgtggtggctcatgcctgtaatcccagcactttgggaggctaaggcaggcagatcacctgaggtcaggagtttgagaccagcctggccaacatggtggaaccgtgtctctactaagaatacaaaaattggccgggcctggtggcaggtgcctgtaatcccagctactcgggaggctgaggcaggagaatcgcttgaacctgtgggtcagaggttgcagtgaaccaagattgcgccactgcactccagcctgggtgacagagcgagactctgtttcaaaaaaacccaggccgatggctgggcacggtggctcacacctgtaatcccagcactttgggagcctgaggtgggtggatcacaaggtcaggagatcgagaccatcctggctaacacagtgaaaccccatctctactaaaaatgcaaaaaattagccgggcgtggtggtgggcgcctgcagtctcagctactcgggaggctgaggcaggagaatggcgtgaacccgggaggcggagcttgtagtgagccgagattgcgccactgcacttcagcctgggcaacagagcgagactccatctc

SEQ ID NO: 185 - DNA, 2251 bp, Homo sapiens
tcccgctccccagtccggggacttcgataggattggagaaggtttgtgttcccgacgccttggtagttggcataggctaaagaaaagggatctcagccccgaggaagggtcaccctcctagagatagctactaccccgtctcaggagaccctggtatttctagagcacgctttgctttcaccaaacccaaggaggtgacaggaggagcccccgcacaggacctaagaatgctgtgaccagaagcacagctttcctcgaatgttgcaccagagagaacggggcctctgccatcggggaagcttctcccttggagaacagtctcgagtgatatctcacttcttgcccaatgatctgggcttcactgatagctactctcagaaggctttctgtggcatctacagcaaagatggtcaaatattcatgtctgcttgccaagaccagacaatccgactctatgactgccgatatggccgtttccgtaaattcaagagcatcaaggcccgcgacgtaggctggggcttaggcgggccgcccagcagttcatctacagtggctgctccactggcaaagtggttgtgtacgaccttctaagtggccacattgtgaagaagctgaccaaccacaaggcctgtgtgcgtgacgtcagttggcacccctttgaagagaagattgtcagcagttcgtgggacgggaacctgcgtctgtggcagtaccgccaggctgagtacttccaggatgacatgccagaatctgaggaatgtgccagcgcccctgccccagtgccccaatcctctacacccttttcctcaccccagtagatccaacctccagccccatatagggtgaacctcttgataagctctctgcctcctcctccctttctcccttgtggggaatgtttggaggaatcactggcatttgatggggaataacataagcctgggctctgagcctcagctgagccctggaagattctccccatggggcagagtggtctccttacgtgctcacacccagtcagcttgggtccctatctctggccagagtttggcaggactgccattatctggggtgtggcctctgccagcaagagaagtgtcctgggtgtttttaatcatgtttgaatgttaggggttggatcctagagtagatgcctgaggccacatctgaacagacctgtcagccaggcctgccaggtcttcacgttgaggattcaactggccaatcacaggacaggtgtcctggcctttcttcctgaggtctctaggggaggggcatgggtaagggtgtttcctcagcaccctcctggggtggggattatgtctgctgtcatgtctgggtctttagggtaggacaggctgtggtatgagaggcaggagtctccacaaggcttcatgtggccccttatagggcaggccctgccctctgggaaggtcccttcatgctggaggcacacagctttaaggaagtaggttgaagtaggactccttcgtcctctcactggctttggctccctcaataaactgtgtgggaacctggctcagtgtctgtctctctctctcactctctgtttttcctatctgaggtctttcatctcctcacttcaggaaaacacagttcagcaaagtcttcagatgcgatcctgtgtaggagaaaatacccttctggtgccccatgaaaaagggaaataccaaaaccatttgttcactgagccttgcaataggtgctcccttaccaatttcagaagcttccctgcaagtagatatcgagagagcacactttccattagagcctggtaatacccatatcacctctgctctgaggctgggcctgcagctgtgtagtctttggaagaggtagcccctgaacgcagagcctaagagaagcaagtcggccctgacgccaggccccagtgggcgcctcacactcagaacctcataccccagagcaaaccgatggtcagggagagggctagagctcacacccagctcggaatagatcttccctgatgacatttcatgccctctaaggcagtttttaaatgaaggtacacacatccaggggtgttcacaggctttcacagcaagggtacctatttcatggcaaaataggcagttttaaaagaataaacaagctaggtgtggtggctcatgcctgtaatcctagcactttgggaagccaaagctgatggatcgcttgagcccaggagtttgagaccagcctgggcaacatggcaaaaccccatctctac

SEQ ID NO: 186 - DNA, 1879 bp, Homo sapiens
gttagaatagctgatgagacctctattaatacacgaagtttctcaaagtttgtaggaatgagtgcagatgcaacccctcttcatgtagctagaagtgggaatgacactgaagatttcagcaacccttctgcttgctcagatatttatggtgagagtatttcatctcattttacagagtcaacaggaaagttgatagagagcttgtcagattgtgcttcctccttacctataaaaaagattgctggtagtaattataacacttttttggactctgaactcagtatgttaaatgggacaaaagttctttcagacagtgccgtgggcattgacctgggtagtactggtgatacaacagaagcattgcacgaactaagaactgccgaagagttcaaaacagaagagcaagatgactcagggagtatagaatttggtgtatcttttcctgatagggaatcatcatctatggaaacatccatcgaaccaaaagcaactgaaacttctcgcacagagggaattactgccattgaggagagctgggagtctatgtttaacgatgatggtgactgcctggatccacgtcttctacaagagttatcagggaataccaagagcagagagagcatccaggaacctagatctgattactacaatcatgaagttcctgatattgacctcagtgattgtgaattcccacatgtcattgaaatttatgactttccccaagaatttcgtactgaagaccttctacgggttttctgcagttatcaaaagaaaggatttgatattaaatgggtggatgatacacatgccctaggagtattctccagtccaattacagctcgtgatgcgttgggtattaaacacaccatggtgaagattcgtcccttgtcacaggccacaagagcagccaaggccaaagctagagcttatgctgagttcctccagccagcaaaggagcgtcctgagacttcagcagccctagccagaaggttagtcatcagtgcccttggggttcgaagtaagcagagcaaaaccgaacgagaagcagagctcaagaaactgcaagaagccagagagagaaagcggttggaagccaagcaacgggaagacatctgggaaggcagagaccagtctacagtttgaacatcactcaatgaaagggataattccatgaatcagaaaatgtttccatagccttcagataagatgatccttccagagctctatgtacatgcagatgtgcatgttaaagagataaagtgatcgagacaaggactgactgggtatagaaggaagacagactcctgtcttcactcctaaatgcagttctttggaatcaccctactgtggtgggcgtagtagggagccatcagctaggaagaaacgtgggagatgtgaattccaagagttgcctggacagggcaagtcatgttagcgtgggtcacacttccaagatatttaaagcaaatacaaaacagaacagaggattcaaaccgcaagtatgggagatttaggccctgcagaggcagaccattccttagtatctcacaaagcagagtaatactggaggcagagtagggggtggttggagagcagttagtacaaagaggcagaacagtgtctggtttacttggcatacacagaatctgcactgccggttccagaactccaaagttggtgaactacaggagatgtgggtatttagactccaaagtttatactgagctcagtgcctgggaccgctccagctgcactgcagccaggggggataccagcttcattcctcagagtaaaccaaccttgggagctgtgtgccagttccagtgtaagcagtaataccatgttgtaagagggaacattaaagcccattttatgacat

SEQ ID NO: 187 - DNA, 1375 bp, Homo sapiens
ggtcgccgcgccctgacgtccagccgactggcggcgcggtcgcccgggagaccgggaaagccgtttcacacccgtcctagtcgaagtcgaggtgagggacgatggctttcctcagcctgggatgacccggtcctccaaatgcagttccggagtggaggcgtgctcgcacccggggagagagccagaaagctgagccgcggcgccccagcgagagcacgaggccccgggtctggactccgccaccacgctcctctgcggccccttcctggtgtctgccagcccgcggggcccaggcgcggtccgccttcctcccagccccggggaacgcgcggctctgcttcctcacccccgcaccctcctcctcctcctcttccggccactgcaggtccagggggaacggggttagaaagggacagatttgaaagccattccagcagttttgtctggccttgcggttggtttctgtgtggaagagcctgccgcttcaggaaagtcttaggatgtgaactcccgccttcacctgcccctgacctgctcgttgtgggtgattcacgccatgggaatggttctttacgtaagggcttgaaagctgaacgtgagttaatggcctgacgtgacactagtgtgagaaacggaattggaaacgaacaaggacgtgtctgcattttaaaaaatgtcttttcggtgatcttgttagagaggaggttcacaaacacccacgtagctgcagccacttatcactgcacctcttgccaaagtgcggtccacatacgtgcaatgagaaaggattaaagggacttgtttgataacacacgcaaaactatgtaagactaaatttaaaaaattacggattttccctgttgccaaaagggaaagacccttcttttttcttgagaaacttagtatttgtgaatgcttcctctatttaatatgtatgcaaatgtttttaaagacctaggaatgcttttcttgaggacctggaagccatttctttaaaatgtaaacatcaaggaagatagggccccagtctccttgtcactttgggagtttaacctaggtgcgttattcctaattgtaaacacctgtttcgttatggagctgtgcattacttaggaggaaagccgttagctaacacaggtggttaccccaattaccagatgaattaaagaggaaatataaaagaatgtatagaacactatgttaagccctcttacatgaggacacgttaccagtttccttgagaatgtgtaatggattgtgtctccttggctgtataaaagagggatttccttctctctttgtaacctcattagcagattagccgtgatgtgcatcaaagtctagttgaatgcctaataaaattgttgtctttctg

SEQ ID NO: 188 - DNA, 1647 bp, Homo sapiens
tttatgatatttctcacacatactcccacacttacagtacatgtaaacactaatgaaaatatgcaactaaaatctaacccagcaattgcactcctggacatttatgccagagaaaagaaaacacagtcacacaaaaacatgaatgctcctagtggctgtatttgtaacagcaaaaaaagtaatcagcatcaatgtccttcaacaggtgaatggttaaataaactgtggcgcatacataccatgaaatactactctgtaatcaaaaggaggaaacaattgatacacacaagttggatgtatgtccagggaattttgctgggtgaaaaagaaagcccattccaaaagattacaggctatagattccatttacataaaatgacaaacttacagagatacacagcagattagtggttgccacgggtcgtattgggatgggggatccggaggaaagtaggtgtggttataaaagggcaagaactgttcaatatcttgatcgtattggttgatacacgaatctacatgggtgataaaattgtgtagagcttaatacacacacaaacgaataaaagtaaaattgttgaaatacaaataatgtcagtggattgtattgatgtcaatatcttagttgcaatataccatagtttagcaaaatggtagcattggaggatactgggcaaagtgtacaagggacctttttgtattgtttcttacaactgcatatcaaaattatctcaataaaaattgtaataaaggccgggcgcggtggctcacacgcctgtaatcccagcactttgggaggccgaggcgggcggatcacgaggtcaggtgatcaggaccatcctggctaacaccgtgaaactccgtctctactaaaaaaaaacgtacaaaaaattagctggtcgtggtggcgggcgcctgtatcccagctgctcgggaggctgaggcaggagaatggcgtgaacccaggaggtggagcttgcaatgagccgagatcgcgccactgcactccagcctagacgacagagcaagactatgtctcaaaaaaaaaaattgtaataaaaagagaaaaaaaaatccatgtcactctttgtgagcccaaagtggtctaaaaactgctcagcatgctaacatgtaaattctacttatttaaagtagaattgtgacggtatatactaagcctatgttatagttctagtaaaaaataacaaaatcggcagtttttcaactcagtgtctttgacttggttaaacaaatgtgtaattattgtcaaaattttcctcagggaaatgaatatatcatttttgcacttcttgtatggtttaccaaaaagttgagtaaccgcagattgcataattgaaggaagttttgaaaatgaaagctgtaggtaggtgaagtggctcacgcctgtaatccccgcactttgggaggccgaggccggcggatgacctgaggtcaggagtttgagaccagtctggccaacaaggcgaaaccctgtaaattagccaggcatggtgccgtgcgcctgtaatcccagctacccgggaggctgaggcctgagactcgcttgaacccagggggcggagcttggagtgagccgagatcgcacccctgcactccagcctgggcaacagagcgacactccgtctc

SEQ ID NO: 189 - DNA, 1611 bp, Homo sapiens
tttagtagagacagggtttctccatgttggtcaggctggtctcaaactgacctcaggtgatccgcccacctcggcctcccaaagtgctgggattacaggcatgagccactgcgcctggccggacaataatgttttgagctgttgctgagtctggcttttgtgacgggaacttttagcactcaaggagtggccttgtctctggcctgtcccccagtgctcatgggcagccaaggcctggggactgctcaggcagggtagatgtatttgccaggccagctcccgtccctgggacctcagggagtagcttcatccctgaaggctgagtgtcttctgcctcatgtgggtggcccctctgcagggttctcaggcatccagggaagtgggtgccacagcgttgcctccagcctcactggggctggctggactttgctctgacaacacagcagtggctgggcccctgcaactctccagggctcagtttccctgttggccgcactatggcataggcccctgtgtggacaccgatgagctgaccccacaaatgccacctggccgctcccccaggcttcagtggcctaacagctgttgtgtcaggaaccagcttaaagaatctttcttgctttctcaaactctccaggaattcctggtgactggaagggggagtgactcaggccctcaacctctagcaggtaagggtgctacctcctgggtgggcatgcccagttcctcagtgggcccagcgcggcccagcctccgaggaagctctgagcagctggcttggctccgaggtatttttagctacagatccagcccccctccatcaccacaacagtcgagtccaaatcaaacgcgctccaggcaggtggggctggggttctgccagcctcctggccagcaggggtgggtgggcagactggggccagtatcagctgttctgcctggacccaggccgggctgggaaggcacacttgtgcttatttcccgcctccacttctgtgcaagcttgtgctgtcataagcagagatcacagccccatttcttggatggagaaagtggacactgaggtctgaggcttttgaggacagtcaggagccctcctatgggctccagtgatgcactcaccagcttctggtcctcttcttccacctcttagagtgccttggctccctcctgtcgtcctggggaacctcggccccagccctgcctccccagccagtcacagctcctccctggtcaccctgagggagctcagggcccggctggtagctgggttgctctgcttctgtccccgactcctgtggagcctggcaggcaactccatgatctgaccccggttaccttgacagccctgcctggcctcccctctcatggcccagccaccccagaacctgaagaggttttctagctgccgtgcatttgccaggctgggttacccaccctactttccctgcctgccctccagtgctgccaggcctagtgtgccagccagcgctcagccttcagtaaagggttcccctgcttccaacctccattgcactgcttcccctaagactgtgacctcctggaaggctggagcacaactgcctctcaataaacgtgttgcaaaaaagg

SEQ ID NO: 190 - DNA, 2425 bp, Homo sapiens
atccgatttctcaatcttttccccacctttccccgctttctattccacaaagccgccattgtcatcatggcccgttctcaatgagctgttgggtacacctcccagacggggtggtggccgggcagaggggctcctcacttcccagtaggggcggccgggcagaggcgcccctcacatcccggacggggtggctgccgggcggagggtctcctcacttctcagacggggcggccgggcagagacgctcctcacctcccggatggggtcgcggccaggcagaggcgctcctcacatcccagacagggcggcggggcagaggcgctccccacatctcagacgatgggtggccgggcagagacgctcctcactttccagactgggcagccaggcagaggggctcctcacattccagacgatgggcggccaggcagagacgctcctcacttcccagacggggtggcggccgggcagaggctgcaatctcggcactttgggaggctaaggcaggcagctgggaggtggaggttgtagcgagccgagatcacgccactgcactccagcctgggcaccattgagcactgagtgaaccagactccgtctgcaatcccggcacctcgggaggccgaggctggcggatcactcgtggttaggagctggagaccagcccggccaacacagcgaaaccccgtctccaccaaaaaaacacgaaaaccagtcagtcgtggcggcgcgcacctgcaatcgcaggcactcggcaggctgaggcaagagaatcaggcagggaggttgcagtgagccgagatggcagcagtacagtccagctttggctcggcatcagagggagaccgtggagaaagagggagagggaaagctatatcattcttatgtctttgcatcatcatagcttagcatctactcataagtgagaacatatgatatttggtatccattcctgaattactttacttaggataatggcctccagctccgtccaagttgctgcaaaaggtattatttcgttcctttttgtggctgagtagtattccatggtgtatataccacattttctttatccactcattgcttgatgggcagttaggttggttccacatctttgcaattgtgagttgtgctgctccagatatcatctttaactcctttgccttctccacatacatttccaagtcctgttcattctacctccaaaatgtatcttgtatccattcatctctctccatcttcaatctatttcaatgccccatcatctcttgcatggaggagtgtaataattggctaactggcctgttcttacattttaaaatcaaaagatgtgacaggtgaaatgcctatttcagtgtccattgatggttctgcttacacaccacctggctgcctggtgtcgcagtggcagagttgagcagtgtgaaaaagactgcttggccctttacagggaaagcaggtccactgtggcctgtgaggacgagagctctgggcaggctcggacactggcagaccctggtcctggctggccaaggcagcagggtatgtgtttcgggtcactcacagggctcagcaccactcctcatggcttccttactgtttcggcagaggctgacccgcggctgattgagtccctctcccagatgctgtccatgggcttctctgatgaaggcggctggctcaccaggctcctgcagaccaagaactatgacatcggagcggctctggacaccatccagtattcaaagcatcccccgccgttgtgaccacttttgcccacctcttctgcgtgcccctcttctgtctcatagttgtgttaagcttgcgtagaattgcaggtctctgtacgggccagtttctctgccttcttccaggatcaggggttagggtgcaagaagccatttagggcagcaaaacaagtgacatgaagggagggtccctgtgtgtgtgtgtgctgatgtttcctgggtgccctggctccttgcagcagggctgggcctgcgagacccaaggctcactgcagcgcgctcctgacccctccctgcaggggctacgttagcagcccagcacatagcttgcctaatggctttcactttctcttttgttttaaatgactcataggtccctgacatttagttgattattttctgctacagacctggtacactctgattttagataaagtaagcctaggtgttgtcagcaggcaggctggggaggccagtgttgtgggcttcctgctgggactgagaaggctcacgaagggcatccgcaatgttggtttcactgagagctgcctcctggtctcttcaccactgtagttctctcatttccaaaccatcagctgcttttaaaataagatctctttgtagccatcctgttaaatttgtaaacaatctaattaaatggcatcagcactttaacc

SEQ ID NO: 191 - DNA, 2290 bp, Homo sapiens
aagcaacccagagccctcctcccgcctgctctgtgtaggagacagcctgcggagcccactgccggcgcgcagagagcccagcagctcttgagtccaggaagcaagggtgggaggagggacgagccagtggcaatgacccagacccggacgacccccattgctgagccagcggagctgcttggtgagtggcctccaggcggcatctcttgctctcagcccggagggggttttggggacccaggctgtggggctgcctcttcccatgccttcagttcaccccgatatggggtgaaaaaccctagagaccctcgggagtcggtccaccaagggaggtccagactccccaggaatgttgcctggggaggggtgtcgcggtggggggggtgacccaggcccaccctctgcagggcacttaaaatgctccacatccccagtggatgcctcctgtcacgcatcacaccgtggtgtatttgagatcccatctgccacttgggctggagggaaatggatgtttttgggtttcttgtcattgcttcctgcggattccattttactcctgttcgtttatggcctcaaacatgaatttgaagaattttgccctccctggcagtattgggaagaagattcttttgttcaagtccgtttggacaattagatgggagtattaacaaaaggtcgggctgggcacagtggctcacacctgtaatcccaacactttgggaggccaaagagcaaggatcgcttgagcccaggagttcgaaaccagctggggcaacagagggagaacttgtctctacaaaaaatttaaaaatcagctgggcatggtggtgcgcgcctgtagcccaagctatatgggaagctgaggtgggaggattgcttgagcccgagagtttgaggctgctgtgagctgagatcacgccactgcattccagcctgggcaacaaagcaagaccctgtctgaggtcaactctgcccccaggaaggtatgggaccttgcaatcttatctaggttgcgtctttttcattgaaatcacgaaatcattaaggtaagtagggaagggtcaagatagctaagatgagtgaggggacacagacaccaataaaagttctaactttgaggactcctccagtattcttttcatcctaaagcttctggcctatcagctagttcagacacagcctaggagtctcaagccagtacaggaacaaggaggcaggttgccctcttggggcaaagctgtggccccacccttgatgaagaacgcctgtaggaacccaggacctgtgagcaggtagagtcctgaaggtttaagattctgtggagcaggtatgtgcagtgccagtgcgcaaccagcaactgatggacaggaataggtagagctgctctgagtgcattcctttggcaagcctgggccagaggcacacaggaaggaattagtcatgtggtatcataggccaggtgtggaagcaaatgagccagagtggaaccaggaccagccagggccaaggcagggagaagagttcctctagctgacattgacaggaaagcagagtcaaaaacctggaatggtttgcttcaaagactggatgctgcctaatgacctcgaaggccagtgatacctggactcttgagtgagcaaggcagattttggaatgagcacacaacttcaagtaagcccggagatgattacctgtagtttctgctgctcttaggggcagaatcatctgagaactgattgaggagtgcatgtataccccagagactagtgcactctaggataaaaggagtcattcagcccttacttttggttggatgcagggtgtagtttcaataaaatgtcacagaacaaatttctaagacctttaggttgagtgagtgttagagtttgtctagtagtatatttctcatcagttacctatttagctgttctgcataggcctttgagataaggaaataagtaagataaattctccccagaaaccgcaaaacaattataatgttgagagaagaatgaagtagtaactctgtctgtactgaagaaggaattcggtgtacagaaaagaggtcactgcctgaggtcgggagttcaagatcagcctggccaacatggtgaaaccccatctctacaaaaatacagaaattagtcgggcatgatggtgggtgcctgtaatcccagctactcgggaggctgaggcaggagaattgctggaacctgggaggtggaagttgcagtgagccgagactgtgccattgcactctggcctgggcaactgagcgagactccgtctc

SEQ ID NO: 192 - DNA, 2028 bp, Homo sapiens
agaagtactgcccgagggaggagcggctccgaggaccgggcagcgcatttggggtgcccgctacagggccccccaagaggctgccaggtcgggagcgcagcctgaggccacggggggaagggggtgggtgggctgagagcagctcggcggcgagactggcccgccgccccttccccccacacccgtcgaccttgtgggcagaagcttcccagagctccttaggccggcgcgatggcgactgctgtggagacggaggcctgtcagccgacggatgcgagttgggaaagtggcggcggcggagacgacgagatgaagcaggcgcttccggagcttgagtcctccccacaaaatggcggcggcggcggcctcaacatcgctgagcccagcggcggcgctgggcgtgaggagaacgcgggggccgaggccgcccagagcctcagccacgggcagcctcaggactcctctgaggcgggcgcggccgccctgcccagaggccccgaagagcccgaaaggcctgttaggaggagttttcagatccccaggaagagcagagaaaagaaagcacttttccagccattaactccaggctctcgagaatttgaagatgttgtaaatattctccattcttcttaccttgaaccaacctcagtaacaaattttaactacagacgtgcttgcttggtacacaatgagcttttggaaaaggagtttacagaaaagcgaagagaactgaagtttgatggtcgtttagataaggaactttcagaatcctatgcatttctgatggttgatcgataccaggttcaaaccatatgtgaaaaaggattacatgtgggtcagtccaaaataacaattcttggcagtccttccatgggtgtctatctttctaggtatgctgatttattacaagcgaatcctttggacacgggggcaatgggtgatgttgtgatttttaaaataatgaagggtaaaataaagagtatatatgaccccatgggtgtaaaaagtttggaatctatgttaaataagagtgctttggaccccacaccaaagcatgaatgtcacgtgtcaaagaatgccaatcgaattacatcacttttggcttacagagcctatgagcttactcagtattatttttatgagtatggctttgatgagctaaggcgaagaccaagacacgtttgtccatatgcagttgtgtcttttacttacaaagatgatatacaaactccgaagtttgtaccttcatcaagatctaacagctttaatacagatagaaacatagataaatataactataccttgtggaaaggacagcttttaaataaaggaaaacttttgtgttatatttctctgaggtcagccactcgtgcttttttgcctatcaaactacctgagaaattagatgttgaaacagttatgagtattgatcatctgaaacagaaaatccctccagcactgttttataaggaaacatacttaggtccaaatgaagttttgaagaatggaatgtattgcagcctttatgaagttgtggaaaagacaagaattggaagtaacatggagagtttactgcaaaaactagacagagaaaaacttgttcttgttaaacctttgggagaccgaggatacctttttcttctctccccttatcagatggttcctccatatgaatatcagactgccaagtctcgagtcctacatgctttgtttctatttcaagaacctagaagcatagttacttcacaaaaaggttcaaccaatgcagcaccacaggagaggcatgagagcatgccagatgtattaaaaatagctcagtttttacaattttctttgattcagtgtcgaaaggaattcaaaaatataagcgccataaattttcattctgttgtcgaaaagtatgtaagtgaattttttaagcgaggttttggttcaggtaaacgagagtttattatgtttccatatgattcacgattagatgataaaaaattcttatactcagctcccagaaataaatcccatattgat

SEQ ID NO: 193 - DNA, 2019 bp, Homo sapiens
aatgaaaatcctggagaacagagtggaagaaacgcgtattccacatttcctgttgattttctttcctccctaaacactgacctcccgcagtcttcactagcaggtgaggtcacctgtagaggtcatgctgcggagtcccgagtccctgattatattcaagacgtggagctctctttttcccgtcctgctttctttccagaagtgcctcagatgcatcctccccttctcttttctccacatgaagacgtcactgaccatcttctctggtttgctttccaacaccgagcaccaagtgcttcaaaggtcatggtgccctggggccgagagctacttatgtgggcatttataaccaaataaatattgaaatggcccacaaagcaaatgttagtggtaaccaacagcggtaaaactgggtacatgggaccctgaaccttcttgaatattccccatgagaccctgggccgaccttcgggctttccagtgtgctcagaaaatcctccgtggctcccagccccagcttagtctttcaacggtcctcggactgaagcaagagacagggaaggaattgtccaaggttttccagcatgctgagaacacttaccatggtggagcctggcacgtactggctctttgatgcatgtgtattggtctcaagtagccagaagcatctcctctgagagcccttgccctccagtttaaatggcaaatggaagggaatgggttctggaaggccccaggtgggctggggtgggttctggagaccatcttccaactcctgttcaggaggagggttggtcagatcagctctgtggccacctgggctctggaggggcgagatacgggcaggtgcggccacaggagggagagcaccatgtgcgggggaagcccacagctggaaccaaaaggccccaggagggatcctggctctgacatctcccagccgtgtggccttgggcaaggtccctgacttggacctcagcctcctcatctgtaaaacaggcagaacagtaataccgaccttgtaggttgtatagagttcatatacatcaagcacttaccacagtgcctggcggaccgcatgccctaaacacacaatccgtgaaatgaatccatcagcaagcagctgctaggggcagtgtggggcagagaggcagctgcctgctggaactggctgacaggaggatgagtgtgtggcaggaggaacgctctgcacagaggacactaggtagcgtcacctgtctcttaccctgtgtctccactggaatggaatgtcagactcgcaccatgcattcctttccctgccaaaacgcctcctcttagcagtgagcaagaaagttgttcgagtggatgaagccaaaagcccatttggcaagagtgctgttttggaaaatgcttagcggtgtgggttgggatgaggttttctgtgcctttccattatttcttcagcttcatgtaaccctgactgagcaatgctcagcagagtgaaggctgggcagcagatggacaagattttctcaaactcctttttaagccaatttcaaaatagagagagggaaaaatccttgttttctcttttcggttttgagaggtttcatatgcagacacaattttaaattttattttttttgcccccaatgagatgtttggagatggtggtactagaacaggaaggaatttataagtattggggaatttttcatcccaattcccatatcctcctataattcaaggagtgaatgggtagtgtttttgtttttgtgagaggggtggcggagggtagagagagaaagagagagagacagagagagattacatagaggtgtccaaaatgaacacagtaaaaaccagttttgattaattctgcaatattaagtaggcagccaaaaattttggtctgcttaattcttagctcatctaagtctccagttgactgattgattgattgaatgacttattcaacatgcgctagccagacactggtctagggcccaggaattcagcaataaatgaaacaagacc

SEQ ID NO: 194 - DNA, 2200 bp, Homo sapiens
gtgccgggcggagaagcggcgcgagccgggcgctgcgaacgttcgccgcgggggtggctccggggcctgagtaggcgctgccgctgcctcagccgagggggctgggccggagcgtgcggaggagtgaggccgcaggaaagtgggaacaagcggaagaccatggcagagaagaggcagctgttcatagaaatgcgtgctcagaattttgatgtcatacgactatcaacttacagaacagcctgcaaattacgatttgtacaaaaacgatgcaaccttcatcttgttgatatctggaacatgattgaagccttccgaaacaatggccttaatacactggaccataccaccgagatcagtgtgtcccgcctcgaaactgtcatctcctccatctactatcagttgaacaagcgccttccttctactcaccaaattagtgtggaacaatctatcagcctcctcctcaactttatgattgctgcatatgacagtgagggccgaggcaagttgacggtattttcagttaaagctatgttagcaaccatgtgtggtggaaaaatgctggacaaattgagatatgttttctcccagatgtcagattccaatggcttaatgatatttagcaagtttgaccagtttctgaaggaagttctgaagctcccaacagctgtctttgaagggccatcttttggttacacagagcactcagtccgcacctgttttccacagcagagaaagataatgctaaatatgtttttagacaatgatggctgaccctcctccccagtgccttgtctggctacctctcatgcacaggcttgcccatgttgagaatgtcttccatcccgtggagtgctcctactgccgatgtgagagtatgatgggtttccggtaccgatgccagcagtgccacaactatcagctctgccagaattgcttttggcgtggccatgccggcggccctcacagcaaccagcaccagatgaaggagcattcctcttggaaatctcctgcaaagaagctgagccatgcaattagtaaatctttggggtgtgtacccacgagagaacccccgcatcctgtttttcctgagcaaccagagaaaccatttgaccttgcacatgtcctctggagtgcccactcccaccaagagtgttctggacagtcctagccgactggatgaggaacaccgtcttatagctcgctatgctgcccggctggctgcagaagcaggaaacgtgactcgtcctcccactgacttgagctttaactttgatgccaacaaacaacaaagacagcttattgcagaactggaaaacaaaaacagagagatcctgcaggagattcagcgtctccgcctggaacacgagcaggcctcccagcccacccctgagaaggcacagcagaaccccacgctgctggcggagctgcggctgctgaggcaaaggaaggatgaactggagcagaggatgtcggccctgcaggagagcaggcgggagctgatggtccagctggaagagctgatgaagttgctgaaggaggaagagcaaaagcaggcagctcaggccacagggtcaccacatacatcgcccacccatggaggcggccggccaatgcccatgccagtgcgctccacgtctgccggctccacccccacccactgtccgcaggactcgctgagcggagtcgggggagacgtgcaggaggccttcgcacaaggtacgaggagaaacctccgcaatgacctgctggtggcagctgactccatcaccaacaccatgtcatccctggtgaaggagctccattcagcagaggaaggtgcagaggaagaagaagagaagatgcagaatgggaaagacagaggttagcagaggagccggacacagaggaagctcaggcacagaggacgaggagcaagctggcgccgacatggcgaaggcaaggtcttcccccagaggcacattcctctccatctttccaccgcacacctggaccaggcttgcaggctgccagacgtcactccacccgccagggagaggggagccagagccggtgggaagcggggaggggctgcgtggcacagctagtgggcctccccctgcacagccctgcatgtactagcaccttcatcactcccctcagggcatggtctcatctccgcatcaggaattcacctggaggttgaaaagagaaaagaaaaggc

SEQ ID NO: 195 - DNA, 2341 bp, Homo sapiens
ttagtgcagttcagtcagttttgacagatgttgtttaaccaccaccctgtcaatacatggttgcctcccagcctccccgcagctggccaccgtggagcatcatccctagtgcagttcagtcagttgtgacagatgttgtgtgcctgtttaaccaccaccctgtcaatacatggttgcatcccagcctccccacagctggccaccgtggagcatcgtcccaccatggagcagcctggccctgggcggtggctctcccagctgttcctctctgtcaccgcgttgttccttctcaccacgtcccgttctggcgacggacacctgtctccgtttcacttgggtggcacccaggagtgctgctgtcgcccagggcctgtgtgtggttagtgctgcaagaacatcccacagcttctccaggtggccgtgccactttgcactcccgccagctacgtacgagacgccaggcgctcccatgccagccctcagttttcatgctgacagtgtgtgtggtgctcaggcctctgccgagttgtgggtgcctccagagagtggtccctgggcatggcccacagggttctgcatggcggatcctggacccgagggctgtgtgagcctcggcgtgcccgttgacctgctgtgctctctgtttcagatgtaccggctcacgctgcgcacaagtaaggaagccgtttctcagagattatgtgaattgctctcagcgcagttttagtcctgaggatggaagaccaggctcgtgtgtcttgtgttgtcttcgtctgtgccgtttgtcttcgtggccatcctgcagatgagcaccgtgtccagtgccacagcacaaggcgcctccccgccccgccgccccacacctctcccctttgggctggacgggaacacacgtgtgtggctcaggaggaaaagctcagcctggactgtggcagccacggcagaaggtggatcttgggatcaatttttataaaaattgagacagttctgtggttaaatctacaaattaaagggaaattagaagttggcgtgaacgtggcgtttgtgggagtgtcactgagatggcccgtgctgccgcccaccccgcctcggagcctctgggagtagcagtgccactgtgcatggcgtgggctgagccttggtgtgtggccgtcctggtggctgcacacctggcgtcgtcctgggcccttgggaggagcacagctgaccctggttttgctgcagtcccagctggactgttttcccaggcaggattttaatctagaatttagaaacatttgtatttgtaatgacttctggcaaaagcacgtgtcctggccggatgtaactgttctcctttcccagctcctgtttatgaagggcgtctgttatgctcctgcagtcgccgaggccttggatgtgcagccaggggaggagcgtcctgccggccccgcagggcccccaggactccagggtaaagtgtgggccggtggcgcaagactcagaggtgtgctcgtctctttcctgtcagagtgggcgtccccaggccacggtgcaggcctgagtccttccaccggccccgtccagtcgtccctggaggggctgtggaggagggacgcctctgtgtggtcaggaagtgaaggggccattggccgcatgccatgtgccacctgcggcttgtgtctcacctgtcatctggactcagcacccaggctgcacgtctgacacctgagaggcgagagagtggggccggcctaggagccaaggctggggccttgcgctctgtccccaggatggtggccttgtttgtcctaaacacacccagcacaggttctggcttcctgacatgctgtggaggcagggagggtgggtggccacatgtgcttgagggttttcaccctggccctcagttgcctgctgtgcgggtccctggggcagctgcaggggctcatggacccatcagggtctccacagctcccctgcagtgtgtgcaccccacaatgtctgcggctcttcttccggcgtgtcgggctttgatcacagcatagccacgtcagtggcgtgcgcctctcgcacaggccattctgggtctggtggtgccaggtgccgtgacacgccgtgctgggcttgtgctgcagctgggtggtgtggccctcattctcatgttccagctgctgggcagtgctctgcctgtgtgctgcgcctgcaggctgcgtgtgctgccgtggatctcctgcatcccttgacccctcccgccatcagaggaaaggctgctccccgaggcaccgcttccctgtgcggcgctgcagaggggccctcagtgtggcactcctcgtcaaagaaaaataaaggctagaactgc

SEQ ID NO: 196 - DNA, 1955 bp, Homo sapiens
tagaggaggcttatcattaataggaaggggctatagggaggctaggatctgggggtaagctgagaagtcctcctgtgggatgtaagttgtaagctttgcatagttgtggattctccttaaaagaaagcttggacataaggtatttcactccatttgccttctcccttacagaaaaggtcaagctgcaggatagtattgtaatttatacttccctcaggtggccatttttccccatcagagagagaatattggggccaggctgtagtgcagaaaaaaatgagccacctctttttcagggtttgtgggtcaaactggtcccaatggcttagatgcatttcaagggtgagcccgttgatgcctgagtgtttcccatctgggtcgccaaaatgtatccggactttattccttctggtgcgttcttggtctcactgacttcaacaatgaagccgtggacctcgcagtgagtgttacagtcttaaagatggtgcatccagagttgtttgttcttcccagtgggtttgtggtcttgctgacttcaggaatgaagccgcagaccctcacggtgagtgttatggctcttaaagttggtgtggacccaaagaatgagcagcagcaagatttattatgaagaacaaaagaacaaagcttccacagtgtggaaggggacccaagtgggttgctgctgctggcagggggtggccagcttttattctcttatttgtccccgcccacgtcctgctgattggtccattttacagagtgctgattggtccactttacagcgtgctgattggtatgtttacaatcctttagctagacacagagcgctgattggtacatttttacagagtgctgattggtgcatttacaatcctttagctacacagaaaagttctccaagtccccatttgacccaggaagtccagctggcttcacctctcagtatgaacctttaatatgagctctgccctctaactttgtgagcgtacagcacagtaacattcacctcaggcccggtgctgcccacccatctggaggactgattcttctggcacaggggaaacttgatctgaattgagagcagctcccccttccctctcctgtgggatctgcatgtctcccaagttccacagtaatgctggtgtggacactgcgttggggaggcctcgtgttgaaagcccatggagtcagggacgtggcaggatcactggctgtatagcagcagctgagggtccctgtcctgcagttttctccaccacagtcagctgctccgggacagtaggtggaaagtcagaattcactaagatggggacttttccaggcaaacaaagcagaagggtcatttagcacagtgtctggtacaggggaaatgcccaaaacacacagcttgttactatctagcgccagcctccccttcccttctcccttccaactgcgcatgggactctccctctctgactgtgcagcatgtagagccaggccctgtagccagcagccctgagtccagctgtgggaccttgtgctagctgcttgccctctctgagcttctgtttcatctgtaaactgagatgataataactctttcttcacagagttgctgggagcctgagcacctttcgtttttcggctcagagaaagccaagtgcaacttgcttcagtcatcctgaacctgagttcaaccaaccgcagccacctacgtttgaccccagcgagatcaaagttgtatatctgaggtgtaccagtggtgaagtcagtgccacatctgcactggcccccaaggtcagcttcctgggtctgtctccaaaaatggttgctgatgacatcaccaaccattgactggaagagtctgaggatgatagtgaaactgaccagccacagcagacaggcccagattgaggtgatgccttctgcctctgccctgatcgtcacaaccctcaggaaccaccgacagaaag

SEQ ID NO: 197 - DNA, 1832 bp, Homo sapiens
agttccttcagtctcagccgccaactccggaggcgcggtgctcggcccgggagcgcgagcgggaggagcagagacccgcagccgggagcccgagcgcgggcgatgcaggctccgcgagcggcacctgcggctcctctaagctacgaccgtcgtctccgctgctgtcgcctcctctgatgcgcttgccctctcccggccccgggactccgggagaatgtgggtcctaggcatcgcggcaactttttgcggattgttcttgcttccaggctttgcgctgcaaatccagtgctaccagtgtgaagaattccagctgaacaacgactgctcctcccccgagttcattgtgaattgcacggtgaacgttcaagacatgtgtcagaaagaagtgatggagcaaagtgccgggatcatgtaccgcaagtcctgtgcatcatcagcggcctgtctcatcgcctctgccgggtaccagtccttctgctccccagggaaactgaactcagtttgcatcagctgctgcaacacccctctttgtaacgggccaaggcccaagaaaaggggaagttctgcctcggccctcaggccagggctccgcaccaccatcctgttcctcaaattagccctcttctcggcacactgctgaagctgaaggagatgccaccccctcctgcattgttcttccagccctcgcccccaaccccccacctccctgagtgagtttcttctgggtgtccttttattctgggtagggagcgggagtccgtgttctcttttgttcctgtgcaaataatgaaagagctcggtaaagcattctgaataaattcagcctgactgaattttcagtatgtacttgaaggaaggaggtggagtgaaagttcacccccatgtctgtgtaaccggagtcaaggccaggctggcagagtcagtccttagaagtcactgaggtgggcatctgccttttgtaaagcctccagtgtccattccatccctgatgggggcatagtttgagactgcagagtgagagtgacgttttcttagggctggagggccagttcccactcaaggctccctcgcttgacattcaaacttcatgctcctgaaaaccattctctgcagcagaattggctggtttcgcgcctgagttgggctctagtgactcgagactcaatgactgggacttagactggggctcggcctcgctctgaaaagtgcttaagaaaatcttctcagttctccttgcagaggactggcgccgggacgcgaagagcaacgggcgctgcacaaagcgggcgctgtcggtggtggagtgcgcatgtacgcgcaggcgcttctcgtggttggcgtgctgcagcgacaggcggcagcacagcacctgcacgaacacccgccgaaactgctgcgaggacaccgtgtacaggagcgggttgatgaccgagctgaggtagaaaaacgtctccgagaaggggaggaggatcatgaacgcccggaagtaggacctcgtccagtcgtgcttgggtttggccgcagccatgatcctccgaatctggttgggcatccagcatacggccaatgtcacaacaatcagccctgggcagacacgagcaggagggagagacagagaaaagaaaaacacagcatgagaacacagtaaatgaataaaaccataaaatatttagcccctctgttctgtgcttactggccaggaaatggtaccaatttttcagtgttggacttgacagcttcttttgccacaagcaagagagaatttaacactgtttcaaacccgggggagttggctgtgttaaagaaagaccattaaatgctttagacagtgt

SEQ ID NO: 198 - DNA, 1822 bp, Homo sapiens
atgtcatgccggaagatcgcacagctggccgtgtcctggcaggccacggcgtatgcctccaaggacggggtcctgaccgaggccatgatggacgcctgcgtgcaagactttgtccagcagcaccagcagatgatgcgctggctgaagggggagaggcctgggcccgaggacgagcaaccctcatcctgagtccatggggagaccacacctcacggagcctggccgcggacccctcccacccctgcctttgcggccccgcacatttaggaaatactccccgtaataaagtcccacgggggccgcaccgctgtgtctattggctgacacggggcggggtttggggccccctaacgtccccctggggtcaaaggtgacagaaaaggcagaagctggggctttctggaggatttaaccacagaggggtgggcttcacaggaggtggctgccacggcggggccgggtgcccgtgccccatcctgaggccgtgcatacgcgggtgccccttcgcctccctcccctccgccagagctgcctgtggccagacacacggtggagggaagtgcacgcgaaacagacacagcggcttcaaatagatgccgcccctgcccgcgctttgcagctagtccctgcaaaccttgatgatggggctgggcgcggtggctcacgcctggaatctcagcgaggccaaggagagtggatcacctgaggtcgggagttccagaccagcctggccaacatggtgaaactccatctctcctaaaaaaaaaaaaaaaaaaaaaaaaaaaaaaaaaaaaattagccggccgtggtggcaagtgcctgaaatcccaggtactcaggaggctgaggcaggagaatcacttgagcccgggaagtggaggttgcactgagctgagaccatggaattgcactgcagcatgggcaacaagagtcaaactccctctaaaaaaaaaaaaaaaaaaagggccaggtggcacatgccggtggtcccagcttcttggcttggaggctgaggtaggaggatcgcctgagcatgggaggcagaggttgcagtgagccaagatcgcaccattgcactccagcctggatgatagagtgagactgtacctctaaataaccaaaaccttgattacagccatggggtgggggtgggggtcaggggcgtctgactatggctggggaactcatttggtttttctcctctcttatttttttgggtagagacagggtccctttgttgcccaggctggtctccaactcctgggctcaagcaatcctcctgcctcggcttcctaaagtgttgggattacaggcttgagccaccgtgcctggtctgtttttttttttttttttttttggcaatagagtcttgctcgcccagggtggagtgcagtggtgtgatctcggctcactgcaacctccaccttcagggtgtcaggcctctgggcccaagctaagccatcatatctcctgtgacctgcacttatacatccagatggcctgaagcaactgaagatccacaaaataagtgaaaagagccttaactgatgacattccaccattgtgatttgtttctgccccaccctagctgatcaatgtactttgcaatctcccccacccttaagaaggttctttgtcattctccccacccttgagaatgtactttgtgagatccatcccctgcccgcaaaacattgtccctaactccaccgcctatcccaaaacctgtaagaactagtgataatcccaccaccctttgctgactctctttttgaactcagcccgcctgcacccaggtgaaataaacagccttgttgctcac

SEQ ID NO: 199 - DNA, 1882 bp, Homo sapiens
atccctccgcgccccgctccacacctacgggcccgcgaatctctcgtccccaccctgcacaggaattgggtttgccgccgggcgcgcgcgcgctcgctcccgtcgccggactactttccctcgccgcgcgccccgcctcccgggcccacttcactttcttcggcggaggggcacagctcggcggtgcgtgacgcgtccctctgtgagccgcgtcactattgggcctggcccatggcggaaatgagagcttggcgcccattggtccgaccttccctgcaatgcgtcaaactggggcgagccactgcaaggtggtggtgggtggtcaaggtgaagccccacgacaaggatgccaaaatggaataccaggagtgcaacaagatcgtgaagcagaaggcctttgagcgggccatcgcaggcgacgagcacaagcgctccgtggtggactcgctggacatcgagagcatgaccatcgagggtgagtacagcggacccaagcttgaggacgacaaagtgacaatcaccttcatgaaggggctcatgcagtggtacaaggaccagaagaaactgcaccagaaatgcgcctaccagggtcttgctctatcacccaggctgaagtgcagtggtacggtcacggctcactgcagcctcaacctcctgggcccacgtgatcctcccgcctcagcatcccaagtagctgtgaccgagggcatgcaccaccacacctggctaatttttttatttttatagagatgggtctccctatgttgcgcaggctgatttcgaactcttggcctcaagcaatcctcccaccttggcctggggattacaggcgtgagccaccatgcccagcctccgtgtctttacatttgagaacaatttgtaggttagctttgtctttgtttttttagagatgggggtcttgctgtgtagcccaggctggactcaaactacagggctcaaggcattcttcatctcagcctcttgagtaggtttgactacagtcatgtgccactgtgcccaactacctttgtccgggttcctaggaattctccagaaggcagaatgagtacaaagaaaacacaggcaagtttctgttaaagagttacctgtggccacagttcctctggaagtttaacatagagttaccatatactatgctatcgccatccccaaattcatatgttgaagtcttaactcccagcacctctgaatgtgactgtatttggagatgggggtctttaaagaggtaattaaggtaaaatgaggccgggtgctttggtggctcacagctgtaatcccagcactttgggaagctgaggcgggcagatacctgaggtcaggagttcgagaccagcctgcccaacatggtgaaaccctatctctactaaaaatacaaaatttgcctggcgtggcggcacatgcctgtgatcccagctccttgggaggctgaggcgggagaactgtttgagctagggaggaggaggttgcagtgagccgagatcgtgccattgcactccagcctgggcaacaagagcgaaactttggttcaaaaacaaacaaaaaaaaagtaaaatgaggtcccatgtgtgggcccttaatccaacctgactggtgtctttatgagaaaaggggaccaggacacagccccatgcagagggaagaccatgtgaggatacagggagaagacggccgtctgcacagccaaggagagaggcctcaggagacaccaacctatccaacaccttgattttggacttctggcctccagaattgtgaaaaagttaatttctgtcattgaagccacccattctgtgatagtttgttacagcagtcctcagcgcgtagaatacgatgccatttgtatggcagacagtctcattgt

SEQ ID NO: 200 - DNA, 2490 bp, Homo sapiens
agttcatcagaaaattaggtcacagggtaacctgctgcccccaaactggagaggcagaaaggtagatacagagaatcatgatttgccagagcagaaaccttccctggaatcagcacctgggtgggaaaacctgaactgcaactgacgaatgtctggcagcgtggatgtgtgctgctggttaatgttaggtggcagctggactggagtaaggaatacctagagaatggtgaaacatgacttctgggtgtgtctgtgagggtgtttccagaggagattggcgtgggagtcagtggactgagtggggaagatccgctctcaatgtgggtggcagtatgcaattggttcacggcttgaataaaaacaaaagaggagaaaattttcctctttctgtctctgtctctcctggagctggaagattctccttctcctgccctttggatatcaaaactctaggctcttcagccttggactgagaattatcccagtggcgtccctggttctgaggcttgcagacttggactgagccacgctactggcacctcttgcaaatagtctctcaggggacttctcagcctccattaattgccaggtggctgagaagaatgttggatccccagctccacggcccaccagccatctgggactggcaaacccacaggaacggaaggttcctcagggaccacaaagcccatgtgaggtccctgctgctgaagggattctgaggacaggaggagccaaattacctatccagggtcacccagccaagacaggatggcgctgtggcctgaaagcagctgtccctcctgtgtgcaagctcggactgctgcacccagacagattccatctctgaccttccacttgttcgtctccagctcgccatggccaaacagctgcaggcccgaaggctagacgggatcgactacaacccctgggtggagtttgtgaaactggccagtgagcatgacgtcgtgaacttgggccagggcttcccggatttcccaccaccagactttgccgtgggagcctttcagcacgctgtcagtggagacttcatgcttgaccagtacaccaagacatttgtcatcatcatcgaacccttttttgactgctacgagcccatgacaatgatggcagggggtcgtcctgtgtttgtgtccctgaagccgggtcccatccagaatggagaactgggttccagcagcaactggcagctggaccccatagagctggccggcaaattcacatcacgcaccaaagccctggtcctcaacacccccaacaaccccctgggcaaggtgttctccagggaagagctggagctggtggccagcctttgccagcagcatgacgtggtgtgtatcactgatgaagtctaccagtggatggtctacgacgggcaccagcacatcagcattgtctcagcagctgttctgttcggccttgggcagccagcctccctggcatgtgggaacggaccctgaccatcggcagcgccggcaagaccttcagcgccactggctggaaggtgggctgggtcctgggtccagatcacatcatgaagcacctgcggaccgtgcaccagaactccgtcttccactgccccacgcagagccaggctgcagtagccgagagctttgaacgggagcagctgctcttccgccaacccagcagctactttgtgcagttcccgcaggccatgcagcgctgccgtgaccacatgatacgtagcctacagtcagtgggcctgaagcccatcatccctcagggcagctacttcctcatcacagacatctcagacttcaagaggaagatgcctgacttgcctggagctgtggatgagccctatgacagacgcttcgtcaagtggatgatcaagaacaagggcttggtggccatccctgtctccatcttctatagtgtgccacatcagaagcactttgaccactatatccgcttctgttttgtgaaggatgaagccacgctccaggccatggacgagaagctgcggaagtggaaggtggaactctagccctgaagtcacgccttggccctgacatccccacatgcccgcagagatcctctttgagtgtctgtctttgtccaggtttcagacatttctaggttggggaagatgctattgggaaacctcttctccgtgacacagaatgttctgggtgggagccgcccttcttcatcttagagaaccaagtgcctcctgtctgaaaggtgagggtggcctgacctgggcctctccctgcccctccataggtgggtttgtagggtcttgtgttgcttctggtctctccaggcttggctgagacggacggtagacttccaccatgtaccgatcacatcccagctctgcatggcccctgctaaggctcaggtataacctcaccttccctggctcatcttggccttggggagttgcctttaggcttgagtcctcaagcctctccttttcgtccataataaaatgtttaagttatt

SEQ ID NO: 201 - DNA, 2181 bp, Homo sapiens
ttcataaagtaaacacactggccctgaaatatggtttgcgtggccatgtgcccattacgaaaagcacagcatcgttgcagaagcaaatacttggatttacacaaagactgcatgctgcagaagtggagcgccgctcactacgcttagaggtcacagaattcaaacgaagtgtgaatgaaatgaaaaaggagcttgacaaagcccagggtctgcaaatgcaattaaatgaatttaagcagtctaaattgatcacccatgagaagtttgaaagtgcatgtgaagaactaaataatgcattacttcgggaagagcaggcacaaatgctattgaatgaacaggcacaacaactacaggaattgaattataaacttgaattgcactccagtgaggaagctgacaaaaaccaaactcttggagaagctgttaagagtctctccgaggcaaagatggagctgagaagaaaagatcaatctctgcgtcagctcaatagacatcttacccagctggagcaggacaagcgtcgactggaggagaacatccatgatgcagagagtgccctccgcatggcagccaaagacaaagaatgtgttgctaatcacatgagagcagtagaaaatacgcttcacaaggtcagagatcagatctcgctgtcatggtctgcggcaagtaggaatgacttcaccctacagctacccaaactgcacctggagacctttgcaatggaggggctcaagggcgggccagaggtggtagcatgccaggttagagtctaaataacattgtttgctactgagacatatagaaaaataaattgcactaactggagagaatgaaagcctcaaagtattgtgaataatttaaaggagatgcaaatagatgtttcttcatttttcttctatcatgtaacagtatactttacaaaatactgtttttttctttaaagcctagaactagcctattaaaataatccagaaaagtgtttttaccaaggaaaaatgtgttttatggcaaagtacagtattaaaagaaaatactttcctatcagcagaggacaataagacactaggctgttacctctttaagcaagtctcaatttgttgcttttattgtttgaaaataagtaattttagaaaaaaaataaaataataaatcactttagttgtaaacatcaaaagagatacctgaaatatctcaatattaattccaaaatatatccaacatttcttatgaagtaatttaatttcagcaaagcttaaacttacctgtgttttctattgaagagtattttaccctttaatatttagttttagtgaacattgtaagatgtgcaaattgggtcatttcatttataaaacttaaaatatcaaatcataagaactcaaataactttaaagtacactaataaacttatttttagaaacattcattttcggatgctgtaggtatccttctattttatgtcactattgtattaatattattgtgatcaattttttccttaaggttatttttcttaatctgacaaaatgaaattcagtgtgtccttttaatgcccaaaaccttcattaaaaaaagaaaactatcaacattatgtaaattataggaagcatgatatttcaaaagagactgtccttgttcaatagcactctattttttagtgtatttaaaaggagaaatatctcttaaaacttagtgtgtctttcacatgttgagatttaaaataatctttttcattctagtttatgaccctgtggaattttaattttatagaaaattaatgtcagtgtgtgtgtggagcaatgttaattttttatatgctccatatcctaatttaatttgttattagtaccaaattaatgctctacaaggaaaaaaatactcattgcttctttcattagattgtccaatatgtctaaaatatatataattataaaagtaagcataaaatatttttcttctctgttatagggtagattgctgtactgttatttaagatgagatttaaaatgtgtattttaaatttgattgtcagtatttatgaattcatcattactatgaatacagtctgatttgagatttttctagtggttgtaaaataatcctttacttggctatttcaattcagaatctcacaaggcttagtatttgtcgtaatttacaagtaaagacttcctcaaaact

SEQ ID NO: 202 - DNA, 1670 bp, Homo sapiens
aatggggacctggaacctgggcgtactagagtgccgcgcgtagggctccaggtcgctggcttctgcgctttcttcctctccaaagttgagtatctcctatctgtgtcctcatacatactgccgcctgaggtgccatggcccccaagccgggggccgagtggagcacagccctgtcccatctggtgctgggagtggtgtctctgcacgcagccgtgagcacagccgaggcaagtcgaggggctgctgctggcttcctgctccaggtcttggctgccaccaccacgctggccccagggctgagcacacatgaagactgccttgctggagcctgggtggccaccgtcatcggccttccccttctggccttcgatttccactggtgtactaatggtcacttgatgtgcgctggctgttttatccacctactagcagatgcccggctgaaggaggagcaggccacgtgccccaattgtcgttgtgagatcagtaagagcctctgctgccggaacctggccgtggagaaagccgtgagcgagctgccttcagagtgtggcttctgcctgcgccagtttccccgctccctcctggagaggcaccagaaagaggaatgccaggacagggtaacccagtgcaagtacaaacgcatcggctgcccatggcacggccccttccatgagctgacggtgcacgaggctgcgtgcgcccacccgaccaagacaggcagtgagctgatggagatcctggatgggatggaccagagccaccgcaaggagatgcagctgtacaacagcatcttcagcctgctcagcttcgagaagattggctacacagaggtccagttccggccgtaccgcacagacgacttcatcacgcgcctgtactatgagacgcccaggttcacagtgctgaaccagacgtgggtcctgaaggctcgagtcaacgactcggagcgtaaccccaacctgtcctgcaagcgtacgctctccttccagctcctcctcaagagcaaggtcacggcaccgctggagtgctccttcctgctgctcaagggcccctacgacgacgtgaggatcagccccgtcatctaccactttgtcttcaccaacgagagcaacgagacggactacgtgccactgcccatcattgactccgtggagtgcaacaagctgctggctgccaagaacatcaacctgcggctcttcctgttccagatacagaagtagggcggggcctcaggatgtccgaggagcccacgggcggcatcccagcaccgctgccctgtccacctggctggcagctgcttcacaggactatctgatcactttagcaaaggaggagaacaaacgaagccaacacagggcaagtctgcatgcgtgcgcgacggggcccccgcctccggctcacccccccgacccctgcctcccctccttccgagggccgccagaggctgggctgacccgaagaggagacggtgcaccaggcgccccgaggctaagagacggtggcagcaaggaggccgagaggcacagcgaccctgccccagcccttctgtgcagtcaggcggcggtgctgctccatccctgcgggttccggcggggcgcgggggccttgctgacatcagacgggatatccgaatatctgatagcaattaaaaggcagccttgtttcgt

SEQ ID NO: 203 - DNA, 1937 bp, Homo sapiens
gagaccgctgcaagtcccggggccctgcctctatcgtcctaggggttccgcgggcaggagcaacccagaagcaccggtgaggccagcgcgtcctcgcagccatgagcagtgagcaggataaatcggccagcaaagaaaaatccaagaaaccagtaagatttctaccacagctgtctatggagaaattagccagcaaagaaaagttcaaggcaccagcaagagctttaccacagctgtctatggtgagtacaaagccccactggcagcaggcagctccgtcattccatttgagtgtaaagcaggatgatgagagtccagaaccatttagtgttaaaaatgaacagtcccatgctgaatacatggaacgttttggaaaaaagggcaaattaccccaccaagttgatgatagttatgttggaccatctacttccaaatcaaagggcaaatctccacataaagaacgagaaaactttagaagtactcttgttaatgtcattatgcaacaagatgctgacttagactcagctgtccctgatggaagcacaattccaaaaccgaccgcttctgctatagagaaagacatcttgagatattactattatattcaccatggaattgatacagaccatgtagccccaatggaagattcttggctagaacacgtactggatttagttccacaacatctgaaagtcttcactgacagcatagttacattatctgatgaaatgagagaggattatcttcttagtgtaaggaaatccatagttgattttgttttaaaagatcctcgagagaaaggagatgataagaagacagatgaacttccagcccatcgtgctgaaatggaaattctgccaaaaccttggaggaaatcttttttagctgcaagcagttatattagggatcacttgaatgcaatgaaccccacaatgctggctgtactagatttgtggcacactaattttaaaaaattacgtttagttgatatcaaagaatttcataattgccaggatgcattagagctgtcaagttttcagaacattatcatgagacacatggactctgccaaagagactctacttaaaatgtggtttccagaagtgcagaatatttattaccaaggtaataaaaaaaagcaattgccaactggtgacagcagtgccaaattggaatcttttttcaactgtgctgctgcacttatgactttacagctgcaggacctcactttagtctccatgcaagatttcacagacttaattgcacaacccccagattctgttagagcttttgaacatccaggtttcatcatgaggctgattcttgataatgacaccattaagtttgaacctgagttgagtgactatatagatatctttctaaatgtttatgacgtcgtgattaaagctgtcagttttgtgccaagagttgagacaaaattgtattccaagtggagaaacaaagcaaaaccaggacatttttacttttctcatattcaaaggtctgtcacctttcagcattctgaagtttcgtctcctcagaactctcattttaagattgtgtcacccttcagtgttcttggctttacatggagatgccaattatgacttccaactttgctcgaccttgaggctttgtttcctggcagcccctcccatgcatccaccttgccggaaactcattaaagcaaagcttagaccaccaaggatcagcagggtccccagggcagctgctcacttctgcacataatgacctttcaactcatgctttctctcattttggtcccttagacttttttttttgttgttatttccttagctatacgttataaaagataaagtcagctttattatcctggcatatttatgtgttttgaattgagtagttgttttctggatatctattcctcatactaccatgaatagaagtctctcaag

SEQ ID NO: 204 - DNA, 1647 bp, Homo sapiens
cggtgtaagaatggtagaggggcttttctcagcattgaattaataattcagtggctcctcgggagtcgaatgggcatttgggacaccagaaggaaaagaaatcatcatagtctaaggttcagttgtagatcaaaaaatgcagccaggccgggcacggtggctcacacctgcaatcccagcactttgggaggccaaggcaggcggatcccttacactcaggagttcaagaccagtctgggcaacatggtaaaaccctgtctctaccaaaaaatacaaaattagccaggcatagtagtgtgtgcctatagtcctaacttgggaggctgagttgggaggatggcttgggcccaggaggtcgaggctgcggtgagccataagcatgccactatactccagcctgggcaacaaagcgagaccctgtctcaaaaaaaaaaagaaactgcagccaagccagcccctaggtctctttctagagcgatcactgatggcaccagggtgagcaggggcactgtatgcatgtggagacaaacagcacatgcctggcacacatgtagggtagggagtgttaaaggcactggctgtcgactcatacacatgatctgaaatctgattctgctttaacccggctacaggagctaaggcctattttttagccctttgggatctgtaaaatcagaatggtacccacctcatggggacatgaaaggattcaaatgaattgatgaagatgggccataaagcccagcacagtccaagtgctcactcactgagagttacggttatcacaggggttgggcccccagcccctcccaggtcatctgctctaccactagctggtaggaaagagcctcctgccctcccaacccccgtcacctacttggcccaaatttggctgcaggctccccgagtgcctgggcttctctacccagggtcctgtctgtcggctgcaccatacgtccctgaccacaaggcatccacgtgcacaggagtatgcgcccagcagctgggaaggaggctgacctcagacggtggcctgtggatcccagctctgtcatttcctggctgggtgacctcaacctagtcaccctttttgagtcttgttttctcagattatgaaataggaaaaatttccttcctcgtgagataagcacgtgccattagctattaaggacacgcacataaatgagctgcatgtgaatccacacatgccattccatgaagacatcaaagaggatcatgtggatctttggtgccttccggttggcccctccctaggtctgtgagggtcagacctgtcctgaggcttttacaaattggcccagaactcatttaaccacagcatcatttcattagagggctgttattagagactgaatgtttgtgtcccccccaaattcctgtgttgaaaggctcacccccactatggtagtgttaggacgtggggcctttgggaggtgatggggttatgagggtggagccccagagagctctcacgccctttccaccatgtgaggttatggtgagaagatggtctctgaggaagctggcccttgccacacaccacatttgccagcgccttcatcttggatgtctatagcctccagaactgtgagaaataaacacttgttgtttaagccaccaaaaaag

SEQ ID NO: 205 - DNA, 1715 bp, Homo sapiens
tgaagcaccattctccatttttaatgtggattttccatccccctttaaacattaaacttttagattcttctagtgaaatacagaaaacacacctgaactgggatgattcttggctgagagatgtcccatggtgtttggcaaacccacggaggggcccacaggcccatgtctggaactgcctggccctcctttaccagtttatcagccttccatctctgctgaggttagaaacagccagaggctctgatataataaagatgagctctgaagaggggctctctctccctcttgtattcagaagaactgaaagttttcataagtctctagagaagcgtggcaactatctgtagcatttttctttgggaattaacctttgcccataattatttctgttcagtagaataaccatgggtttctctattccagtttctagaatataattttcataaatgaggatggtctcctattttgagcttaacatttttctattgctagaaagaatggtactgcctcactccagctccttagtgtgtgatcatggcttgaaatctctgctttctgttatattcggaggtaacatgtataggtcatgtataatggcctcaggcatgatttagaaggcacagactgagcaggctgctttgtgaggtggtgaactccccattcatgagagcattcaatcaatcagaagatgaatagttaatcagatgctgtagttctggttcttgaataaccaggagttcagaataaaatgatctcggagactctgtccattctaagataccatgtttccatgaccctacacacaatagctacacaggtggagcaacatgagtctgagaagctttgcacaaaagaagattgttttccacaaatgaaaatggggtggttaacttctaattgtaccctgtcttagcgttcagatgcattggttccttccccatgtgaccatctctttattcaaagcttaggctgaatgtggattatttttaatttaatgttcatattataaaagcaatgaaacagcaaagtagagcaaaatatcaacaatccaatgactttatcataaaaattatcagcttgatatagtcctgttcttaatataaacatctgtggttaattatagtattatatctttttatttgaaacattcaagttttttttcatgttaccacacagtgtttgggattatattttcaaaataataattgaccagattgtcctatctagtgaatatgcatatagctgactttgttgaacatttataggatgtccatttttccaaagctttaattataaatcatgctgcagtaaatatcttctcgcccaatattccgaattatttcttaagattagagacattaagtgcgagtaccaggtcgaaaactagaagcactttaacagcatttaacagattttgttagagctacattgcattcagtagactggctataccaatatatagttgcacagcaaattcacctcaccttaccagcaagggatattttcattttaaaattgcttggtaacttttctggtttatgtttctcttagtacaagcaagattatattttttaaagtggttcatcatttgaaaagcatctgtagtgttctttgcccatttatcttgtgggatgttaatggtttccttgtcaagttgtgtgaaatatatgtgtgaatttatttttccaaataaaataaagacattaaccttc

SEQ ID NO: 206 - DNA, 2816 bp, Homo sapiens
cgtgacagcaataaccaggaacgaatgaaaaatagaaaaacattgcatagagccaaaaatgaagaccttgaccctgtgttgattgaatgggttcgacaacaaagaagtaaagatacaccactgactggtttgttggtcgtgaaacaagctagaatataccatgaagaactgaactttgaaggagagtgtgaatattcaggaggctggctgcagaaatttaaaaagtgtcttggaatcaagtatcttcaaatctgtggtgaaaaggcttctcctgatgatgaagctactgaaaattacattgatgaatttgctaaggtaatatctgatgaaaatcctagccctgaacaaatttacagtgctgatgaaacagctttgtactggtgctatgttcctagaaaaactttaacaatggctaacaaaagagcaacaacagatgtcaaagatactaagcaaaagttaactgttcttgagtgtgctaatgctgcaggcacacacaagataaaattggcagtgattggaaatagcctatatccaaggtgtttaaaaggtgtgcataatttacctgtacattgttatgcacacaagaaagcatcagtaacgggaaatcttttccaactggtttgataggcactttgtgccagcagcatgagctcattgcaaactggactggaagacaactgcaaaattttgttgtttctagataactgttctgcacaaccctctcctgaacatcttgcgaagagcaatgcttttggcattgactttccccccagtgtgacgtctgtaatacaaccttgtgaccaaggaattctacatgccgtgaagagcaagtataaacagttttttgaaaagcatccttgcttcagttaacagaggcctgaaaatccaggacatccttaaagaatttaatcttaaggatgccatcttcacagttgctaatgcttggaacgacgttgataagtcaacattaacaaatgcttggcatagactttgggctacaattatgtttgaaagtgacctagctgatgaagattttgaaagagttcatgactctaatgagaaaacaatggtagcataattcattacctatgccaaaagtttatcagccaaaagtgtaaataagttagaagaagctaacattgaagaaagggttaacattgataatgatgaacccattgtgcatcctaagagtgatggggaaattgctgagatggtgttaaatgcagatcaatatgaagatggtagtagtaatgatgatgacattatgaatttgggtgaaaaaaatctccatagatcatatggtgaaaatgtgtgaccgattaattgctggccttgaacgatgtacatttatcagtgagcaagagctgatgacaatttactcaattaaagagaaactgcttagacagaaacctgtgttaaggaagcaggtgaaactgggaaaagtctttaataaagctctctgtggtaatgccgcttcatctcttgacaatcctgtttctggctcatcagatgtccagctccaacctggtttcataggcagtggtaatactggaacaacctcttctccaagattctcaggcaatcaaaggtaacaaacgttcattgcatgtatatgtgttatgggttagttttcatcagtataagttttaaattttacttaaaatttccttagaaataagaagctttttcacaagtgacaaaacacattaaaagcttatggtatgtgtggtctatatttatcttcatatttcatttaccaataaacgtatttatttaaaaatgttatttaccaatgaatttactaatatatttttgtaaataaattgtaatattatttatggttttgtttcacttagtgtgaattttcacacatttattcgcagaaatagtaagattaatgtgtttcattacatagtactgtcctgtacccatttggaatgttacaaaatgtacgcaatttatgtagtatattccaaaggattctaatttcatcctgaattccaaaaaattctcatttccaaaacacatttggtccccagagtttttaagagattatagacctgtgattcttttttgttgtgaatgatccagtgaaatgatcaatgtaaaatgtctcacacaaagtaaatgcccattaagtgtagttgctattattaatattgcgttactctacttttaaatgtaagacaagctttttctgacattgaagttagcaatagcataggtaatgatatgcattcttcaagttttattactctaggagatgctttggcaatgtgctgctgataaagtgtattagagtatctcctaaatcttcatccaagaatggaaacattttgcaaatcagaggatagaaaatgttatgctacatcaaattaaattgcatgttcataaaatatgaacacatctagttagcccttattaatcaaagaaatataatatttttatctgctgctaactatcccctcagctccgtgtgccataagcaccacacaaacaataatttaatctcccttgtgagcaaagattgatttttaaccctcttcatataatttcagctactattataagaccttgaacatagctgaatacataaaattggtattctgttttgtaaagaaagctgttattagcctgatgaatgtgaattgattcctgtggccttgtcttctttgttttgtttttttgtaatgtttgttcatttaaaatataagatgtgttgcttttctctcattataaaaggcatacatcgttcttgtagaaaacatggaaaatacaatttataaagaagaaaataaactcatctctaatgtgac

SEQ ID NO: 207 - DNA, 1779 bp, Homo sapiens
attttaacctgcaatgttttatgcaaaattgtatgctcgaatctacaaattgcttgtattacaccaaaaatcgttacttttctttcttcttgccataatcaagcatctgaaaatagtccctgcatgcttctggggaaaaaaaaataggttcaaatcagtcattgtagagaaaggcttacagtatttctcgtttctagaaaagcataacaattcattaattgcctatcttataattcctataaggctgacttggatctctgacttaagtctagaagtgaggttttcacttttatttaatattattgctattattatttaaataattatttgtaaaccacagcttgatttggagttaagtgttgtctgtgtcttcactgtagctggtaatttactatggtattaatttaaagaaataaattcaatacagcatcacgtctgtttgggaacacacattttgctctatgtatattgtaactaaatggttagtaaactttaaggcatgtggtgactaacgtagcccttagataggaggtttgtcatttttaatgtgttgaaaatagtacagacatggtgacagaaagcaggggtaaagttgaacgtctatgagcattgtctgtctgttttcttaactctttacatgatctgtgagcacctgcttcttctcaaagaactcccttagtaatcatttgtgcctaatgcatcccacacatgtggagtatgactggaacacaattgaaagattcctaacaactggctgcggtaaataacccaagttaagagcatgacttaaagtggaggtcttcagtatctctggcactggcaatacatttaagaacatacagagatcacacattatgtgggacagggcctgcagatagacttgaggacagaaaacaaaaacaaaagcagaaactctaaagtggatccttgctgcctgttatgccttttgtggatataatacctataataccaaaatgagttgttatgtttaatttcaaacaaatcccaactggtgtggaagtaattaactgctagtcgatgtaacgtaatcatcaatatgctggtgacatatgatggcatgtcaggaatactgttgtaagaaagggattgttcagtctacctagaacctatgggaaagctgcaagaccatttacatatcagtacaaaactcctttattttattaaaatatgagaattaacttcaatttattaagattacgtattggtcctttaaattattaaaggtttacatttgataggattaatggatttggtagtgaaatatttttatatatataaatttttggttttttattttgagcactattgggaaacataagcaaaattgaaatgcatggtctttcagtgcaaccatacaatttttattcactttgtaatagaatggacaaaaaaactaaggtttatatattaaactaataaaaaggtacagggtaaattatatacatatatgtatgaatgtatatatacttagattaagaaaaaaaaatgactcacattcctgtaatataaaggtccattgctagttgaaaagtgacctcttttctctgtacatagtgaagcccgtatgtatggagttttaatctgtacagaaagaaatgtattattcattggtctttctgctgctggaaagataatagaatagctgattcttacaacaactgtatgatcagggatgagttagagtatttcttttgtctttgctcaaagccatacatatataaatatatataaagattattaataaattcaacaaaaaat

SEQ ID NO: 208 - DNA, 1354 bp, Homo sapiens
ctcgggatttggcgtcggcggctccgggcgcctccagctccggctcgggctccggctccggctccgggcgccgaccaggtccccttggcccccgccgcgcgccctccaacctgctgctgccgccgccgcgccccccaggctctgccagctacccgcgctctgagcccggggccagattcccatggaagcgccgcgatgttcgccccccggctgctggatttccagaagacgaaatacgcgaggttcatgaaccaccgagtccctgcccacaagaggtaccagcccacagagtatgaacatgcggccaactgtgccacccatgctttctggatcatccccagcatcctgggcagctccaacctctacttcctgtcggacgatgactgggagaccatctctgcctggatctacggcctcggcctctcggcctcttcgtggtgtccactgtgtttcacaccatctcctggaagaagagccatctcaggatggtggaacactgtctacacatgttcgaccggatggtcatctatttcttcatagcggcttcctacgcaccctgagtccaagtgaattttatggtgaagaaacatttgtttgaagttcagcaaaatttgctgaaccttcgggagctgggcccctgggcctcccacatgcgctggctggtctggattatggcttccgtgggcaccatctatgtcttcttcttccatgagcgaacagggagctgtgtgcagtttcttcgtggggaggcatgtcctaaggccggcacggcttgtcttcctgccaggtacaagcttgtggagcttctctgctacgtcgtaatgggcttcttccccgccctggtcatcctctccatgcccaacaccgagggcatctgggagctggtgaccggaggggtcttctactgcctgggcatggtcttcttcaagagtgacgggaggatcccctttgcccacgccatctggcatctctttgtagcatttggtgctggtacccactactatgccatctggagcagagtcttgctttgtcacccaggctggagtgcagtgatgcgatctcggctcgctgcaacctctgtctcccgggttcaagagattcttctgcctcggcctcccgagtagctgggactacaggcacccaccaccacgcccagctaatttttgtatttttagtagagacggagtttcaccatgtgggcgatgctggtcttgtactcctgacctcaggtgatctgcccgccttggcctcccaaggtgctgggattgcaggcgtgagccaccgtgcccggccttgatttattttttattttgttcttttaattcacaaataaaaattgtttgtatttatcgtc

SEQ ID NO: 209 - DNA, 1980 bp, Homo sapiens
gttctgtacgataaagttccacagccttacggactggttttgacaacgatcattaaatcttatgttgttcgtatcctcacagtttgattatcacattcactttattaatttattattataattcttagattcctggataaaatgacacccatttttcttaggatcaaaacaagatggcttccaccagagaaagaaaggccaggcacggaactggtccccacgtggctggccattacaactgctgcttctccctgctcccatctcatccccacgaatgtcccactcatgggtggccctgagtcatcgtagaacagtgtgtccatgcctctgcttcctcaggccccaggcatctcatggagagtcctttctagactgccatctcatgccagagggtggagggatttccgcctggcttaccacagttgtgtgtggtttgtttgctggcattctttagcagcaactgcttgagagccagctcttcaattctaggcattcgattcacccagcatcttgccagaagttggctcagaataacaggcagctctccatgctcatccttcccgtagcatttcaaggtaactgtccatctccttcactctagagcaagaagaaaggagaagcctcttctatccattctgttctgtctcctgcactttgtcctgtgagtggagtcaagttaaaggagcttctttcacttccccagagactccaccaggacctcacattcccaagggcattgtagctgccattccatctgttctagggagaacattcatgaaccctgaaaggctgtcctcttctccagctgagcataggtttcgctcgggcgtacaggcagcagacctggttttccaggacacgtgccattcaaggccattgggatgggctgaaaggttgatagcaaaggtcttgatctatcttttgcaggaaccttggtgcttccatcttccacttgccagtcgggtgaccacagaaaagagattctggagagtagaaacttcggtcaagttgccccaagtcagggatgagccttctttccatggagccttccaaagggcaagccgtctgctactgtgtactgtaaattcagagcttcaggagctgaggcctcctgtgcttgggggaaaggtagctgaggagaaagggacaccttctcaccttttgtttacctttgatctggctgaacttagctgcccttaacttctagtttgcttaagtccttattgccttaataaccacctaataagcagtcagaaccaggagagaagcccctcccgtggaatccattgcaagcctgtccccagtctccccactgctgctatgcctgaaaagagccccagccccgtctccaaagcccagggttcgcctcttgctgaaagagcaacgttcccaggctgaggacaaacccaggactgctcaggcggagagatccctgcccccacgttcaccactgacaacccaactccatcctcagtctccgtggcttcagatctggactccgcaccctcctccacctccacctctcttcccagagaccctccccacatcatgctcagtgctgtttctgaagaccatctagacttttgtgttctctggaacattctactcaccttcagctgcagcacatttcttcagcctctccaccaagctctttaaaatgaaaggcagttactgtcttcccttggacagtaatgaatgtatctactgtatgtgcagaccatgtcgagaagtggctgggttaagaaaaaagagggtttttgtaaagcctgtttatttttttaagtcagttttgagcatttctattttaccacccttcacatggttttggggaacccaaattgtatcaaggtctcatgccaaaacaagccaaaagttgttttctttacctttttcctccatgcaccatgatttcaatgattgtttcagtgtcattttaaatgttttcttgtgacatgtactgatgataaaagtcatcttgac

SEQ ID NO: 210 - DNA, 2214 bp, Homo sapiens
aattcagcaggacatcttaatggatctgcacggacaattggggccgctctgattggatacttgggagtaagaacatttgtccctaagcctgttgccactactttgcagtacgttggtggagctgcagccatcctgggcctggtggccatggcctctgatgtggaagggttatatgcagcagtcaaggccctggtttgtgtggtcaagagtaacccactagccagcaaagaaatggaaagaatcaagggctaccagttgctggcaatgttgcttaagaagaaacgttcccttcttaacagccacatcctccatctaactttttctttggtgggaactgttgatagtggacatgagacctccattattccaaattcaactgctttccaggacctcctctgtgattttgaagtctggctccatgcaccatatgaacttcatctttccttatttgaacactttattgaactgctcacagagtccagtgaagcctcaaagaatgccaaattaatgagagaattccagttaatcccaaagctgctcctgactcttcgagatatgtctttatcccagcctactattgctgctattagtaatgtcctgagcttcttactgcaaggttttcctagcagcaatgatctgctcagattctttctggcatggatcaagagaaaagaaaatacaagaaaacagacagaagcaaggcaaggtacttctatggaagggtgagccctcacagatggagcaatggggcgcgcacacctgaacaagggaggggaaggagttcttatccctgatgcatgtgacccctgctgctgtgtccttcccctattggctaaggcttctgacagctttggagattgtgacattggaataaaggaaaaacgtacaggactcatgaagcgctgaaatgttcacaaatatcaagcaaaagtcaatgaaatttattttgagctatttacatcatttaataattgagcaaggtatactcctatgaacaaaatttggagcatgtttgtctctctctgcctggcgtcttcagaatttggaaactagttatggtttataatcagctatagaattttaacacgtgctctcaaatgcaagtttctgataactttggagattgtgacattggaataaaggaagagctggaatgttcatgaatatcaagcaaaagtcatggaaatttattttgagctatttacagcatttaataattgagcaaggtatactcctatgaacaaaatttggaccatgtttgtctctctctgtctgcctggcatctacagaatttggaaactagtttcgttcccagatttcctaaactttccagagaaaatggtcttctccctggctcagcaagaagatgaactttaaacactgagaaactggtcatctccctggctcaaccagaagatgaactttaaacactactctcaatgacttgatgttcccatcactactcctgtcataaagggaggggactcagatattgagaattttatgatactgtgaactgtctggtatgtcatttaagtaagcccgttgctgaaatattttccatgttattagaaagagctgaagagagggattgagatggcttctttattttttgtcttttgggaattaaaggaacctggttcaacaagggcctacacctaagtctcttgttgtaccagagtacaatttaggactgctcctgaggaaggaattagctagaaatctagagagtatgggtaacagatttacatagaataacagcctcagtatttttggttcctctccagtaaagatcacaaagaatattgctaaatcgctaaaacacctttgcaataacgtaagggcttacaactatataccaatgtagctcagttactaaactggagtaaactaatttctcttgtgtagaaaaattggttggctgtggttttatagcagatctgcaattattaatagttatgccgataatcgtttaacagtgcatatgttaatatatatggaaagacaatgtgtatagacagatgtgtaaaattgaaaaataaacatataacaagagagaaacatctatcgaacagacaatatacatacacatcaaacacaacagcagttttagtgaccataatatttatttctcatttttacattgcttactttagtgacaactgaaaatgacagttggcaatgcagctaacagtttcaataaaagtataaaac

SEQ ID NO: 211 - DNA, 2755 bp, Homo sapiens
tttttgtggctggcttgagtgatattcttttttccttaccttttcagtaacaattctagtttctggtaggctttttaattagttagtgaaggagggaaaagccttttttggatgagttgtgtaaacaggaagacctgtttgttattggccttttgataaattagtagctcatgttaacttgtgcaaaagcttcttgtaacttcttagcagaacaggttgatgaggcaagtttgcatcatctgggattttttgggaatgttgggtgacaaaggggaggtagagttgttagaactgtgtgtattacagtttaagcgtaaggaaaataatcttttgttgtcttatactgttgtggttgtttgtttttttagccagaaacaatctcagcattcacttctgatccagcacttctgtcatttgctgaatatttctgcaagccaactgtgaacatgggtcaggtatatattctatggtttgccgagccccaggactagaatttgttattatttctatgcatgggtcacccaaaacatctctactatctatatctatctttgagattgatgacatgcgtcagtcacattggatgacttttgcttggcacgtatagatttgcatagcctaaaactattaaattcagcaactttctaccttgatagaagaaacaacttaaaatttataagacatcagttttgacagatgatagtttctgtcatctacaagaatgatacccatccatattctgctttatgttttcagtgtttaccacctttctcttatttttatgtaatttcattaactgtttcctctgtatattataaccctgctttttattgttcatacacctgttaccttcaagattccaagggtgcttagcagatttttctttatttttttgttttttgttttttgagacagggtcggttttttctgttgcccaggctggagtgcagtgacgtgatcatggctcactgcatccttgacctcccggagtgaagccatccttccacctcagcctcctgagtagctgggactacaggcatgtagccaccatgcctggctacttttttaaaaaaattttttgtagcgatggagtctcactatattgcccaggctggtcttgaacttctgggctcaaatgatcctcccaccttggactcccaaagtgctgggattataggcacgagccactgtgcctggcccagatctttgacttaatccaccatagagacaaggaaagattggatgcatatatggccttcagaaaatttctcaacctctccaaaatgtagtttcctcatttctaaaagtgattataatagaacctaccttacagtattgttttgaggattaagtgaaataaccttcccctctcttttttattgaatctttactatacatgggacactctgctaatacttaaatgtcatttaattatgaccctgagaataggtattttatcattctgggcttacagatgaggaaactgccactgagagatgtcacatgcccaagatctcacagctagtaagagctgggctgtgcactccaggtcacgggtctctaataaagcccatgcccacccttaaccccagctggacttgactctgccgcctcccctaaacttgttctggacagtgttttttttcttgcagctttgttactctgtttcctttctggatcctactcttcccagcccaacccaaggcatagctctgtgatgtcctatctactcattttgtcctagtttggtccattcctctcttctgtagcacttactatccttaactgtctcttgggacttaatttttttttttttattaatgtttaatgttacatgtgctgtggcttttttaaaagattgtagtgttacttttatgtcattcattataaaacttaagaatgggccatagtagtgctatacaattcgtttttgaattgattttggaatatactttgtgctacaaaacttctgattttctgcagaaacaggaaattctggatctcttttcttcagtactctatgaatgtgttacccaggagaccccagagatgttgcctgcatacatagcaatggatcaggctataagaagacttgggagaagagaaatgtctgagacttctgaactttggcagataaagttggtgttagagtttttcagctcccgaagccatcaggagcggctgcagaaccaccctaagcgggggctctttatgaactcggaattcctccctgttgtgaagtgcaccattgataataccctggaccagtggctacaagtcgggggtgatatgtgtgtgcacgcctacctcagcgggcagcccttggaggaatcacagctgagcatgctggcctgcttcctcgtctaccactctgtgccagctccacagcacctgccacctataggactagaagggagcacaagctttgctgaactgctcttcaaatttaagcagctaaaaatgccagtgcgagctttgctgagattggctcctttgcttcttggaaatccacagccaatggtgatgtgactgtgtctggcggtgaacctaccctgaaacgtgacttctgcacaacaaacgtgaccaaacatcaaagctaaagcaatgtttataaagttttatggtataactagggggaaatgagctgcacaaacctcaatgtattttaaatctgttgctgtcatcattaacggtatatgacatataaaagcaagttaaaatttacttttgtaaataaagtttttggtttgtttcc

SEQ ID NO: 212 - DNA, 2717 bp, Homo sapiens
cattagagcggcgcggcagagtgcggcgccccgcagctcctgaggtaagatggcggtgctctttcctctaagctcttgcggttgggctgctatttcgctctttttgtcagctcagagctgctactccgcctcaaagcagtgtcagagtcagtctccttcctgcaggcttccaggagccaggatctccggtgactggagccgtaggacaaaatggcgctcgcataggcttccgaggccaggcccagtcgtgcgctctgaggcaggccgggacaaaggcggcgtgcggggaggcggcgtggccgccgcgtggggctggtgttgtcgcttcccttcgtgctgcagctgtgcgagtcctgaagatacattcagcgtggtgtggttcggggtggggccgggcatggagggacacgctaaagggaggcaaagccacagatgcctgtggagacttggggagggcggcggggacttacggagcgtaccttacggggacgacttctgcatgtcctttggaaactgtccgcgcgatctgtgtggagcaggaattttcgggaagggtaagggctttttggtctttcgtttgaccccgcaggttttggttatgaacaggattcggattcacgtcttgccaaccaatcgggggaggatcactccagtgcccaggtctcaggaacctctgtcttgtgcattcactcatcgtccatgctctcaccctcgtctggaggggcaggagttttgcattaagcatatccttgaagacaagaatgcacccttcaagcagtgtagttatatatcgacgaagaatggaaaaagatgtcccaatgctgccccaaagccagagaagaaagatggggtgtccttctgtgctgaacatgtccgtaggaatgccctggcacttcatgctcaaatgaagaagaccaacccagggcctgtgggtgaaacactcctgtgccagctgagctcatatgctaagacagagctggggtctcagactccagaaagtagtcgcagtgaagccagccgaatactagatgaagacagctggagtgatggggagcaggaacccattactgtggatcagacatggagaggtgaccctgacagtgaagctgatagcatagacagtgatcaagaagatcccctaaaacatgctggtgtctacacggcagaagaagtggccctgattatgcgtgaaaagctaattcgtttgcagtcgttgtatattgatcagtttaaacgacttcagcatctgctcaaggagaagaagcgccgatacttacataatcgcaaagtggaacatgaagctctaggcagtagtctcctgactggcccagagggacttttggccaaagaacgagagaacttaaagcgattaaaatgtctgcgacgataccgccagcgctatggagtggaagccttactgcataggcagttgaaggaacggagaatgctggccacagatggtgctgcccaacaggcccataccactcgttccagtcagaggtgcttggcctttgtggatgatgttcgttgttccaatcagtctcttccaatgaccagacactgccttacccatatttgtcaggatacgaatcaggttctcttcaagtgctgccagggatctgaagaggtaccctgcaacaaacctgttcctgtaagcctctctgaggatccctgctgcccactgcatttccagttgcctcctcagatgtataagcccgagcaggtactgtctgtgccagacgatctggaagccggccccatggatctgtacttgagtgctgctgagcttcagcccactgagagtttacctctggagttcagtgatgacttggatgttgtgggtgatggtatgcagtgtcctccttcacctttgctttttgatccttcactaacccttgaagatcatttagtcaaagaaattgctgaagacacagtggatattttgggccagatgcagatggctggagatgggtgcagatcccagggatctcgaaattctgagaaagcctctgcaccattgtctcagagtggattggctactgcaaatgggaagccagaacccacttctattagttgatagtttggggaaccattttactttggtggatttaaatttctcgttcttcaaagaagtatttctgatcatccctcacaaaacacaggcaacccagactaccttgtttttcttctggattgagtattatagtcaaacgtaaagccaaattttgaggacgtggaccgtgggtttcttcccactcagggcaaggaagagaaagagagataatccctatcaaagcttctgggattatttgggactatacctaaaaggaaagtgacatctttgtaatgggatttcccaagtcatggatagaaatccacttaagtagctaggtgggagctgtctttgtgagtggtctttgagatactgatggccctaatatcggttatctctatctgaagacctgcagtttagcttttcttcacctctacttaattgggcagtctttaacccctttccctggtgaactctggctttttatcctctgagaaaacagcccacaggactgggtcctccttatccgtcttgcttttaacctatgtaaatttctgtggttgctatcttatgtaaaatatagtaaaaatttattgtatatagtttctattaaatgttaaagaaaatgttatgaaaatatcaaacagtcacctgaattgaatgc

SEQ ID NO: 213 - DNA, 2029 bp, Homo sapiens
gacaggtccccctctgtcacccaggctggaatgcagtggcgcagtctcggctcactgcaagctgcatctcctgggctcaagcgatcctcccacctcagcccccaaagtaactgggattacaggcgctcatcaccatgcccggctaatttttgtattttttgtagagatgaggttacgccatgttgcccagtcgaatttttgagctcaagtgatccaacagcctcagtctcccaaaatactgggattacaggcatgagtcaccacgctcagccttgttttgttttgttttgttttgtttttgaaaccgggtcttgctgtgtcttgatcacagctcactgcagtctcaacctcccaggctcaagcgagccttctgcctcagcctcccaggtaggctggaccacagctatatgccatcatgccagctaatttttttatttttggtagacacggggtcttgctatgctgcccaggctggtctcaaactcctgggctcacgtgatcctcctgtctcggcctcccaaagtgctgggattacaggtatgaaccactgtgcctggccccaccctgcactttgaaagagcacagagtggggtcagggcctggcctgtgggcattagggcaggtgtttcaccgggttcttgttgacccatgccatgagatggcctcagtcatgccagtcctaccttctgggcccagggtccccttcatggctgcgtaaccttgggcaagtggctgaacctcccgggcctcacttataaaacaggcatcataatagaactgcagcttgtggcaggaatcactagattaaggcacgcaaagggctcagtgcatttgcccaaacctggcctttggttgacgtccatagcttcaattcgtataaggaaaatatgggggctacagaaggtggggtcatagaccgtggggttgcccaagccaggggcgctgttgtccatgtttcagcaaaacagatgtatttttctctgggcgacaaaactcatcctaaatgcgactgagagccctgtaatgtcccaggacagcttgaccgctggggtgggtccccttccactgtcccaggctggggcgctgcgtctgggctgcccttggcaccatccactcctctctcgcccacagtcaagtacgaccttaacaacccggacaagcacgccaagctggacttcctcaacaacctggccacgggcctggtgttcatcatcgtggtagtcaacatcttcatcacggccttcggggtccagaagcccttgatggacatggcaccccagcagtaggacacccaggaccctggatgctgcctgccctgcaactcagctgcccgaccccaggagtcgccatacctgtgaggtgtccacctccctgcacatggcactacccagactgccagagcccaggctggcctcatctgcaccatgtccccggaccagcccttgctctgactgcggccaagcaccacgcaggaggccactcttgtctctcagcagctgttcccaggaggcagctccctcctggcacatgggggctggccacaatagcccagagggtcagaactggacagctgcagagacctgtgcccagagaagggtctcgacccactcaaggacacacagcaggtccgtggatgggctggatgagtgaccagggccagcctctgtctcaggacattccagaaggacaaggagatgtctctccctctcccaaagcaccagcgtccctgcctcccgtgggccctgtccgggttgccctggtgaccccagcctctgtccacttcctaacccagggaccctgcacagccagaactgcctttggccctacggatggccactggctctggtctaaagtgcctgggcttggtggccatcaagagggagccagtcaggcctgtgagggccgtagaccttgtatataccctgcaccagcagtgaccgggcagagcccaaccccctccacgggggtcccagcacccacttttctaatcatgaatgaacaataaagcccacgctctttgtcaggctcc

SEQ ID NO: 214 - DNA, 2089 bp, Homo sapiens
aaaaaaactcttctcgctccgctttcgccccgcatcttccaccttccttccagtccttgcggcgaccgagcccgcagtgtcagtccccagcggggacctgagtatgccggtgaagacgagagcggaaggcgaggacgacggcttcggggaagcgggtgacccgaggagactgctggagcgaccttggcgtttccgggggtgccttcccgggaaggggaatcgggatgttggcttcgaagggaccgaagggaccacctcgacccgccccgagtgggtttggagttgtaggtgctgtctcggatgcagggcgagcacccgcgagcgggtaaccagtcccgtgagagctgcaggtccccagccccgttttacagatagggaaactgaggcagctgctgggacactcgcccatatgggttttgctccacccacttccttcagccactttacagaccaggagttgagggactgcccgagcttagagtgtttaggggtggttgagggtgacccccatgttctgtgctctactctatccctatccaggccttctcccagcgccactctcacgctcctgcttgctagctcctgcttgctagctcctgctcctcccagcttcatcctcctcctgtttacattaattgctcctgatcttccacactcttgattttccggattctaactccatcaaaatgtaacttgatgtgttcaggccccggggacacctaggcacttgaggggggcgggtccgtgtttggcctgctgggcttagcaggagggtctggcccggggcggggagcgcgatgctctgctgggtcagcatctccagccacctggctttgctggtgtggcctcgcagccttgccaaatgtgagcagcttacagagcaaccagttgcacgtgcttaagctgccgaggtgacacagggcgctgtagggtccagccccacagggtcggtaggtctctccctgtgtgcggcgacgagagagtgtagaaataaagacacaagacaaagagacgagaaaaggcagctgggcccgggggaccactaccaccaatgcgcggagaccggtagtggccccgaatgtctggctgcactgttatttattggatacaaggcagaaggggcagggtaaagaatgtcagtcacctccaatgataggtaaggtcacgtgggtcacgtgtccactggacagggggcccttccctgcctggcagcggaggcagagagggagaggagacaaagagaaagacagcttacgccattatttctgcatatcagggactattagtattttcactaattgactactgctatctggaaggcagagccaggtgtacaggatggaacatgaaggcggactaggagcgtgaccactgaagcacagcatcacagggagacaggcctccagataactgcgggcgagcctgactgatgtcaggccctccacaagaggtggaggagcagagccttctctaaactcccccggggaaagagagacccccaccctccctttcccggtctgctatgtagcaggtgttgttccttgacaccttttgctaccgctggaccatgatccgcctggtaacgggcgtcttcccagatgctggcgtcaccgctagaccaaggagccctctggtggccctgtgtgggcataacagaaggctcgcactcttgtcttctggtcacacctcactatgtcccctcagctcctatctctgtatggcctggtttttcctaggctatgattatagagcgaggattatcataatattggaataaaaagtaattgctacaaactaatgattaatgatagtcatatataatcatatctaagatctatatctggtataactattcttgttttatattttattatactggaagagctcgtgtcctctgtctcttgcctcggtgcctgggtggcttgccgcccacacacacaaaaaagataaatgtttgaggtgatgaagatcttaatttccttgatttgatcattacatgtttcatacaggtatcaaagtatcacatgtacccccaaagtatgtacaactatgatatatcataaataaatgaataaataaataataaaag

SEQ ID NO: 215 - DNA, 3107 bp, Homo sapiens
atgatacagtccaagcacctggatgatgagtatgagagcagcgaggaggagagagagactcccgcggtcccacccacctggagagcatcacagccctcattgacggtgcgggctcagttggcccctcggcccccgatggccccgaggtcccagataccctcaaggcacgtactgtgcctgcccccccgcaacgtgacccttctgcaggagagggcaaataagttggtgaaatacctgatgattaaggactacaagaagatccccatcaagcgcgcagacatgctgaaggatgtcatcagagaatatgatgaacatttccctgagatcattgaacgagcaacgtacaccctggaaaaggtgggtgcaggatgggagcagctctgtgggggaagagcgggcatgggggtgcggtgaccctgcagcccctcaaggcccagtctctggagccatctctcacctctccgactctgagcttccactgcactggcagtttgactcgtgcttcctgccctcggcttctgtctctcatgctctctgagtgtctcgccgtctggccaggtgggtctcatcgcctctgccagcgtcagctcccacagcgaaggtcttccgtgtgctgtcttcttctgccctcgctcacgagtttggattccttgctgaggagcagttctaacccggaatcactgtctgccggcaggatgcccagcatggggtttggatctcacactctgttttctcccccacgtagaagtttgggatccacctgaaggagatcgacaaggaagaacacctgtatattcttgtctgcacacgggactcctcagctcgcctccttggaaaaaccaaggacactcccaggctgagtctcctcttggtgattctgggcgtcatcttcatgaatggcaaccgtgccagcgaggctgtcctctgggaggcactacgcaagatgggactgcgccctgggtatgattggcctctccagctcctcccctcggtgctatcctctggccaaagaggtcctgggattgcaatagcctggtggtctggcgcaagggcgtggggtgccctgggctcggtagagagcaaaggatctcaccagggcggatggggaagcggtgctggacgctgctcagccctctctctgctctgtggccccagatgacatctaagagagacagtcagagtcagggattccatcaaatccctacctggggcgcccctgaccaacagtcctctggcctctgctgcatgcccaggcctccacagcgactccccgggggctgggaagtcatagtcatgctagggagggcccctgccaccgtctctgctcatggattcctttccttgccctcagggtgaggcacccattcctcggcgatctgaggaagctcatcacagatgactttgtgaagcagaagtaagtatcacctgagctaactgcggctctcactcgagcatcctttgtgtgctggtctggctgagaaagcagttccctatcccaaatcttcaactggagggatgggtgcctctgacctgggagtgagtggcagtggggggtatgcgagtgtgtggggagccgaaggccagggcggtcttgggaaaagggagctcacgtcacctgagaacacggtgtggggtgtgaaaacggccgccatcaccttgagcacctgccctgtagactgacacaagagttccccctggtttacacctaaggaacccggagctcagagaggagacgcctctgagcatggctcccagctggtaagggcctcagcccaactctcctgattttcaggccaggggccaccctctccccgtccctggaggacttgccaacgcacaggcgcgcatgcacaccaacaaagggtcaggacttgaggaggatgcctggagcacgcttctcctggctgactgtttcttcctctccagtcgtttcctctggtgggcctctccagggctccgccggggtgtggccaagaccctcgaggtggggtgtgctcagagcagggggcctgaagaatggctcctctgtttacaacacacccaacaggaagctggggtcatcgtgatgaggggcacaaacttgtggcctccctacagacaaatgccctacatgtggaccccctgcacctccgcatggcttccggggaggaccaatggcaaaaggctttgaaggcctcacttttgcaggcagaagtcctgggagtgggtttgggaatgagtgaagggctggaggggcaggacagtcctcttccaggagctgagctgcggcatcgggttgaggaggggccccctggaacccatccgttcagcaacaggtctgcttggctagcagcaaagtttactttcctctcatgccaaggtacctggaatacaagaagatccccaacagcaacccacctgagtatgaattcctctggggcctgcgagcccgccatgagaccagcaagatgagggtcctgagattcatcgcccagaatcagaaccgagacccccgggaatggaaggctcatttcttggaggctgtggatgatgctttcaagacaatggatgtggatatggccgaggaacatgccagggcccagatgagggcccagatgaatatcggggatgaagcgctgattggacggtggagctgggatgacatacaagtcgagctcctgacctgggatgaggacggagattttggcgatgcctgggccaggatcccctttgctttctgggccagataccatcagtacattctgaatagcaaccgtgccaacaggagggccagcttcttctcctggatccagtaagagtttcggcaccgttgacgaactgcagcgatcttactggccaagccagagcgcctcctctcagattccttctcgacacagcaccctaggcggcttcttcctgtcagtcggaggtggcatgcaagatgaagctctctttgctcttcccgctttcattttgtgcttttccttgtgttttcatgttttgggtatcagtgttacattaaagttgcaaaattaaaaaaaaaaaaaaaaaaaaaaaaaaaaaaaaaaaaaaaaaaaaaaaaaaaaaaaaaaaaaaaaaaaaaaaaaaaaaaaaaaaaaaaaaaaaag

SEQ ID NO: 216 - DNA, 2550 bp, Homo sapiens
ttttacctctgacttgataaaccagtatacttcatagcgtaattttcacactaatattttaaaaccttttatataatataaagtgttacaatccactaccaaatcttattactggattttgaagttcactgtctttttatgtctcaatttatcatagaggttgcatttatatttttcttcttaatcccatgaaatatgtttggctctttttgtgtgctctagaattaacactaatccgatctcttctgttttctacctgtttcctgttgatgctggaatgtcatgtgacttctcttctgttcctgcaatgatttctcccttccacttgtttgcttggctggtgttgcacatctttctgtctgtccaatcaggatggcattgtagcagatgaatcccaaaacatgcagtttatgtccagtcaaagcatgaagcttcccccttcaaatagtgcactacctaaccaggcccttggctccatagcagggctgggtatgcaaaacttgaattctgttagacaggtaagtccagatgtgtattttaggctctcagttgaatgatttgtattagtaataagatctctcttacatgtagttactgtgtttaaatcatagtacagtgtggtaatgagatgtttgtccctaaagaatcccactgttacttgttgctgtttgtttttatagaatggcaatcccagtatgtttggtgttggaaacacagcagcacaaccccggggcatgcagcagcctccagcacaacctcttagttcatctcagcctaatctccgtgctcaagtgcctcctccattactctcccctcaggttccagtttcattgctgaagtatgcaccaaacaacggtggcctgaatccactctttggccctcaacaggtagccatgctgaaccagctatcccagctaaaccagctttctcagatctcccagttacagcgattgttagcgcagcagcaaagggcgcagagtcagagaagcgtgccttctgggaaccggccgcagcaagaccagcagggtcgacctcttagtgtgcagcagcaaatgatgcaacaatctcgtcaacttgatccaaacctgttggtgaagcagcagactccaccatctcagcagcagccactccatcagccagccatgaagtctttccttgacaatgtcatgccccacactacacctgagctgcaaaaagggccatcaccaataaacgctttcagcaacttccctataggcttgaactcaaacttgaatgtaaatatggatatgaacagtattaaagagccacagtcaagactaaggaagtggacgacagtggacagcatttctgtgaacacatctttggatcaaaactccagcaaacatggtgctatttcaagtggtttcaggctggaagagcctccatttgttccctatgactttatgaacagcagtacttcaccagccagtcctccaggttcaataggagaaggctggccacgtgccaaatcgcctaacggctctagcagtgttaattggccaccaggtaaaattttttctaacactttctttcatgagactgtgtttccattaaggttttgttacatctggacttactactgatgtagcccagatcggcgtgcttagactgacgtgtgcggatgagaaggaatgcagaagtgattgaggaaaagttaagcatgaagtcttgggcaagtgagtgtgtcagcctgttacctatgcctttatgctcaagcagcagaggtagaagtgagccccattgaccagcatgaagaattatattaaaaactttaggctgggcgcagtggcacatgccagtaatcccagcactttgggaggccgaggcgggcggatcacgaggtcaggagatcgagaccatgctggctaacacggtgaaaccccgtctctactaaaactacaaaaaattagccaggcgtggtggcgggcgcctgtagtcccagctacaggaggctgaggcaggagaatggcgtgaacccgggaggcagagcttgcagtgagccgaaattgcgccactgcactccagcctgggcgacagagcaagacaacaacaacaaaaactttaattcgctgtttctcgtaagttgtgtcagggagtaacttgcagtattttcattcatacataggagttaccagaagtgcttctatggcctgctttctcctacctgagttgcagtagctttgtgatttgtcttaaagcttaaagcacttttaaatgttactgtttaaaaataaacatgaatctggcgggtacggtggctcatgcctgtaatcctagcactttgggaggctgaggtgggcaggtaacgaggtcccaggagatggagaccgtcctagctaacacggtgaaaccccatctctactaaaaatgcaaaaagaaattagccgggtatggcggtgtgtgcccgtagtcccagctactcgggaggctgaggcaggagagtggcgtgaacacaggaggcggagctcgcagtgagccaagatcatgccactgcactccagcctgggcaacagagcgagactctgtctc

SEQ ID NO: 217 - DNA, 2134 bp, Homo sapiens
acagcgaaggcagcctcgccgcgagctgccgctgccgctgctgccgccactggtgttgccgctctcaggcgccaggctccccgtcgccgccgccgccgcctcgccagccagagttgggctccgtgggcttcccccctcgcagcctcggtccttccccgctgcctgcaagtcagcctggctccgagtcacgtgtcagtgcctgaggcagagactgcgagaaaaaaacgcgcttcattccttcttccaccgccatactgtattttatactaaatctcatttttattccaacattttactcccgctcggattaaagcaaggagagccaatcatgactggcaaaacacagaccagcaacgtcaccaataagaatgaccccaagtccatcaactcccgtgttttcatcggcaatctaaatacggcaattgtcaagaaagttgacattgaagccattttttcaaagtatggaaaaatagttggatgttccgttcacaaaggttatgcatttgtacagtacatgagtgagcgacatgcaagagctgcagtggctggagaaaatgccagagtcatcgccggccaaccacttgatatcaacatggcaggagagcccaaaccatacagaccaaaacctggaaacaagaggcccctttctgcactttacagacttgaatcaaaggaaccttacctgtctgttggcggttatgtctttgactatgattactacagagatgatttctacaatcggttatttgattaccacgggcgtgtgcctccacctccccgtgcagtaattccgctgaagcgtcccagagtggcagtcacaacgactcgcagggggaaaggagtcttttccatgaaaggtggatcgagatctactgccagtgggtcaacaggttctaaattgaaatcagatgagttacagaccatcaagaaagaattaacccagatcaaaactaaaattgactccttgctagggcgcctggagaagattgagaaacagcagaaggcggaggcagaagctcagaagaagcaattggaagagagtctagtgctgatccaagaggaatgtgtgtcagagattgcagatcactctacagaggagcctgctgaaggagggccagatgccgatggagaagagatgacagatgggatagaggaggacttcgatgaagatgggggtcatgagctgtttctacagataaagtgatctgaaataacgcatgatgccacaaagcagaaaagagaaactgtgacaacccccagaaatgtgaaaggaggtttcttactggacagcagcatctttggttcaatttatataaaaacccaaataaataaaatggacagtattgctcagttttagaaattccatttcttctatgttttaagctgtacaattgtcaggtttttatggtttaaattgtaaatgtgttttcccctttgctaattatgttttttttttcagtcttaaaatgtgaaaggcatttatgaatggtaagggaaacactatatacaaatgtatatttgtaaaagctatttttatgattagcatgtttcactgttgatcatatataaagtcaggtgatattgcaattctgtatttaaagcttatttccaacaatgtcatgtaagaaaagatgcatcttatgctagtttttataatttatttataatttatagtttaaagtacttcagatcataatgataaaatacttgaaaaagttatatttctgccctgtataagcaccctttttattaataaagaatgcagatatttcaggtgtgatataatagttaaagaactgttggtttgatctgtgattaagttgagcatgctccgctctactgaactaaatgatccaattattacttcagtctgggtatgagattccatggacaagtaaggactagattgccaaggaaaagactgtcttgcccttggatccaaaagtttaaactagtgcatacatcatgtcatttcacctcctgttcctaggaactctccattcccaagcattgccagtgttttccagataatcttagctgttgtcttgtgctgtggaaatggaagaaaccatcttcacagactgtaggagaattcaacatataatttcttaataaatactgtttcttttaaaac

SEQ ID NO: 218 - DNA, 2312 bp, Homo sapiens
tgttttatgtacacttgtcaggcagaaaaggtagtgaccggcccggcgtgggcacacagacagcccgctttgttctttcatttcctccagcactttctttccgcctgagtccagcccaaggccttttattttgcgctgtgtaactgctgccagcttctcttggccctgctcccagatggcggtctcctggcagcctcccctcagtcttcctccacccgctcttccttcccagcctgcctgcatgcatgtgcacccttggtcttcgctccatcgccttgaaagctctgaagaggccctgggttgccgcggcagcagtggtctgtttgatgctgccgtttgccgctgccggcccctcctcagactccgcctttgggagcacacctgctttgccttgctgcctgtgcaaatgttggacaagcagacacactcacactcgtccccagcttagcacagagctggagcgcccatttctggaattttccgtttgggaatctccacttctggggtttacctgttcggcctcctgcctatcagtgaggcatctctgactgtttcttctactgcttttcagttcccttccctgctgttctatttcctttgagtgtaaagactcacaggtgacctgctatcgagatagccagagggtcaggagagaatgggggaggaggcggtcaggctgctgaggaaacaccacaggctgaacgggggaggaatgcacatgccacgctgggtgtcccgggtcgcggggaggcagctcagctcttaggagcaagttgtgggggcttttcaagaggggccaggcttcctggagggtgactgatgtggccgaagcaggtgtccaggcaggtaggctgcagccaggagctccctggcaccgcaggacctcgtggtactcttgccttagattttacacacactccacagccaagcactgccacggtcctccaggacctgggaagcaaaggcacaggcccacggtggccagccattgtggtgccgccccagcttctggatacagccttttgggtaaacactgggaactccagaagttgtggggagagtggggaatcagacagccgcctctaggggctgggttctgctggggcctccttgttggtgctgtaggcacccgccagggagcagggacccgacttgcagacgcattgcccggtactaggaaggagtgaggtgtgttcccaccgtacacttcccacacgagctgcggctgccagcctcgggccatcagcctaggagagcagatgcagctccaggggctcgacttatagccagttacagctccccggctcttctgtgtggcagagcgtcgtttccgggccctcagggctggggagctcagttcccattgcttgtgctcagggctgagtcttaaagaagggtttgccggccctaacgctgcagcgcgtgcgcggtgagaggccctttttgagcctgtttactcctgtggccttgggcagaacagtaaatactctgtgcacggaggaaagacatgcccaagaggaaggaagtactgaccatcggctgcctgtgagcagcttagcaaggagcccttgctccctgggaaaggcggtgaacttgagtctaaagatgcagtgcctggcccttcctaaggtccctgcctggcatccgagtgtcggtgtgtggcacagaaggctcctgcttgcttccaaagtgatggacaggaaggggcagagtgagtcacggcccagactgggcaccttcacgtctcagcctcagggagccccacagccccaagctcgctgaggcaacgtgagaacaggctatgggaaggctgcaaaggctgagaaatgcaaaggctcatatttataaatcccacccccagagtggggagggtcaggtgccagacctggactaaactgcaccaaggaaacacccagcagggtctcctgtgagccggggaccatgcagcccgaaacctccagtcactgcgcccggcaggagtcaggagccagggactgtgcagcctggaacctccagtcactgtgcccagcagggtgggctgtgcccagcaggagtcaggctaagaaacgccaggtctgcctgttcttgctgggcaatggctgatggctgccagtttctgctgatacacaggtaggatgggacccttcatgaatatctgactttaataagttggtaaggatatatttttttgtctatgttctgtttcaacttatgtagattattataaattgatgtaaaccacgtgagaggaaaatgttaataaaaaatgcaaagccccatcatttgcacaaaactcaaaaaaaaaaaaaaag

SEQ ID NO: 219 - DNA, 1937 bp, Homo sapiens
tttctgtgaattaattctgggtattactatttttttgagacagtcttgctcttacccaggctgaagtacagtggcatgaacatggctcactgcagcctcgatttcctgggctcaagcaatcttcccaccttggcctctcgaggagctgagactacaggcacgtgctgccacacccagatattttttaaagttttttgtagagacaggtcttgctatgttgcccgggctggtctcaaactcctggactcaagcagtcctcctgccttgtcttcccaaagtgctggtattacaggcgtgagccattgcacctggcctgttctgggtattttgtataaatggaatcagtatgtgaccttttgtatctggctgcttctacctagctttatgttttccatgttcttccccattgcatcatgtatcagtactttctttctttttgtggcataatattccattatatgtatccactgcaattttgtttactgatctgttgatagacatttgggctgtttccaccttttggctgttgtgagcattgccgctgtgaacattcatgtataagtgtttgtgtatctgttttcaatgattttggatatatacctaggagcaggattgttcgaccatatggtaatttttgtgtttatcttttttttttttttgagatggagtcttgctctgttgcccaggctggagtgcagtggtgcgatctcagcacactgtaacctctacctcccaggttcatgtgattctcctgcctcagcctcccgagtagctaggactacaggtgtcccccaccacacctggctatttttttttttttttttttgtatttttagtagagatggaagagacagagtttcaccatgttggccaggcaggtttcaaactccagacctcaagtgatccacctgcctcggcctcccaaagtgcttagaattacagctgtgagccactgcgcctggcctctatgtttaacttttgagaagtctcttgattcttgccactacgaggtgattttatccaactattacaggaaagaaaatgggagctcagaaggttggactgcttgttcaaagtcacctagctagagagctgcgcagctggaactagtatacaagtctagctgttgaaagcaccctgagcacattacctcatgctgtaccttgcatgtcttgttgttttcaattttcagatgaagaaacagctctcctcaaactaattgattattgaggtgtgtttcttttccttccctggtgatgtgcaaagagaatgaaaagggaaaaggggccaggaaggagatgttttttctccttcattcattcaacagctaatcttgagtaccaactgtgtacaaggcactaacctagatgcctgggacacataaagaacaagtagacaaagactcctacccttaatcattgagttttattctagatgggggagagggtgacagataataaacaatagaattcataatatgaattcattggagagtacgagaaaggtgaactgtggggggaagagagcaaggtaagggggtgaaggagtgttggggagattgggattgcaatttcagaaatggtagtgttatgaactgaatgtgggtgtctcccccaaatttgtatgttcaagacctcactctaatgtggctgtatttggagatggggcctctaaggaagtaactaagatgaaatgggttcgtgaggatgggcactgattcaacaggattagtgttcttatgaggacagacaccagagttctccctctcactttcttcccacacgcatgcactgaggaaagtctgtgtgaggacacagcaaggaggctgccgtccacaagctgagaagagagccctcacaagagatggaattgactggagcctcagtcttggactttcagcctccagaacagagaaaataaatgtgtgttgttaagcc

SEQ ID NO: 220 - DNA, 2191 bp, Homo sapiens
attgtgtggaaaagtcagaactcaggaaatgtgtctgaagccagagcgggggtctgcttacggagtctacgcagcgggtaggggtccactattggagtataaacctcaggtcagtgagtagtgcagaggtgtccctaacttccaatggagggaaagagaggagagcaaaggaaacacatccagaagtcgccacgagggctgtgtgccagcgctccattttcatgctgtttggaacaagacgtgtcaaggaagatgtttctatccaaagtcttcatggagcctctgcttcccctgtacctgtgtagctccctgaaactgaggacccacgtgtctgcaaagacctctggagatcctaagagagagaggcaccagcaggtaaccagtggtggcctggccacgaaagagtatttgaaattcaacagtgagcaagtgcagaaacagcatcccaaaccgcaggccccaccacacgcaggaaccagaaagctgaagtttcaccaaggagtttacttagtatttctcgctgggaatgaggatgggtagcaaaaagcccctttcatgtacataatggttggtcctatgtcctacttttattttctctaagagttttagaagaaaggctgttttaatttttttttctccttaagagcaacttcctttttaaaatgctttcctcttcttgtcctgcttgagtaatgcaggcatcattctgaaatcattctgaaacagctaggcagtcgccttttgccaaaattacttctctaagaaaatagagtgttcttttttttaggacttagaacccacaaggggtgagtggaagttttgtagcccatcaaaggtgaatatgtgttctgcagtatcaactaaaacagtgtacaaaatcattaaactgggccgggcgcagtggctcatgcctgtaatcccagcactttgggaggccgaggcgggtggatcacctgaggccaggagttcaagaccagcctgaccaacatgaagaaaccccatctctactaaaaatacaaaattagccaggtgtggtgttgcatgcctgtaatcccagctattagggaggctgaggcaggagaatcgcttgaacccgggaggcagaggttgcagtgagtcgagatcacgccattgcactccagcctgggcaataagagcaaaactccgtctcaaaaataataataataataatttaactgtgttctgcacacacagaattacaaaatccctataggactttcacagatagctttgggcttaaggtcttcggacaacaggtagttctaatttcttactctttgggacatttagtacatgttggtacacataaggaaagaaaatggcttatattagagctaggaaacaggggcagcctggatttttatggtaggaactcactctgtgcttttttttttttctgttaagttttcttgacactgacttcggtaacattggctaaagggaattgtgagtcatgtgaatttcacctgcagtgcagactttaaaggactgtgttcattctgatttggggatgaagagaatgttccatgcacatctattgattggtcttggcagttgctgatacgcttgtctcattcacactcccaaaggcgaggatttaccctagaaatcataaacccccactttccaaagcaaagatgctgttaatgttatgatggtgcataaatacctcaactgtctgggctgagagagggggctgcaggtttttaagagagcagctatagtcctcattccatgtagtcacatcatctgatgacaggactccacattctagcttttctcactgtggaaaagaaacgttactgtttaattaatatccaaagttataaatacagcttgtaaattttactaacttgtttctttttcgtttcgtccttgagaagtacaacttgcatttacagatggtaattcctagtgttgttctctgctatctttttttggtatgaaattgctgtatttgttaaagtttgttcgttttgtggtttttaattcccattggtgtgctgtacaatgtagtgtatcatgaagaaagaaataatatgcagatgtattatgaaatgtgttttattttcaaatgtgtggtgttgacaatatattgatttatcaagatactaagggaaaattctaaatttaacaaaatgtgtatattttaataaatgcataaagcttt

SEQ ID NO: 221 - DNA, 3147 bp, Homo sapiens
aaagatattttatttcaccctaaccataactatatgaggtaggtgttgggttctctagaggaccaaataagtgacaacctcattttctacctgagatctgaatccatggaaatcttttttaaaagattaaaagattgagagattaaaagactgctttataaatgatgttaaaagaatgtagctttttatttgttggcaaatgcacttcctaaccctgaacttcccctcccagtcacagacaatgttgggccaaggtagacctccttcacagaaaatcctgctcttgccaaacaagagtattggaataacagagtgaactgtgcttcctatgagcagtttgctccaagtgtaatttggaagggcagagctacacatccctagttccttattctcatcaaaagaatcactatgcatgagaggatagagagttgctacaagtattttgctgctggaagtccctttccacggaaaatatcgttaaaagcaggcacttttattatattttgggagaaagccacctatgtatatgatcactttcctcagagaatgacatttctgatattaatgctttcttgtaaagtttatgtggcagaggtgacagccccattgagcaggtcttacttgagatacctttctttccaatccaacatattcacaacttcttaattttcatcacctattcaggccttgatatgcagctttgagggtgggccagctttgcttaatgccttgtgtggtgtcttgccatctctgccgagcattttcaggcctgtgccctcatgactgtttctcttctacttgctattgaattgtttagaccggtgaaacctggccaatggggaggttgatctccctcttgtgtaactaacctgtcccaaaccaactgagactgcatgtgtgggatgatgactcttgagcctgtgggcaagccgtattaattcaagccacaattccctctttagctctgatgcagaatggaagttggggtagctaattaagggctgcctgcctagtccaggtactgccattgtaatgttagaatctcacatgtactctaaagagcaggtggaactcagtggccctccagtttaaaggcagccagtaccatcttcctcatcaatacctacagacttctcatccttcctcagcatagcctacattgacagactgacctccatagtaacagaccatgctgttccagatcaaagctgcttctgaaaagcttatcacatggaggaatagacacagaaggtgtattttttagtcagcctggctctcaggagggaagcaggaaagaaggagctaggctgtgcatgctcagttctctttctagactcacaaattggattaaggtgtttcttctctcccggggaaaagaatgtgtcctgcagagagcccaagaatattaaactaatagatatcctttcagaaggagaaaacacaaagagtagaggcaagagtttcatcctctcttccctattgaaaaagttcatccctataggcaaatgcttgatcaaacgtgctgtgttacatgcagctcctttgtttgtttgacataaccattgagtgagtaatggcagcttcttcattaaatggagaagttccagtattaaataagcaaatcagcaaaaactgagccagaaggcagtggagactgccaattcaatttaattttttttagttcaatttaatttttaaaaccccacagaaatcttctttggatgcttttgcctattagcctttaataaaagaaaaaaatgtaatgagtttctccaagtcaggtgtggtgtggtggaaaaaagaacgtgaggcttgaaagacaaagttgggtattgaaagacaaagttgggtattgaattctggctctgccgcttactggctgtgccgccatgggcaagtaatttaacctctgtaagccttagcactttgaagataataagaccaacctcagaacctgaggattaaatgtatgtaaagcacccagcctagagcctgatacatagtgagtaggcagtcaattcctgatagttattgtcacattttgctgctgctgaaggaaacgtatctgctggtaccccccttgcatgggtttgggtttatgggagcagcttttgctgcaagtctcctcctgtgctgcattgtgtggcaggatgactgggaagactgggcctgatcagcctctcatgctatgaaccaatgctatgcctcttttttttctcaactcaggttagagcacagtgaatgggactcttcccggactcctatcattggctcctgtggcactcaggagcaggcactgttaatagatcttacaagcaacagttgtcgaagggtaagaggaagaaggataaagagagggtgttttattatctgacagggctggctatactgggggcaaggagctgaggagaaggaatgtggaagtccagccactgagcagcgaatgagtctaaggctggaagggcgtggaagattagaacctggtggaatttgccaagttgttgactctgaggcaactttcctctcagaatacccctttctacagtggttgggtcagctttgcttaagtgcaagactagtaggagggaaagcaacatagccctatagggtgaaaactctctgactttcacatttttctttcagacccggagtggcgttggatggaagcgagtcctgcgttcactctgtcattcacggacccgagtgccacttctagcagccatctactttctaatgattcatgtcctgctcattctgtgttttacgggccatctatagacttagttgttactctttggaccactcccttcaaaacttggaattctctcacctctaacatcagaacatcaattccagtggaacagtcttcccatttacaggtcttctctccaactcttcacggaaagtgcctgcaaaaacagaggtggatacgaggacaggttggagctgcagggactggcgagtctgctttcttctactgccctgagcctgaacgcttctgcttaatctgagaatcacatttggtttgttgagcctaatatttgttgagattttgcaggaccctgatcttttgtggtcctgtaaaagatactgaggaatgtctttcagccaagccaagaggatggtttcaataaacctaataatctg

SEQ ID NO: 222 - DNA, 4688 bp, Homo sapiens
aggcaggggcggggcttcagcccccggctcacctgcgcggcatcgaagcgacgcagcccggccaggtgaagctgcaccagcgaccggaaggcccggctaacgcgctgcagccggagcagctggcgcagcgggacccggttcaggacgtgtgggagcagcacgtcttcccagggcaggtccaggaacctgcgagtaaaggggcgttggcactggcgtcccggggccactattacctgcgagtccgcctccgttatgttcctgcgccccagctcccaagagcggcccccagacccagccccggctcggctcccctccctcaggttcctcttccctctcggcccctccggtgctcggtacctgacggctccgggctcttgctcccctccggacggctccatcggtggctccatcggctgtctattgcgcgtgcgcagtaagattttctcgctttggccttggagtggccgcaccaaacccgcctccttggcctgtagagacagacctatttaatcgagtgccgtctcaccgaggatccgatctgaaagcttttcgggtggaccccgaaacggaggcggaacagaccggtggtgtaacattaggcctcgccttctcggctacagggcttgaggcctgaagctggagaatgcggtcccagtcccaggatccgcttcggggaaccccaggagtagtgccttcccccatcatccacgggatgggtgtggggggatgtgaaggacgcgagagccactgcaccgctgacggtctggcgctccggtgcaaccgcttcagctggctcatcacaacgaaaaccacttctcatctgttatctcgtcaaggcttcgggcacctctgaaagctcagctgggcccagcctctcctctgtctctcctcggtctcagctctgggcgagcagcggcctgtctgaagagcatgcagcccccttactccccgcctggcctcgccatccctgcccccccagcctgacccccggccccagcatggcccagggtgccatgcgcttctgctcggaaggcgactgtgccatctccccaccacgatgcccacgccgctggctccccgaaggcccggtgccccagagccccccagccagcatgtatggcagcacaggctccttgctacggcgagtggcaggtccaggtcctcgaggccgggaactgggacgtgtgacagcaccctgtacacctctgcgtggccccccctcaccccgtgttgctccctcaccctgggcaccctcttcacccactgggcagcccccacccggggcccagagctctgtggtcatcttccgctttgtggagaaggggcccggccagggagccggatgcctctcaagtcacctgtgccctttctacctgggacgagcccctcggctgatgggcctgactctttcagttgtgtgttcgaagccatcctggagtcacaccgggccaaaggcacctcctataccagcctcgcctcgctggaggccttggcctcacctggcccaacccagagccccttcttcacctttgagctgcctccccaaccccctgcaccccggcccgacccaccagctcccgccccacttgcccctcttgaaccggattctggtaccagctctgctgctgatggtccttggacacagagaggggaggaggaggaggcagaggccagagccaagctggccccagggagggagccccctagtccctgccactcagaggacagccttgggctgggggcagcaccccttggcagcgaaccacccctgagccagctggtgtccgactcagactcagagctggacagcacagagcggctggccctgggaagcacagacaccttgtccaatgggcagaaagcggacctggaggctgcgcagcgcctggccaagaggctgtaccgactagatggcttcaggaaggccgatgtggccttttttttttttttttttttttttttttttttttttttttttctgaccattgtttttaatttatgaaatcaagtttaacacacaagaagcctataaacactgcaatacagaaaaattaagctgctgcattgaattcttactccaaaacaatgcaaatctgcatgaggtctctcccgctatgggtgtgagtggaagagagggagacttttttacctggggttggtggtggagtgaaacacaagggtgggagaggttttgcaaatagccagagaacagaaaccaatgtgcagtcactgacacacttgaccacggcagttaatttgcacttgtacttggctgtggctgttccggctgtggctccttcggcttctttgtcttcttcttcttctgcttggagagacagctcaaagcagactcgctcttacttggggcagacacaagcaggggcggcttgccagactgagtgggatacttggttttctggctctccgtaaacagtggctgggacagcaggtggcgcagctccttcttcagaaccttcatctgcttttgtctccgacgttcttcttgctggtcagcttttcctcccttatacatgtcttcttccagctcaatctccagggcagctgctgcctgctcaatccaagagttgtgcaggcaagcctggaagttccgatactcagatttctcaatctgtcgagctaaacggattcgctccttgaccacatccatgtattttgtctgcacggggaacagtgggatatcctcatctttcttgagcgttttgtaaatcttcttaaagttgatcacatcctcaggcccaatgagcatcagactgaggccttcattggtagctcgagcagttcgaccacttcggtggacataaatctccgaggtacgtgggacctggtaatggatgacatgctggactttaggaatatccagaccccgagccgccacatctgttgccaagagaacacagtcttccagacgggcaaactgctccaggtttctgagcctctgcttctggtgcatacaggcatgcagggtcaagggcatgatatcaaggactttgaggagcccagagaggcgtttgatgcaggagatactgttggcaaacactaagctgcggcctggatactgcatcaggaagtagtacaagtagaagtctttctcatcagtctcacaatggatcttggtctctgttagcgtctccaccgtggcctcattccttgtgaggtcaatgaccttgggcttgcccctcatgccaattttctgcataaggaggtcaagtttggctgttttatccattttcttggtgtgcttcttatgaaggattcgagcaggagcctgatgcaccagggtgagtgtggcagaaaaaacaagcgtttgtctctttgggttgtattgggagtcattgagcatctctagcagctgtgagagctcagcaaaatggcctttctcaaccatccggtcagcctcatccactaccaggcacctgagctgccgaaggttcctcaaatgataatgcttttctttaattaattcccacagccggcctggagtagcaaccacaatctcaggacgacggttcagcatcctctgctgtttctgcgtggacattccaccaaccaaaatagcagttttaattcctgtaaacctggccacagcatcaatgtgctgtttgacctggacggccagctctcgagtgggagtcagaaccagtccaagcagaggacgctttggatatgccttacaggtggcgcttttgtcatccaactcctgttttagatttccagtctgctctttatcaagattttcctcctcattctcattctgtttgggaacaggtttctccctgatcagggaagaaggcccttcaccagcatcatcgtcaccaaagagcaacgcctggtctgagacagtgcctccagtcttggctctggcctcggctgcaatatcactgggcagtgcttcactctcaattacagtatcgtcaggcaatgcatcagactcagcttcagccttgcctggtgatctagtctcagctccggcctcagttctggtctctccaggtggtgcttcggtgttacttggaggaggggcagcattcctcttctgccactgcaacaccgcatgaatcattgggatggcaaaggcaagagttttcccacttcctgtctcagcagccccaaggatgtccagtttgtcacggatggcaggtgccaaggtcagggcttggattggtgtgggtgcagagaagcctagaaagctgagtgctcggagaaccggcctgggaacaaacaggtccttccaagctgacacatctgctttctgatcatgaacttcaggaatccatgtcttcgctttttttgggcaccttggcagcagtgctctgagaaggctccaacccttttttccctttatttttcttcttttttggagcagtttggaccaggttttctgatgtcatctccccagcctccggatcatcacaaaccatgtcatctccctgggcctccagctcaggatctttcacttcaaattctttctgggtactggttccttcagttgctacatttttacttttcttcaacttgatctttttctttggtgagctagactttccctcctcctcctcctcttcttctgaaacagcttgtgcctttctcttgggtgcttcctttgagaagagactggagggattcttggcaggggagatgacatcagaaaacctggtccaaactgctcc

SEQ ID NO: 223 - DNA, 2239 bp, Homo sapiens
atattaaaatttctgctgttaggaactttatgttcccagctgtgatgtgttaacagcatttccttcagaagtcaggcagctggcccccacactaactacaatgctgtgcgatgctcctgtgtctgtcctcctggcaccacaatgcctgtgtgccatgtttgtcaccagcatgctacatgtgctatgtccactgccttttgtctctctattctctttattgggtattttttccttccttttctcaggtgtctcaggtttaagtcacagaatcatgactttatggaacagaaaggggaacgacttagccaacagcagcccagagcaggcagctgacttatgtcaggcgaacaagttagtgacagaacagagctcacaacctgcatttctgtactttttggtactcaatccactatgctgcctttaaggtaaattaaaataccagcatttaaaaactgttttatgacatccattcatagagatgtgtaaccatcactgcaattcattttagaatattttcatcactccaagaagagacccagcaccccttagccgtcaaccaccaagtcccttcctccagcagccccaggcagccactgagctactttctgtttccacagatttgcctgttccgaacattttatatagatgggttcatatgatacgtggccttttctagctggcttctctcactcagcatcctgtttgcacagttcagccatgtagtggtaggtaaccatggcatgtcagaaagagaagaaaaacttggtggtcattttgcctccagttcagaagacaaaaccaaggcctagggaggtggcttcaggctctagtcacaaagcccagcaggggaagagtgaggatccagctagacccctcaccactcaccgccctcagcagacctcctggtgcttccctgacctgcgtgcaaaggtgctctgcttggtgaactggcagatttacatgcctgccctctagtttttctgttctcagctttgcccagctatttttgtcaccgcttgcgtgtccttgaaggcattctgggttacttctagatttgtgaatggttgaggtgccagatgtctgagggtgggtaaatggggtccctgctatttcagtccctgctgaatatagacacaaaggtacaggaccaatttgtttacagtctttttttcccctaggttggagtgcagtggtgcaatcatagctcactgcagccttaaacccctgggctcaagcgatcctcccacctcagcctcctgagtgggtggaactacaggtgtgtgccaccatgcctggctgatttttaaattttttttggagacggggtctcgctatgttgcccaggctggtctcaaactcctggacttaagccatccacctgcctcagcctcccaaagtgctgagattacagttgtgagccactgtacccagccttgtttacaatcttaaaacacctataaggtctttctatattactcatcgtatttttacattaaatatcaatgtttatatagcaagaaatgtaaacaaaaaataaaatatcaataagtactaaatttaaagaaataaggcaccagagtagcacctagttttcagagacctttcacatacattctctcatttaatcctcttaacaaatctcaaggcagctaatgttatacacatgaggacgtggaggcttaggaaggtgaagtaatttggtccaggcctcacaagtggcaaaggtcaggatggcagggctcctctgactggacaccctatgctctcctcccgctattgcaccagactgctggacattcctggcccagttctctgttttaagcgagtgttctctagggaccagctgtgggccagaaggtcagcacagcactcagaggactcctccaagtaaacccaatattcccactcggccctctgaccccagtcacggcagggctgttcacgtcctgacctggctccatgggacactcctccacacccctcacagcatcccactgtactctctcgacctcggtctaccaacagcaacatgccctggccttcatacttgtctcttttttttttttttttttgagaccctgtctcaagataaataaataaataaacaaactatcatatcaacacagaaagttataaagcagcattcaaaatcatatatatactcttgtaatcatgtaaataatttttgtgaacaaagggaaggaaatgcaaaataaaatttaaaatattggcatgatgg

SEQ ID NO: 224 - DNA, 2888 bp, Homo sapiens
ctatgacagccctgcagaggctaggtatccaccactacatagcccacagtccgctctgccccagccacagcatccttggcttgctcagccattctttgtctgggtagtttgaagtccaatccccactctcattacttaccatcctctgaatgcagccagtctgtctgggtctccctgagactggcatgcccagactcctgtgggtatagtctggccaaggcagagttagcataggactgtcgcctccctccttctacatactctgcttctattaatgcagcctaatgttacatttgttcttttggtgaccgcatctcactgctgacccatcctgagcagatggacatccaaaatgcctaaaacttttttctgtgtgctcttgctattaagttctgtctctcctgccccattctatgctgttgcagttgtgtttttaacccaggtgcagaatcttactttatttatacctgtggaattttgctcgagagggtggggcatgcatgcgagtgtatgctggtgtgtttattcatgctttctgctgcaccaaagccaagtcctaggtccccacgcagcgatcctaaggctaattattaattggtagctgtaatctaatttgtctttttcatcttctgtttagcaagaggaacagagatcaggtcttatggcaatgacccctgaacggcagaatgcatatatctcccaacagatgagtccatttgaagccgtccaagaacaagtcacctccaagtgtagccggatcaaggcaagccccccatctagcaagcacttgatgccacccagaactgggcttcttcagaacaatctgagtccaggaatgatcccactcaccaggcaccagagctgcgagggcatgggagtgatctcaccaactctggggaagcggcaaggaattttcacctccagcccccagtgtcccatcctctcacactcaggccagactcccctgggcagacttgactctgtctgccagcatatgcagagtcccaaggccaccccaccagaagtgcccctgcctgggttctgtcccagctccctgggcacccagtccttgagtccccaccagctcagacggcctagtgtgccaagaatgcccactgcgttcaacaatgctgcatgggtcacagcggcagcagctgtgaccacagcagtttcggggaaaacacccctcagccaagtggataatagcgttcagcagcactcaccttctggccaggcctgccttcagaggccatctgattgggaggcacaagtgcccgctgcgatgggaacacaagtgcccctggccaacaaccccagcttcagcctgctgggcagccagagcctcaggcagagcccggtacagggcccggtgcctgtagcaaacaccaccaagttcctccagcagggtatggccagctttagtcccctgagccccatacagggcatcgagccaccaagctatgtggctgctgctgccaccgctgctgctgcttctgccgttgctgccagccagttcccaggtccgttcgacagaacggatattccccctgagctgccacctgccgactttttgcgccagccccaacccccactaaatgatctgatttcgtcacctgactgcaatgaggtagatttcattgaagctctcttgaaaggctcctgtgtgagcccagatgaagactgggtgtgcaacttgaggctgatcgacgacattttggaacagcatgctgctgctcaaaatgccacagcccagaattctgggcaagtcacccaggatgctggggcactttaaatctgagcaggatgcccatagaaacccccatggtgacatcactctaggaagtggtgtcgatccatacccgcagttgtctcccgttacaatttgagtggtgttgtcagcccatgcttatccctctctctacctgtgacaaaatggaaagctggtgatttttcaagctacgtgtacatatttgaaaattttgtaaatggttttcctaaacattaatgacagaagtatttatacttcattttgtgactttgtaaataaagcgacggcttttgtttcagtagagttgtgtttactatgcattgttttgtgtttattatacaatgttacaaatatgcagaccgtgttgtttgctccagtgataccttgttaagctaggtggctgagtcgcttatggttttaatgcaatgagcaatgtggatatgaccaagagttgttgtgcaagttgacaaatgccaaatagaaaaccacttggccatttatttctatgttcactaaaaatcctattgccttgtgtgattcttaatctcttttgcgaacctttcagtctccgctagctctttcctaatgagctttacagcagaagccgttttatcgttaagtgccccacagagacactttaccaggaggctgggagagttctccagatttgggagaggcgcagagacagtgtgtgagccgagccctgtctcagcaatccacctggaggagctagagtatcctcctccctttaccattcagaccgagagaaaaagcccagcttgtgtgcaccctcgtggggttaaggcgagctgttcctggtttaaagcctttcagtatttgttttgatgtaaggctctgtggtttgggggggaacatctgtaaacattattagttgatttggggtttgtctttgatggtttctatctgcaattatcgtcatgtatatttaagtgtctgttatagaaaacccacacccactgtcctgtaaacttttctcagtgtccagactttctgtaatcacattttaattgccacctcgtatttcacctctacatttgaaatctggcgtctgtttcaagccagtgtgttttttcttcgttctgtaataaacagccaggag

SEQ ID NO: 225 - DNA, 2408 bp, Homo sapiens
aagaagatgctctaccagttctgcaagaggagattaaagaaagccaggatccacaacatgtattttcagctggtccagtttcagatgaagtattaccagaaacagaaggtgctaatgctgataaaacaccaaaagctgaagaagtcaaatcaagtgatagtttcttaaaactcactacacgtgctcagcttggtgcaaaatcagaacagttgctgaagaaaggaaagagcattcctgatgtgctgcttgttgacatcatagtaaatgctattaacgagatacctgtgaatcaagactgtatcctagatggttttccaatgactttaaaccaagcacagcttctggaagaagctcttacaggctgcaatagaaacctcacagaagtggaaagaaaaaaaagcacaaaaatccacattggctattgatcctgcgacttccaaagaaatacctcttccctctcctgcatttgattttgtcatattattagatgtttcagatacttcctcaatgagtcgcatgaatgatattatagctgaagaattgtcctataaaactgctcacgaagatatcagtcaacgtgtagctgctgaaaaccaagataaggatggagaccaaaatttaagagaccagatacaacatagaattataggcttcttggacaactggcctttattggagcaatggttttcagagccagaaaatattttgataaaaatcaatgctgaaatagataaggaatctttatgtgaaaaagtaaaagaaattcttacgactgaaatagcaaaaaaaaagaataaagttgagaagaaattagaagaaaaggaagctgagaaaaaagcagcagtttccctggctgagcttccacttcctacacctcctcctgctcctcctcctgaaccagaaaaagagaaggaaattcatcaaagccatgtgccttcaaaaactcctactgcaaaaggaaaacctcaatcaggtgattgacagaatgatttataatcctgttttcagtttcttatttttactcagtaaagaattataaattatagtctatctacattcagactttgggcaacttcaatcatatgaaacaaggctttacactcagatggaagtggaaaagccctcggagtagctaaaagcgtagttgttacaaagcccaacttctttgccatgtaggaggagacatggagtcatcacacctaggtctactgattagagtaagaccacagacgagaagaggaaaaggcacagagtaacaggtaacttcaggcagatcaagaggatacacgtctgtgtgctgaactatagagttacatttatgtaatgagtaagaacatcttaataaaataagaatgagtatagctggttttccaccagaataagggaacaaattaacagcaaccattagaactagaatttatatgtaattgtaaatcttcaggactatgtgattataaaagtatagaaacaagctcctgccatctcagtaaacatatatttatggacacagataaagagcctagatagagaacacttttagtttaagtttgttctagatccttaaccgctatggaccataagtctagcattaagtggcagataatgaatataatgacaaaagtgaagtgcttaattgttgtaatgcatgatattggtagagtgtcagtatccatttgtgtgtgtatataaaacaaatgaggctctggtttctagtttcagctttataaatggctgactgtgcagttacaccatgtctacctaagtatctttgatactgtgtcatgatcacatttctaaactctatagtctttctgcctcacggagatttgagataggtcttaatttttaaaattaaacttactcatattaaacaaagacatatgaagactttagtaagatatattatgatatattaaagaccattctgctccaggaaattagaaattaactacaggcaaaatacacacatcctaaaaaatgtttttatcatgtcaacaataaaacacaaagacatgaattaaacatacacccttttcccgctgtctcattaggaaattaaaaaacaattcagaggtctagaggaaaatggaaatatttaaaatgctttttagaactggggaagacaggccaagcgtggtggctcatccctgtaatcccagcactttgggaggctgaggtgggcagatcaccagaaatcaggagttcgagacccccctggcccacagggcaaaaccccatctctaccaaaaatacaaaaattagctgggcgtggtggcaggcacctgtaatcccagctgcttgggaggctgaggcaggagaattgcttgaacctgagaggcggaggttgcagtgagccgagattgccccactgcactctagcctgggggatagagtgaaactctacctcc

SEQ ID NO: 226 - DNA, 1896 bp, Homo sapiens
gcagatcctgtgcacagcccaggcagcgctgggcaaaggctgcctggccagctccttcatctgtgtgtacctgtttaccggcgagctgtaccccacggagatcaggcagatggggatgggctttgcctctgtccacgcccgcctcgggggcctgacggcgcccctggttaccacacttggggaatacagcaccatcctgccacccgtgagctttggggccaccgcaatcctggctgggctggccgtctgcttcctgaccgagacccgcaacatgcccctggtggagaccatcgcagccatggagaggagtctccctctcatgcggagccgaagctggactgtactgctgccatctcggctcactgcaacctccctgcctgattctcctgcctcagcctgccgagtgcctgcgattgcaggcacgcgctgccacacctgactggttttggtggagacggggtttcgctgtgttggccgggccggtctccagcccctaaccgcgagtgatccgccagcctcggcctcccgaggtgccgggattgcagacggagtctcgttcactcagtgctcaatggtgcccaggctggagtgcagtggcgtgatctcggctcgctacaacctacacctcccagccgcctgccttggcctcccaaagtgccgagattgcagcctctgcctggccaccaccccgtctgggaagtgagcagtgtctctgcctggccgcccatcgtctgggaagtgaggagcccctctgcctggctgcctagtctggaaagtgaggagcgtctcagcccggccgccatcccatctaggaagtgaggagcgcctcttcctggccgccatcacatctaggaagtgaggagcgtctctgcccagccgcccatcatctgagatgtggggagcgcctctgccccgccgccccatctgggatgtgaggagcgcctctgcccggccgcgaccccgtctgggaggtgaggagcgtctctgcccggccgccccgtctaagaagtgaggagaccctctgcctggcaaccaccccgtctgagaagtgaggagcccctccgcccggcagctgccccgtctgagaagtgaggagcctctccgcccggcagccaccccatctgggaaggtcaaagaaggctcttccaagaaacatgtagaagagaagagtgaagaaatttctcttcagcagctgagagcatctcccctcaaagagaccatctaagctgcctggaacctggtgcttgctagcagcacctgagccgatgtccagacggccccctgggggcttctcccaggagcccctggggacactggtgctgaactggaggaaaggtcgctgaaaacatcatggctcctatagacagccacccacaagccagggctgcttggagggaaaccccaccagaaacagccaatctgtgttacaaatgcatagaaagccaggagaagccagtcccagggaccaaaggagagactgttttcctttcccatccccaatctgccccttaaaatgtctctgtattagtccattcttgcactcctataaagaactacctgagactgggtcatttacaaggaaaagaggtttaattgactcacagttctgcagattgtacaggaagcatggctgggaggcctcaggaaacttacaatcattgcagaaggcaaagaggaagcaagcacgtcttcacatggctggcaggagagagagaaagtgaaggggaaggtgccgcacactttacaacagccagatctcgtgagaactctttatcacgagacagcactaggggggtggtgccaaaccattagaaaccatccgcagtatccaagcaccttgcactaggccccacctccaacaccggggattacaattaaacatgagatttgggtggg

SEQ ID NO: 227 - DNA, 2661 bp, Homo sapiens
ttctaaagaaagttggttttagcccctttgatagtccatggttaagacatcctttataaaccaaagatggccagcacactgctaaccagtcaccaaatgtaagacccataagaaacccatatttaaaaatctgaattttttagaagaatgcaaaactttagtaaaccctaagtaaagtcaaaatggagaaggggaaatatacagatggctagttgcataaaattaaattttacctttataagacaatggtgaaatctggcttgaacttgcttatgtgtttaacctataaatattggggtcttctgtctaaactggggtcactgttgcatggaacattgttcttaatagttgagaattgcttttttgaaaattttcatgaaggaattttggtaatgactttgcttgcaggttttttggggtgttttgagaaagtggcatggaaacatgcagtagttaatgagtttctcttggtactgaacactattagaatatcattagtgatattttttctctttagagcatttttaatgcaactagcccctatattttaatgtaagagttactctgcaatctaagcaaagcacccaacaatggtaaatgttttttaaaaatgcagaactaagatttttgactctaaagagagaaaattacaagggtgttgccttatagcaaacccttgggacaatccttcatgtgagcaaagtgttgatcttaatattggttgtctgtggtgtgcttttttgtactgtaaaaatatgtggttcatgtctaactctgctgttttattgtggttgtggttcaagtttttaatgtttaaagttgatgctgttttcagaagagctttttactaatttatttgtcagtgttccctatttgttacttaaccatgatcctccagattttttggagtattcttttctaaccttaaccctgccaaaccttgatccattttgacatttgttatgcactatttttatatctctgtgagagatttttccaacagtcagctattttatggcacactttttttgactgatgacatctcctttgctatacctcaatttttggaatttagagaagaaatcagtagttttgcaatgttaattatttagatatttaatttcgcagatttttaaactttattttcataatttctgcttaatgtttaaaattgaagagccttttcatgtattaaataatgaacacaaattatataattaaaataattggagatgttgaaaatcattttcccttcttaaacagaaataaatatttggaatgaaggggaatgtactagaacaccctttttgccacgggtaaaaataacagaaatgtatggtttgttttaccttcatttctgtacaagtaaagcttattagtctaatgttttgttcctttcccacctcacccctacctcttttgttttgttttgtttttgccctttatgtactacattcttattttctaacttttaaacactgtattggaggtttttttttaatttacagatcatatttattttactatttttgtagaaaattattaattttgattgtatttttgtattttaaaagcttcttcacttgtgttccctaaatattcatattgctgcccaaaagtatgactgtggaggaaaaaaaaatactttaaaaatccacactttttgttaagaaggaaacatttagcatttatatatttgtgtatggaaaacacttgatattttatccctgttgcatctggctgcacagagcctctcctcaaagatgctacaaaacttgaatataacacattttgtaaggctgactaacctcgattctgtgttgtgatgtgcaatactgtttctaatgtttgtataaaaaaaaacagtgtaaacctttttaatgcaaatttatttttttcattgcatattttgcagattttatccacagtgtcattttttactgtcagaaaagataccccttttgtcattgcaactattttttaaatccagaaatctttgtactgatgtaaatgattgtagttattttggatagtgttttgctaacaaaaggagagacttttttcatgcatatttctattttgtttttttgggttttattttattttaatagtagtaaaatacttggaataatttttcatattcttgtcattaatattattttgtatttttatgtggaaatatataattttatgacactaattgctaaagtttattttatgttgaattatttttggagctgaaatctttgtaatattaaagcaactagtttctaattcccagtttctgtatagaatcgcacaagtggtttatggagtgtttggattgtaattataaatggttctttgatatgcaaattaatattttcagttgattttattttatattcctaatggggtgttaaagccgttttttatttttttctaaataaaaagagaacccatgcttttatggacactaggtaaacaccttcagcttaaatttttcgttaaatattttagtttattttattgttatcttccaggtgtctaaatctccagtctgtctgttgtactggtaatttaactctgtaatggaatagtttgctgccaactatttatattaagtaatttttaaatatttgtaatattgttgactgactaataaactattaagttattggc

SEQ ID NO: 228 - DNA, 2300 bp, Homo sapiens
cagagcagcacaggctggacacagaatgcagactgggaaggggccaaggccagggccaggtgggcaagctgtcccgggggaaggggccaggatccctgccaggaagggcgaggactcacctcatttctgctgctcccgtcagtggggactgtgctggcagacaccttggtgagcaccatgctagtaggcactttggatggcaccatgccagcacgggttgagttgatgggcaatttggatggtgctggattggtgagcgcattagaaggcactgcaccagggggctttgagctagttggcaacttggagggcactgtgctgacagatgctgggttggcaggcactttcagggccactgtgttcacaggcatcaaggtggtaggcactttggagggcagagagttggcaggtgcctctgccccactggagcagatgataggctcggcctggtcactctctgcaccctgtttaccctctgcagcccctgcagaggccaagccaggggatgaggaggagaaggaggtgccagtagatacaactgaccctgtgggtccaggcaagcggcttgccctgggggtggaacgggccaggggctggaaggagacagatggagacacaggcccacgggatggtgtgaggctggaggtcgcacctgccggtggaaaaacacaagtggaaacacagacccaaagaccattaccttgaggcctggagaagggtccctctggcccagatctcatggtccctactgtgtctaggcctccaaatctcctgcccttggaggagatgccacagtccctttggtcactgcttcctggcctgaaagcccaacagctgccctcagtccttgacctgtagccccaggtctgtcctggcacacagtgaaatggtacctaggagcctgaagaccattattaattattctctccgctttttcctctcccacctgggaaacctcccctctcctgtgtctaccttttctactttgaccttagcctcatgcaatcctggacacttcccccactgctgtccctctcctaccaccatgagtgggagcagccatggatcagggcaaggggtggcaggatggctcatgcagaacagctcacaccagccgagaggcctggccatcccggaggcttgggaagagaggggacaaggacaaagccacccctgggaggctgcctgacctgggtgggggaagcagaggatagcaggtggtgatggtctgtaaaggcagttgcagcaggactctccacggaactcggaatgcacatgccaagccccacagctggcaaaagtcagggtgattctgatgtacagctcccccaccacaatctaataccacagaatctcatgggacctgtgtctacaaacgtactgaaacctaagcgccctctgcctctgtggtctacagcaactcctgaaaggcatcccgtggccaggtgacactgcaaagcagacaggtgcttggagcagtttggggatgacaaaagtactaagatgacgtctcccagcctctaactgctcatgtgtcttgtggctgtcccagggcactgagggctgactgggcaccagcgtcatgtggaatagtttgggaagtaggaaagagacatgctggcctgagaggtccagatggacaactatatatttctgagggggagcactgacatctggagttgagtccaggccactggatgatgaagaccttacttcctctggggactgagaagttttcatgattcactgggaactggagatctctgcggtaagacagtgcctaaaggttcccctgccaacagctgatgcagcccttcactgtccctctcccactgccctataggccctggctgttccctacagtccctttggcagagcgcaaaaatggccctacttatctcgctcatctccacccagccccactgcactgtgcctgtcagtcctcccgtctagggagggagtctatttccctactccttgaatctaggctggccttataacttgcttttgcccacagaatggagcacaggggacactgtgccagttttgagccctctctgagaactctgcccagctgccatgatgggtttgtgtgctggaggatgagagactacatagaagagaaccaaggtgctcagcaaacagccagaggcagaacttacgtatataccggtgagtacttgagaggaaattcagccaagaccagaagaaatgcccatgtaggtagcccaaatgcctgacccacaggatcatatgctaaataaatggctgtattttaagctactaaaaaaaaaatttgg

SEQ ID NO: 229 - DNA, 2625 bp, Homo sapiens
gcattgatgttggccccagcctccaggagctgctgcaccatctctcggaaatcatcaatgcagcactgcaaaccgtgccacgcctcccgggagggctcctgtccacatggaaagatgcaggccagacactgccggctcctctttactctctgctccggagggaggcaggaaggagtctcaagggccaccacagtgcctcttcccccaagactccagagcaccagaagtggaacccacacagctggggctgcaagcgtggggcacaggtgaggagaagagagtcacaagcagagcctagggcaggcactgagagggggccacctgcatagctctgtgcctgcccagggcctggctctctcacccacagaggtggctggtcccaccctatttcacggaggtggagaccagggctctcctgagcagcctaacaagaagcagcaatgactaccggccacccctgctcccgtggggccccgcactaggtttttctgcaggctcctgggggtccactcatggcctcagctcacctcacagcaggagccctctgcatgcagcccccgcctgaaggacggctgtcccgcacaggctcacctcagggctgcccactgcttggggcttgcctgatgggggcaccctgggccacccagcctgaagagaccaggcaagatctgggggctggagcccaggagctgtggacaggcccagcccccagccttggcatgagacggcacccaggtagcagggagtgggccgtctgctgggagctgctctgggctcagccacactcaccttcttccaggtcatttcgggcagcggcctccagaaggacaacactgggagggaagaggacctgcttcaggagcccttggctggctgcctccttccggggacgctccccaggacccttcttgccctgggcctccttctcagcctgggcccacatcttcacctgctgggcgcgccgcttctgggcatgcttcagccgctcctgtgtgctcatcctgcccaccatgggcatctctgccagcagctccaggtgctcggccatggcggcggctgcttgcccacagggctgctcggggcaccagagtggggagcttgggggccaggctgggcctgaggggtggggcagctagctggactggcaccctcgggggcatccccttcccagagcttcgtgcccttggctgggtcaggaggccccacacaataaccaggcccaggcagccctggggggcatgggccggggcagggagggcagtgtgggagggcaccccaaacctgctccccaggccagcctctagctgtcgacaagcagcgcctcgcctccctctcggggtcagggtgcacaacctatgggaggcagccccgagacctggccggcctcagtgcagggtctgaaactaattacccagataacaaggttccagcttccgggcaccctgctgagggggaagggagggcagggccaaccagcagtgagagcccctgtgagcccctgagagtcctcttttcaccttctaggctcaggagcctgggtggggcctgggagcagccatgacccagcccccaacccctcccagctgtgtgccgaggtcagtgcatcagtactaacgaggaggtgcagccgctgaggctgggggagggcaggtagtcagagtcctggagtcctggccccagggcccaggggtgaggctctctaggcagccagggcaccaagggcacaggcgggccggccgcagtgtcttcaggagcacctcctcttccagcagctgctcacacctgagaagtggggaacaaggaagcatatcaaggccggcttgaggcagggtggcccgggggagcccctgccctgggcctcaggtgagaccaggcttccagctgtctcaggtcctgccctgtgtgaggcccaccctttgtccacagagagcactgcaggtcaacagtcctgggggtacggggagctactctgcccccattctgccccaggttcagagaggggcgggggaaaggcatgtcaggctcctcccacccaccctttccagaaagggccgcccaccccagcgaggcgttccctgctaggctgctcctccagggccaggcgctgccctaaggctgggcagggtgaggtctcgtggaacagccttgagggctttgcaggctactgccttccaagggcaggccccgcctcctgggcctccacctctcctgccttccaagggtaggccccgcctcctcctgtcctgactgataccccagcctctcactgcccagtctctagacctcttccttgatgggctcccacaatgcctctgccatcctaggctgcaataaaagcccccacctggtgcctggcttgaggcctatggggacagacaggcaggcagacagcttcggctggggcacaaccctgcctatgtacctgctatggccctagtcctgcccgacacactaagtgtggttgctgggctggccacaggcctcacctcagaaggcactctgtgcttggccaggcgcggtggctcaggcctgtaatctcagcactttgggaggccaaggcgggtggatcacgaggtcaggagatcgagaccatcctagctaacagggtgaaaccccatctctgct

SEQ ID NO: 230 - DNA, 2286 bp, Homo sapiens
ctaaacatattaacaacaatctatcttcatctctaggtgatgctcaagatgaaaagaggtatctcacaggtaatgaggaggcgtatgggcgttcccatattcctgaacagcttatgcatatttacagccaacccattgccatccttcaaacatctgaccttttctccacaccggaacaattacatactgctaagtcagctactttgccaagaaagggacagttagtctatggccaattgatggaaccagtaaatcgagagaactttacgcagaccttgcccaaaatgccaattcattctcatgcacagcccccagatgccagggaagaggatatcatacttgaaggtcaacagagcctgccatcccaggcttcagattggagccgatactcaagcagcttactggaatccgtctctgttcctggaacactaaatgaggctgttgtaatgactccattttcatcggaacttcaaggaatttcagaacagaccctcctggagctgtccaaaggaaagccctccccgcatcccagagcctggtttgtgtctcttgatggaaagccagttgcacaagtgaggcactcctatatagacctgaaaaagggcaagagaacccagagcaatgacaccagtctggactctggggtggacatgaatgagcttcactcaagtagaaagctcgagagggagaaaacattcatcaaaagcatgcatcagcccaagatcctttacttagaagatttagacctaagcagcagtgagagtggaaccaccgtctgttcccctgaggacccagctttaaggcacatcctagatggagggagtggagtgatcatggagcaccctggagaagagtcgccaggaaggaaaagcactgttgaagattttgaagctaatacatcccccactaaaagaaggggcagaccaccactagccaaaagagatagcaagactaacatctggaagaagcgagaggaacgcccactgattcccataaattaactccaatggggattgtgtgtctgctgtctcgtgctgtttattcttgcttcttgttgtaaattgcagtacgaacttaagaaaatgagactgagcaatctcatggttcttggacatgtctcaagcagagtaaatggtaattcagtaatcagagagaaagataccaaggaatgctttttctggcctattcatttatttttgggtgatgaatttacagtatctaagttttcaaaatgtaaaatagcttcaagatgttagttatctgaaaatgttgctcagccagccagtttggccttgactctcttaagaataacagtgaaatatatactcctcaagttgcctccaaaaatgttgcctctaccatggtgactaccccatggaacatttagaaacaaaactgacttcaggcatcatattattttaaatgttactattacgtcttcttctgcctatacttaagaataacttgataaatgacttggactgatgttactctggagttatcacaaagaaaatgttgtttggtctttaaagagcatgtgtattgtatcatcccaaacgtaaatcctacatttatataagatgggcaagaagctacttggtcattagagagggagacaccagctctttggttgtttttggatataactttacaaaataagtaagatgttaatttagaaatttgagaaattaatgctctaatactgagtttttatttaaaaattattttttcttcccctcaacaatgaagcaagcttagctgtcaagggaaactttttacaaatctgaaaaaaacaatctatgactttggtttaaggctcactgatacttttaggctaaattggttttaatatatttcttctattctaaaaacctgaactcagtcacttaaaggctatgaaatttaaaaaaaaagtcgatgtgaaagtttcttttgaacactaaaataaaatatgtgcagataaaatatacattgatttgtttttcttaaatgttgatgagaagaaaaagagatgccattttcctgaggctcaaaaataccttcaggatagttgtatatccagttattgattttcttaaaagatgtgtaaggaaaacagtttcaatttcaggggaaaagtaaaagtttttccctaagtcacttaaagcctttgcaacttcttttttcagttttgtaagtaatatatctatgttcttttcattatagcaagcatacaatgtgaacaactttttaattaactctgaattaccattcatacatcctaaaaataaaagctcgttattcatt

SEQ ID NO: 231 - DNA, 2063 bp, Homo sapiens
gtgcgctgggcggcgctcggaccccttggcagccgcaggtgcctccccagcccagcccagctcagtccagcgcagcccagcccagcccagcccggcgctcgcagcctccgccgcttccgggcagataggtgccttttcttgctccttgctcttggagttcttctcttagtccctgttccctggatgaaagcatcgctccgagcctcatgggaggaatgaaggaagaatcgagactagatatccaactaaggcttcgggacatgttttgagcgaagatgggtgtttctgcccggatagtataaatcgaggatccaggtctgggcagattcaaccatgggagccaacacttcaagaaaaccaccagtgtttgatgaaaatgaagatgtcaactttgaccactttgaaattttgcgagccattgggaaaggcagttttgggaaggtctgcattgtacagaagaatgataccaagaagatgtacgcaatgaagtacatgaataaacaaaagtgcgtggagcgcaatgaagtgagaaatgtcttcaaggaactccagatcatgcagggtctggagcaccctttcctggttaatttgtggtattccttccaagatgaggaagacatgttcatggtggtggacctcctgctgggtggagacctgcgttatcacctgcaacagaacgtccacttcaaggaagaaacagtgaagctcttcatctgtgagctggtcatggccctggactacctgcagaaccagcgcatcattcacagggatatgaagcctgacaatattttacttgacgaacatgggcacgtgcacatcacagatttcaacattgctgcgatgctgcccagggagacacagattaccaccatggctggcaccaagccttacatggcacctgagatgttcagctccagaaaaggagcaggctattcctttgctgttgactggtggtccctgggagtgacggcatatgaactgctgagaggccggagaccgtatcatattcgctccagtacttccagcaaggaaattgtacacacgtttgagacgactgttgtaacttacccttctgcctggtcacaggaaatggtgtcacttcttaaaaagctactcgaacctaatccagaccaacgattttctcagttatctgatgtccagaacttcccgtatatgaatgatataaactgggatgcagtttttcagaagaggctcattccaggtttcattcctaataaaggcaggctgaattgtgatcctacctttgaacttgaggaaatgattttggagtccaaacctctacataagaaaaaaaagcgtctggcaaagaaggagaaggatatgaggaaatgcgattcttctcaggtaagcaggtccccaccaaactcagggtcatgggtatccccatgatggctgcaatatcttcgagagcttctactgggaggtcatttcagcttcctgcttttgctgcttagtgaaataggagaagtagatcagccgggtttctaaaagggcagaccagagctcctctgaggatcctagcagcaacattttacttgtaggctttccgtctagagttctgccattaacttgactcagttatttctctcttccagttctcaattcaaaatttacaaatttcctgggagaggaactgtcattggccaagcttaggtcaggggatgattcataaaattatggtaaaggggcaggtttcaaagtacacacatggttgttttggacctcactcctgctttgaggagtttctgggagcagccaaccctagagatgatgtctgttctttgccacaagcagaattttatgatatcaagcctcacagaagagtgtctgttcacaggaatgacggaattctaacatggtggagcactattgctggatttcaggctgagttaaattaactttgtaactaagtatattattctctgtcagagtcagagctcagatttcagtgaagtaacttgcaaacactcagttggattttatactcacatgtggctctatgaattataatgatgatgaagtaataaagttactttgcctct

SEQ ID NO: 232 - DNA, 2518 bp, Homo sapiens
aaagggaacaagaagcaaggcgcctgtgacacaaaatggagaaagaggaaccgggagtggaaaggaagaaggaaaaccgagtaaaggaggttattcataagaacaggaaaggggccgaggggtagagaacacccgaaggaaagcgcaggaggccctcgtgagagggcaagggggaaaagatcgacgaagtaagagcgaaaagaggaaaggaaagaaagactttctagatgcggagtctccattttcagcagcgccatattcgcttttcctctcgccgcttttggctgggttttgtgtgcggcggtggacaggcgccagcacatttctgcagcttcagcagctctgctcagacacctggggagggccgcagggcccgggcgggggacgcgcgctcttggcccaggcccgggcgcggccccctccccggcctggcggttcctgcgcagcgccagccccgcgctcctctaggctgcaaagggggcctccgactcgggcccggcccggaggggacacctcactcggggccccgcggcagcccccaggggacgcgggccctctagtttcgcccacggtgtggctgggcatgcgtgccaaggggatgcgtaaccgagaaccgaaaaagacgaacttaaccttcggggaggaggagagggcgcacgctgcgggtaccggggcttgggggcgctcctggaggtgacggggtcacctccacctgcgcggggccactctctgggagccggcgatcgatgcccgccgcggcgcctggcccaggcccccaggcctctcgcggctcccggaaaaacgtccgaggtcggggctcggccgggagccccaagcgggtcccctggcctcgggacgccagtccgggaggcggccggaactccggttttcgcggttctcagcgatattaggcgcggccagtgtctgaaagctcctcggggttacgtcccggggcgactggaggcggctcacgactcagaaagtcggggcttctcgccccggatccccaccgctggcgtctgtcgaatccccacctcggtcctcgggtagaggcgcaagcgcgccccaagaccattctcttcgcgcccacccccgttattcttcactttcacttgacatcgttcttcactcaaggttaggtcctcgctagtgccagagaagcccctgggtccccagtgccctcagccccgcagcgtagggagcagccggcccgggagataaggaggccacagccatggaggccccaggcccggagtccccgcgccgtcgggttttgagccgcgcggctggccaggaccgccggctccttctctgtcccggtcctccgctcgcagccccgcagaggtgacggtacctggaggctggaagcgacggtttcctcgggccggtggagggaaacatgtcagggtcacagcgaaggaaaccgagacccacaggggtccccgggcgtccgggacgcgtcgctggttttgctcctagaaggaaaggccttcccgcttttgttccaccggctcaccaggtcctcccttcctggccaactctaacctcagctttgtgcgtgtcacccggccccgggataatcggatcctcccagacccgggaatccatcagaagcgctacccgtacttggcgccctgaaagttccccaagcgcagcggccgcgccctcgagtgcatccactccgcgagccacgggcggcgcctgcccacccgcggctcggctttgcgtgttgtaagccgactattctatcaccattgcaggataagctggcctttaaattttcaaagaacatttaggttattttcaacagttcatgcttttcatatctgtcttttcagactgcagatttccacaaggaaaaatgtatctttcctagacggcaaaaagcagatttattttcctttttaaaaagttgccttaaaacgcctatctcatagtacttggggattaaactgtttcccctaagagaaagttcaacggctaagctcaaacgttagtcttgacacctttagttaagatgatcctttcccagtgttgttagtgaaatgttaaaatcaaaatttcaaaatgaagtagatgttttatgtctttagaacattccagaaatttaagaactaaaaatattgacaaggtgcaaggcctagttcacaaataacattccagcttctgtttctgtgagagttcttttttaaggctatgaaagatttttgaagttaaagtattcatagctggaacagacatttatcatttgacaacatatgaaattttaaattgtgcattgtaagtctcatgtttatgttatgtttcttggatatattccatggcattttgtgcttctctcttttatgggaaagcttacaattaacttaccaggtttttcttttaatttaatcaggattagattaaaaaaaaaaccctaaagctacttagtaaaagatactttatggcagccaaatacaaaaatgaataaagcttaaagtaagttattttctcatctctcaaggatggtttccttctg

SEQ ID NO: 233 - DNA, 1944 bp, Homo sapiens
tgctctaagccagcacttctcaaactgcccgtgtatctgaatcaaccgaggtacttttaaaagcccagatttccggccaggtgtggtgggttacacctgtaatcccagcactttgggaggccgaggtgggcggatcacctgaggtcgggagttcaagaccagcctgaccaacatggagaaaccccatctctactaaaaatacaaaattagcctcgcgtggtggtgcatgcttgtaatcctagctactcaagaggctgaggcaggagaattgcttgaacctggaggttgtggcggaggttgtggtgagctgagatggtgccattgccctccagcctgggcaagaactgggcaagaagagcgaaactctgtctcaaaataaaataaaaaaaaaagccctgatttccagagcacccccgccccgacccaaagaacaagaatctccagggctggggccccagaatctggatttctagcagaaggcacagatgattattaggtcagacaagtacgggactcctctctaaaagaactcaatgttgcctgagttctcttctgcatcccattatttcattctgctactgacaatggggcccgttatattcattcattcatttatccaacaaatatgcattaaatgctcattatatgccaggcacacgctccaagctggggacagggcaaggaatgaaccagaagccctccctgccctcgaggaacttagggttcagcagagaagacacagacttcaaccagcaatgatcattgactatcaggagagcgccttttggggggaaaatgcccatcgggcatggagagcttgctccacatccacagaatttctttcttttttgtaattactcaaaaaggcttcattttgtttttctttagctttctgaactaaacacgctgtgcttgttgtgccttcaacactttcccaacaatttcctgctccaccataaggaaagcacatcgactcctttcccagacacattcagcacgtgcgggaccaccatgggccttgctgatgtgtgttttcattttagacaacctcataagaactgcggattctgcctgggcacacaccacatgcagatttcagtgccttccagaccatcttggcataaaagtaaacaattctattgccagggactcaggacaccgaattttgttagaggctgtatcataggaaagcctacaacgatgtgttacacgctgggccatgctgactgcctaaactccagacatcttttaaaaacctgacagcttttctaagcctgaacctgtgctaaatcacttagtcctggaaacaaccctatgtggttgggaccattattatgctcatttcccagaggagggactaaaagagagggcagagtctggatctgaacccttggaccaggcatttgcacaggggaggccctccccacagagagggcggcaggagggcaaggccacctctgtcattggggccatggtctggggagctccctgaaggcagatctgagggaggagaaggagttaggtggaagaaaaaagggagattgttccaggaaccagaggagcacagctcattgatgatggagatatggcagaggagtttagggcactaggagaccccaagggtcagcaacttcatccagggcatcaagcaagccagtgtggagcatgacctgacctgcagcccatgaatcgggcagggcgtctgtgcatttgcgggtatgacccaccctgagaaaggaggctggtagccacgaggctgagcccctggactgggagtcagggttgctgagtccaaaccttttgtggtcactcactcaccctgaccctgggcaagttacttaacctcgctaagaattcaggtcttagggttattgtgggaatagctaagatcatgtgtgcaaattgctgaacacttaataaattcatattggtgtctgtgtggtt

SEQ ID NO: 234 - DNA, 2146 bp, Homo sapiens
tctccaacctgaaggcttgctgggggtgcaatgtcaccttcacacatgctgggccctttcagaaaagtgccagatcgtgtaactggtgctatttttcatgctctggtacaatgtgtagcaccacgggggtctcagctttaccaaaatcaaaattccatttgtcagctaagtgcagaggcatttgttttttgctctcctcccacagaattgtcggccatttatttgcaggccttttgcgggatttcttggctatttatttgcaggccttttttcccagccccaaattcttgggttggctctgtctgcttaaagagcctgtcttcacaaagctgcactcgggtgcctctgtgcgctgtcttagatcctactgccggcccttcaggactccgagccaggaaagaactctccaacctctggctcgagactctactttttttctcattcttttccttactctcctcctccttctacttccgactaattccatctctttttttttttgttcctctccttttcctattcctccttcccaccatctctgagttgttgactttctcctataatccttctctattccctttctctttttgtccacctctcctttagtctctgtttctctgcccttcttattcctcttctgtcctttctcctctcctcaaatctctgatcatcttctcccgtacatccctgtattgatttttctgtcctctaaagggctcatggctgattcagacagcaagtccatgcactggactaatgacacaaatactttaggtcgccgtttcacctactcagcccagaaagtaaagctgagcgtgaggccctgacctggagcctgctccagcccgcctcccggagccagcctgcaccgttgccctggcagcgatgatgcatgtgctgtgggccctgccggcgcctgagtgcctctgcctgaacactgctcctaagcgagcccactcccagcactaccgcatggctctgaggacattttctttcaataaaggcagactctggccccaattattctgatagcaaacctcttcctcctcattgaagccatgccatcaccttggtttggagagagacatttttttcccattcataagctttctttttcccatttttatgtgaagccccctctgcttttcagctggtgattgctctggtgagactgaatggacttgctggtgaaatgaaatctcttctttcctgtcttggtcctgcctaaattcctacaaatatatttaagccaaggactcaggctaattcctaagttgatcacattaatttgttactcctagagggaaaaagatcaattcccttgaagcatgtggagtacctcctgtgacagctgacttgccaggggactccctacagaattctgtgatatacattttacttctgtgtatgtatggtatatatggtatgtataccatgtacacacgttacattgagtatgaatgactgtggttggaaacacacacacacactcaagtctgtaaatatccttcctcactgaaacctgtgctttggaaatcatttcttgtacagctgtgcagtttcttgtaacagctgaggacaaagctaagacaggcggacaatttagacaaagatcatctaaagagtatagtatctccctagcaactcatgaggacagacaaccaagtggcaaggttgactcccaatgggatggcagacttttcttctctcctttttgagtttgtgtttcctaagtgtttcttaacttctgagtgcaccaggctgtacccgttagatcctttcaatatgacagttttgtgcttctctctgacaggatgtttctccaccgagctgtagcacaggatgggagggaggtgggaatactccttgcctaggctggagtttacagagacactgcacagcttacactcctgttaagtgtaaatattcaacacttccattccatttgtgtaaaaaataaagcacacacgattataaaatcaagatgtatatttcatactcagtgtgtctgtgcatatttattgcgtttctagttgtcagcggtgggtggccccattgtaaaaatgcctgatagagtgtttataaacatgtcatggttttattataagatataaatattaaaacattttatactttatggcaaatg

SEQ ID NO: 235 - DNA, 2892 bp, Homo sapiens
tttctgttccagtttgtagcatttttctgcttgtcctttgaagagtctataaatagcattggaaaataattctcatatttaaaggcactgctgggtcctccatcaggtttctcctttcgaggcacatttagggggcggtggtcttcactgctgtccttcctgcctattccagggagccctgtgctgtagctcctctgtgttctcaccactcagggaaaaagcagctgtctgtccttcactcccagccagtgccctgtgcagacccaactcctttcatccacctgaggcagcccctcctgcaactgtcattctccttctctgaacttgctccagtgggcctcaccctccagggaccagatgcctgagacctgaaatttagagccagatgtcaccgctgctccctgtttggccgggagggaacttcctggcatggggacctcatcagatgcaacttcctaatccctcgtgtttcccccagtcctcctacctaggaggctcccctcaacttcagcctattgaagacccagcctctgttctccttccgccttcctggggtacaggtgaggtctgattatttgccctgtttaaacaggcgtgaacacggtgccccaatcaggtgggacattggtccagtggaacttggctattggctgagcggggcacccagcttgaaagtcctgaggttctttttttcactcttcttcacagtctaggtagggcagggctgagatcagaagccggcaatggccgggcattgtggaattaggaaaagcatttgagagggagtcagcaagtctgggtttgagtcacacctccaccatctggtagccttgggatcacaggtgatctagcccagcagttctcaatcagatgattacagcccccccagggggcatttagaggtgggtgaaggtgcttttgtggtcccaataacaggtgtattaccaacactgttacagggaccatggatgctaaatgtcccacccaaaatcccagagcacccacattgagaaacattgaatttgcctcattaaatctatcttttctgtaaaaacaaaatgactccagcttgtgaagcactgtgtatgtaagagattcgtggagttgttgttctacccttggctttcccctccctgcagaggggctgatgggagggcaggcgtgaccttcacccccagcacacaccttcttaccagccctagccactctgctcaggggcatgccatgagtgggctagcgcgccccatccgtcttgctctccacaggagcaatgagcccaccagcccaggtttacttttcctggccccagctttccagcctctccacagcctgttcttccttgctcttagtttctgattgctttccacccttcgtcatgaactcttctacagccagggaggcccttgtgttcccatctctaccccgggagcctctcggcatcaggctccagacttcttcctctgtcatctgcctgctgttgtgatgcctgctgtgcagactccctcaagttaggacagagtgcttcctctgtggagtagggccctccctttcctttctgggcatgctttccctctgagcccacgttgcctccaagtcctttcttagtgcaccacttgaggagtcactgccagccggacacagatggcccaagactagcaacggatttctagccctggccccagataatggttcataggcacgccggtctcttcctcaggtcatcattgtcatctacctgtccgtggtgggtgtcctgttgctctacatggccttcctgatgctggtggaccctctgatccgaaagccggatgcatacactgagcaactgcacaatgaggaggagaatgaggatgctcgctctatggcagcagctgctgcatccctcgggggaccccgagcaaacacagtcctggagcgtgtggaaggtgcccagcagcggtggaagctgcaggtgcaggagcagcggaagacagtcttcgatcggcacaagatgctcagctagatgggctggtgtggttgggtcaaggccccaacaccatggctgccagcttccaggctggacaaagcagggggctacttctcccttccctcggttccagtcttccctttaaaagcctgtggcatttttcctccttctccctaactttagaaatgttgtacttggctattttgattagggaagagggatgtggtctctgatctctgttgtcttcttgggtctttggggttgaagggatggggaaggcaggccagaagggaatggagacattcgaggcggcctcaggagtggatgcgatctgtctctcctggctccactcttgccgccttccagctctgagtcttgggaatgttgttacccttggaagataaagctgggtcttcaggaactcagtgtctgggaggaaagcatggcccagcattcagcatgtgttcctttctgcagtggttcttatcaccacctccctcccagccccagcgcctcagccccagccccagctccagccctgaggacagctctgatgggagagctgggccccctgagcccactgggtcttcagggtgcactggaagctggtgttcgctgtcccctgtgcacttctcgcactggggcatggagtgcccatgcatactctgctgccggtcccctcacctgcacttgaggggtctgggcagtccctcctctccccagtgtccacagtcactgagccagacggtcggttggaacatgagactcgaggctgagcgtggatctgaacaccacagcccctgtacttgggttgcctcttgtccctgaacttcgttgtaccagtgcatggagagaaaattttgtcctcttgtcttagagttgtgtgtaaatcaaggaagccatcattaaattgttttatttctctc

SEQ ID NO: 236 - DNA, 1884 bp, Homo sapiens
attctcccggctggtttttctgcagaactgtccccaccatctgacctgccaggaattcagcttgtgaatttgtctctgtctgtctccaggcaccaccaccagggcagggacccacccccccccccgccccaccccagggccctggagcagcggggcctggcacacagtaggcgttctataaatgtgtcacaagaatggcttccctcaggaaggcggcattaccgctgcctttctgcagaaaaggaaactgaggctcagcaagaaccaccgcccagccagagccaaggtcacagagcacgtccgtggcacgcgtccaggtcgtgccacagcagggccggcggcttcgacgcgggcagccgggtcccttttctttgacagatggggaaaccgaggcccggccggctgccggggctcctcgcacctaccccagcaactcaaattcaccacctcggactcctgcgaccgcatcaaagacgaatttcagctactgcaagctcagtaccacagcctcaagctcgaatgtgacaagttggccagtgagaagtcagagatgcagcgtcactatgtgatgtactacgagatgtcctacggcttgaacatcgagatgcacaaacaggctgagatcgtcaaaaggctgaacgggatttgtgcccaggtcctgccctacctctcccaagagcaccagcagcaggtcttgggagccattgagagggccaagcaggtcaccgctcccgagctgaactctatcatccgacagcagctccaagcccaccagctgtcccagctgcaggccctggccctgcccttgaccccactacccgtggggctgcagccgccttcgctgccggcggtcagcgcaggcaccggcctcctctcgctgtccgcgctgggttcccaggcccacctctccaaggaagacaagaacgggcacgatggtgacacccaccaggaggatgatggcgagaagtcggattagcagggggccgggacggggaggttgggaggggggacagaggggagacagaggcacggagagaaaggaatgtttagcacaagacacagcggagctcgggattggctaaactcccatagtatttatggtggccgccggcgggggccccagcccagcttgcaggccacctctagctttcttcctaccccattcccggcttccctcctcctcccctgcagcctggttaggtggatacctgccctgacatgtgaggcaagctaaggcctggagggtcagatgggagaccaggtcccaagggagcaagacctcgcgaagcgcagcagccccggcccttcccccgttttgaacatgtgtaaccgacagtctgcctgggccacagccctctcaccctggtactgcatgcacgcaatgctagctgcccctttcccgtcctgggcaccccgagtctcccccgaccccgggtcccaggtatgctcccacctccacctgccccactcaccacctctgctagttccagacacctccacgcccacctggtcctctcccatcgcccacaaaagggggggcacgagggacgagcttagctgagctgggaggagcagggtgagggtgggcgacccaggattccccctccccttcccaaataaagatgagggtactaaagttgtcttggtttttattttattattatttttttctttttccagtatactagcttgtcttttaagaaaggggatattaaaaaaaaaaaagacaaaagtgtttttaaaaaaaagcaacacccacacctgtgtctgtatatagtcagcttatctcgtgttcaatcgtctgatctctacagagagaagtggaaaatgctgtatcaagggtgggcttagctgtgcctttccaataaagatgtgagaagcttc

SEQ ID NO: 237 - DNA, 2361 bp, Homo sapiens
ttttttaaaatgtcacttcaataaatgcttttcctctgccataaagaccaaacatcttgctgtggcctacaggagacaggatgatccagcccttgcctcccttactctcatctctagctaaaactgcgctgctgtctctgcactccagccactggcacttcctgattacttggggcacgctgtactcatcttgctcccagcctctgcccatgcaggtgccctctgccctcagcactgcctttctctacttcatttatagactgctgtccttcagatctcggttgaagtgtcacttccttggggaagctggcttacactctcaggactcggttaggttcccccgtcaggctcttctatgtcaccatgtttctatttttcacagcacttacctgttttaattacgttgcaaatagtttttgtttgggtctagagaagcatgtattcactagtacattttatttgtgttctctaattattttttctgcagctaaattagaaatttgtagttttccccctaaaaatgcaatgatgttttctctgattttcttgtcacctttcttccaaaaaatccatgtgttcaaagtgcttgcttgcagtttgccccataataaatggttgtttaatccaaatatctgagtagcaaactgagctgatccttctggagaaagtatggttgaatagccgagaccactgagtagtcgcagagaagaccacacatcctgaactcctcagtctggtgtgaggggaggacaatagataactggatgtgtagtgttcccaaacatcactgatcccaaaccattgcttctgcctgccactgccacaaatacagtacgactgccaccccttcatactcagctttaatcctcagcatttcttctggtcctttatgtgcagatgttactcaaagtctacatggaatgccaaaatttccacaggccttgatttttttcacggtgattaagatcagaagtagaacccatcaatactataacactgcactgactttctgatttcaaaagcaactctactctctacaacccacgcaaagtttttccttaccatttggaacccttcaggagttacactgaagccttgataagactgtttcagccaggagtggtggctcacgcctgtgatcccagcactttgggaggctaaggcaggaggattgcttgagtctgggcaacatggcaagactggctctatttttttaaaataacatttttaaaagtatgattaaaagactgtctttctattggctttgctcccccgatggtgagtgtctctaggagtcattatcaataacatcagtgagaatttctttgctggtcacatgaacaccaaattcaatcttcatatcaaccggtgtacagttctgggagcaaccgggatttctccgggatttcaaaaacagcctatgtggcatgactcatgatatccacttcagttttataccaagtgcagcaaagccaaattttgctgcaattagctgttgcctagaccactgtgggtcatgattggcatcatccttgaaaaacatctccactttaggtgggcaaaactcacatccttccttgacaccaggatttctttcgagtgaagaaccagttggtattcttctgcaaaccattcagttggaattatttcacactggggcacaatgaaagctgtctcctcacattttctggtgaaagcagttttaatacctgcttcctgtaacaacagaaaaatgcaactggtaattttatttgagattgcagcttttccttccaggtgattctgactgcatttcctgctgtaatctggtccttagattgcaggacttttcctggcctatctaacaagcaattcatagacctcttttgttttaccctcacatagttttttagcaatgttcagtacctcagctctcactattatcctgagtgggatgaaagttgcacccatgctgagaggcagaaatctctgttgtgaatatttgatacctcttgctttatttatttatttatttatttattgacacagattctcactctgtcacctaggctggagtgcattggcgcaatcttggcccactgcagcctcagcctcccaggctcaagcgatcctcccatctcagcattgccagtagctgggaccacaggtgtgtgccaccattcccagctaaattttgtattttttgtggagacggggtttcgccatgttgcctaggctggtctcgaacttctgagctcaagtgatccacccgcctcatgcctgcaatctcagcattttgggtggccggggcgggaggatctattgagtccaggagtttgagagttcaagtccagcctgggcaatatggtgagaccttgtctc

SEQ ID NO: 238 - DNA, 2590 bp, Homo sapiens
aggcccggcgcccgcctgcccgcaccctcgtcctcacagacgccacagccatggccatgatggtgtttccgcgggaggagaagctgagccaggatgagatcgtgctgggcaccaaggctgtcatccagggactggagactctgcgtggggagcatcgtgccctgctggctcctctggttgcacctgaggccggcgaagccgagcctggctcgcaggagcgctgcatcctcctgcgtcgctccctggaagccattgagcttgggctgggggaggcccaggaggagaagggggacgtccccaaagacacactggatgacctgttccccaatgaggatgagcagagcccagcccctagcccaggaggaggggatgtgtctggtcagcatgggggctacgagatcccggcccggctccgcaccctgcacaacctggtgatccaatacgcctcacagggccgctacgaggtagctgtgccactctgcaagcaggcactcgaagacctggagaagacgtcaggccacgaccaccctgacgttgccaccatgctgaacatcctggcactggtctatcgggatcagaacaagtacaaggaggctgcccacctgctcaatgatgctctggccatccgggagaaaacactgggcaaggaccacccagccgtggctgcgacactaaacaacctggcagtcctgtatggcaagaggggcaagtacaaggaggctgagccattgtgcaagcgggcactggagatccgggagaaggtcctgggcaagtttcacccagatgtggccaagcagctcagcaacctggccctgctgtgccagaaccagggcaaagctgaggaggtggaatattactatcggcgggcactggagatctatgctacacgcctcgggcccgatgaccccaatgtggccaagaccaagaacaacctggcttcctgctacctgaagcagggcaagtaccaggatgcggagaccttgtacaaggagatcctcacccgcgctcatgagaaagagtttggctctgtcaatggggacaacaagcccatctggatgcacgcagaggagcgggaggaaagcaaggataagcgccgggacagcgccccctatggggaatacggcagctggtacaaggcctgtaaagtagacagccccacagtcaacaccaccctgcgcagcttgggggccctataccggcgccagggcaagctggaagccgcgcacacactagaggactgtgccagccgtaaccgcaagcagggtttggaccccgcaagccagaccaaggtggtagaactgctgaaagatggcagtggcaggcggggagaccgccgcagcagccgagacatggctgggggtgccgggcctcggtctgagtctgacctcgaggacgtgggacctacagctgagtggaatggggatggcagtggctccttgaggcgcagcggttcctttgggaaactccgggatgccctgaggcgcagcagtgagatgctggtaaagaagctgcaggggggcaccccccaggagccccctaaccccaggatgaagcgggccagttccctcaacttcctcaacaagagcgtggaagagccgacccagcctggaggcacaggtctctctgacagccgcactctcagctccagctccatggacctctcccgacgaagctccctggtgggctaatgctgaaggggcagccagtcaccagagcgcccacctggcacacccccctcaccccagccctgcgcatgggcctgctgcttgtcccgcctgtctctcccacagcccctgtcttttctgttcaatctcagggtaaccttctcccttgtcatctcagcctgagccctggaggctgggcctgcccactccagctccatcccttatttattccttccagcagggccctcttccctaggttcgggccagcaggaggtgccggctggagtctccaccatagactcagtggcctggcctccccagaccccagagccaagaacactaagcactcgccggcccttcggcaccctcgccctccctcccgactcaacccggccgttgcttctgtatatagagaaataagttattggccgcgcgcctcccttcagtccacggtactacccgggcctcccctcgtccctcttctagtggtaccgcccaggccttaatcacccccattccgtgcggtggtatctcccaggctctacattctcgggagcggcgcctcccaagggggtcctgggaccttctcgcgctcctcctggcctctgagggatgcgtcctacccgcgccatcgccccgtggcccaggacggggacctccccttagtccgtcctcccaccgccgggccctgccccgcatcccggccttatgcactgcccctcccacccggccccgcccaggcacggccgaccccgccccgggcaccgcccaccgagccatcctgcctcgcctccccccacgcctgcagcttctcgcgaggggcggcgacggtcccctggtggcaggaggggctccccctgttgcgggtgaggcggctgctctctattttcagatgttgctgtagaaataaagacggtttaaatctg

SEQ ID NO: 239 - DNA, 2406 bp, Homo sapiens
aagcgaccccaacagccacctgctggaggcctcaggggatgcggcgctgtatgcggggctcgtggtggccatcttcgtggtcgtggcaatcctcatggcggtgggggtggtggtgtaccgccgcaactgccgtgacttcgacacagacatcactgactcatctgctgccctgactggtggtttccaccccgtcaactttaagacggcaaggcccagcaacccgcagctcctacacccctctgtgcctcctgacctgacagccagcgccggcatctaccgcggacccgtgtatgccctgcaggactccaccgacaaaatccccatgaccaactctcctctgctggaccccttacccagccttaaggtcgaggtctacagctccagcaccacgggctctgggccaggcctggcagatggggctgacctgctgggggtcttgccgcctggcacataccctagcgatttcgcccgggacacccacttcctgcacctgcgcagcgccagcctcggttcccagcagctcttgggcctgccccgagacccagggagcagcgtcagcggcacctttggctgcctgggtgggaggctcagcatccccggcacaggggtcagcttgctggtgcccaatggagccattccccagggcaagttctacgagatgtatctactcatcaacaaggcagaaagtaccctcccgctttcagaagggacccagacagtattgagcccctcggtgacctgtggacccacaggcctcctgctgtgccgccccgtcatcctcaccatgccccactgtgccgaagtcagtgcccgtgactggatctttcagctcaagacccaggcccaccagggccactgggaggaggtggtgaccctggatgaggagaccctgaacacaccctgctactgccagctggagcccagggcctgtcacatcctgctggaccagctgggcacctacgtgttcacgggcgagtcctattcccgctcagcagtcaagcggctccagctggccgtcttcgcccccgccctctgcacctccctggagtacagcctccgggtctactgcctggaggacacgcctgtagcactgaaggaggtgctggagctggagcggactctgggcggatacttggtggaggagccgaaaccgctaatgttcaaggacagttaccacaacctgcgcctctccctccatgacctcccccatgcccattggaggagcaagctgctggccaaataccaggagatccccttctatcacatttggagtggcagccagaaggccctccactgcactttcaccctggagaggcacagcttggcctccacagagctcacctgcaagatctgcgtgcggcaagtggaaggggagggccagatattccagctgcataccactctggcagagacacctgctggctccctggacactctctgctctgcccctggcagcactgtcaccacccagctgggaccttatgccttcaagatcccactgtccatccgccagaagatatgcaacagcctagatgcccccaactcacggggcaatgactggcggatgttagcacagaagctctctatggaccggtacctgaattactttgccaccaaagcgagccccacgggtgtgatcctggacctctgggaagctctgcagcaggacgatggggacctcaacagcctggcgagtgccttggaggagatgggcaagagtgagatgctggtggctgtggccaccgacggggactgctgagcctcctgggacagcgggctggcagggactggcaggaggcaggtgcagggaggcctggggcagcctcctgatggggatgtttggcctctgcttcctcccagttcacagccagagttgcctctcctcctcctcttccccaacccccagaccatgaccagccttagaaaatccatgtactctgttgttagagggcccagagttccttctccacccccgctctctctctcttggcctgagatctctgtgcaggaaccaagatggggctgaagcctctggaggcagttggttgggggcgggcaggcaggaggccctccctccacccccccaccctcagcccggcaacttctgggttccatgggttttagttccgttctcgttttcttcctccgttattgatttctcctttctccctaagcccccttctgcttccacgcccttttcctctttgaagagtcaagtacaattcagacaaactgctttctcctgtccaaaagcaaaaaggcaaaggaaagaaagaaagcttcagaccgctagtaaggctcaaagaagaagaaaaacaccaaaaccacaagggaaaagaaaaacccagtttcttaggaaacgcaaacgatttattatccagattatttggataagtcctttttaag

SEQ ID NO: 240 - DNA, 1884 bp, Homo sapiens
atgctcagcgcgctgcccggctggggacccgcgcacctgcagcgcccgctgctcggccctgcatcctgcctgggcatcctgcgcccggccatgacggcgcactcattcgccctcccggtcatcatcttcaccacgttctggggcctcgtcggcatcgccgggccctggttcgtgccgaagggacccaaccgcggagtgatcatcaccatgctggtcgccaccgccgtctgctgttacctcttgttcagccccaactcggggatcctgcagatctaccgaacatcaaatgaaaccaagaccaagcccagaagtgccatgccagccccatgtgcctgccggagtgtggatggctccctgggcccttcttcaccctgggagcgcgggccctgccatctgctgggttggccgcatccaagctggctcatcgccatcctggcgcagctgaaccccctgttcgggccccagctgaagaatgagaccatctggtacgtgcgcttcctgtgggagtgacccgccgcccccgacccaggtgcccagctctcggaatgactgtggctccactgtccctgacaaccccttcgtccggaccctcccccacacaactatgtctggtcaccagctccctcctgctggcacccagagacccggacccgcagggcctgcctggttcctggaagtcttcccagtcttcccagccagcccgggccctggggagccctgggcacagcagcggccgaggggatgtcctgctccaatacccgcactgctctggagtttgccctctttcccaaggagatgctgctggggagctggtatgggtggggtctttccctttacagacggggcagatgccaggactcagcccatcctgaggaggacacgtgtcctcatggagagggtgctccggcccaggcgggggagtcagtgcccagtcagcagctctgccaccatcctgctgggaactgggggggcctctattgggttataggcaaggccttttctctggcatggaattgttaattttctgacacgtctagatgtgaaatttctgaaaatgttgaagcagagaaacattcacacacaaaaagcaacatagtcatgtgggtccagatggcctcagtcctagatgttggcaccctttgctgtgtctcctcagagtatcctgttccgcctcctgccacctggacctccctcagtggatgtcttccctcccccgaccccagcctgtcagtccgagcacagtgcaggtttggctctgacttgggcttttggctgcagtgggggtggatttcagagcctctcatggcagcatctaagtgaccagagctgggatgagagaggggaaggggcaatgtgagtggcgctatgggacgggccagccctgctcctgagccagccccgccctctgccccctggccctgggctctgtgctagggatggtgaagaatgggggcgtgccagcctggcaggagtgggaagcaacacgcaggggtcccggacctctccagccttgccctcacgcttacccgagctcccagtgtggttagcacagagctcacccaccttgcctggctcccagctggggcctgtcctcactggtgctccaggggaagaaacgacagcctcacttctgtatggactgctgatgtggcctgccatcctgttcagcgggcattgtctttggagcagcaggagaataggatgcctctcactcacatgccagttcctggctggccagctgctcagggctcaggctggggcctcccattgacatcctccccctacactccctctctgagcctccgtcgcccctcctgttgggtaagggtgttgagtgtgacttgtgctgaaaacctggttcatatataataaataatggtgatg

SEQ ID NO: 241 - DNA, 2650 bp, Homo sapiens
aagatggcggcggcggcggcagctggtgcggcctccgggctgccgggtccagtggcacaaggattaaaggaagcgttagtggatacgctcaccgggatcctatccccagtacaggaggtgcgggcggctgctgaagaacagattaaggtgctggaggtgacggaggaatttggtgttcacttggcagaactgactgtagatccccagggggcactggcaatccgtcagctggcatcagtcatcttgaaacaatatgtggagactcactggtgtgcccaatcagagaaatttaggcctcctgaaactacagaaagggcaaaaattgttatccgggagctattgcctaatgggttgagagaatcgataagcaaagtgcgctccagtgtggcctatgcagtgtcagccattgcccactgggactggcctgaagcttggccccaactcttcaacctgctcatggagatgttggtgagcggagacttaaatgccgtccatggagccatgcgtgtgctgacagaattcactcgtgaagtaacagacacacagatgccacttgttgctcctgtcattctcccagagatgtataagatcttcaccatggctgaggtgtatggtattcgaacccgttcccgagccgtggagatttttaccacttgtgcccatatgatctgtaacatggaggagctggaaaagggtgcagccaaagtcctgatctttcccgtggtacagcagttcacagaggcctttgttcaggccctccagataccagatggccccacatctgacagtgggtttaagatggaggtcctaaaggcagtgacagccctagtttgcctcaaatatttgaggcaaaaaaaaaaaaaaaaagtgtctccaggaggctgtccagcctcgtggctccatttcaacatctccccccaggcgatgttctcccccaagacgaccagaaaattgtttattggggaatgctgtggtttgcattttcatattcttcgcttggcagtgtgtattcttttcacaagtttgcctagtgtcttggtttacacaatatgacaactgtaactgtactttagctattgtttgcctgcacatacatgttgtaatatgcacagtgattacaacctttaaagcaagaggaggcgagttaatttggatgagtgtgattttgctgattgaatgtgagttttcaaataggagtctttttctgcaatttgtttgcattttttagaagtgcaaacagtaagtaaataaaagccttcggtaataatcatgacaatacaagaggctgagctaggctacaggggaaaactattgtgttgtaaagttgcatcgctattttatattaaaatgtaatgatcagcatcatgaacaatgagctcttagtgttttatttatctgaaaaaatgtaagtaaaagcagtgttagtgagaggtgcaaagaattattctaacagacacctgaaagtatctgtaagcaatactagtaggtaagatttcactgtgtgtacacatacacatttgagattgtatgagaacatataatccatatgatatgttgtacattttatggaaatgtaatagaatctcacacattattttatagaaatagagtacagaagcatcacaagtattaaagttggttttagcaaggattaggattactacaattatttttactataataattatttttcttctatggaactcagaatcctggctacatttgaggacaggaatatgttgagcctgattttcctggtgtgtgtaaaatatttcctaggaataaattaggcactttttagaagcaatgttaaatcattcaggttttattttctgccctgaagcagaaatttaaaaaatgatattgggacctggaaggtttaatatagttcacagtgcctgaattacacctgctccgaaaactagctttgtatttcttatgactttgcataagaactgttcatctttggatcttgagcaccttacagataaaactttttatggcatctctttcatggacagtgattgatcttttcacaatgtatgtagcctctagaattttgtacatatgtttgctctttttttgtacagactatttagttgttgagaaaacaggggcgtttcctaatttggtctttatcctgcgacaacactttcagcagactagcctctccttatctcacagatcacaagcacccctagatagtgtgattctgtcagatagcatttatgcaaaaatctatgaagttaaaagatcgtagaagccaaatgaaatgtacatatctactgactgatgacaagggaatttcattaggaagaaggtaaagaaacatcgttgagtagcctaccttgatttctgtcaagttcataaccagcttcatattttaaaggcttcaggtttgaaattaagtcaactgcatgcagctttgctgataaatgaataattctctttgatgccatttatgagaaaagacttcaatatctgttgcctgtcatatttaagaaaaattactgtttctactctctgtatctgattttaaaagaaaaaactattcatacctggcttccaggtaattgactttgaattcttacaagcaaaggtcattgtgtttttcttgaatagacatctaataaattttgcttggaagtat

SEQ ID NO: 242 - DNA, 2491 bp, Homo sapiens
caaatcaaatactgggcccccttcagctatttaaaaatgattagtgtggctggcagccttacaagacttgggggacaggcttgctggggagaacattctgaagcagtgggaatttttacagttcaaggaagtaatcctgttaggcaagatcaggaaataccgtagtaactgaggtagagctcaaggcaatgccatttttgtgattttctaggaacagtgggtcttcccctcctctccccatagtgaggtctctctctgcccttggtctggagagcacatggcatttaaaggtcaacggccctacccagtggcataggaatcctctccatgaggcacattgtcagccctttgccaaaacactctggcttcccaattctcctccctttttgcacccctctgctggacaccaggctttatgctacttccataaatgggaaaactctgtcttcaacaataaggaggaaaatgtcctccaaaaccaaattttagtctcaatactgtcccatcagcaggaaaatagccatttggttcctatgttttttttaaggcacctattctgcttgtaattaaaatagtacttaaatagtaagggtaatttaagtccggaagttaactggaaccattctctaagggtactttagcacgagtcataatagcaggatatagagctcaaaccagcacacttcctccattatggagggaaatacaacagttgcctaaatgcaactgttacatagtctctcccaagatccatttttcagggaagccacacaggtcacacaagtcttggaagtcaaaaggaaatcataagtgcaggactagagtcacatgggtaagcatgactaaccccaatcacttagttcctctggttccatggctgggggtcacacctgcaaccatgggaggcatgtttaacaagatgctgggacccaggaaccaaggagggaaaacagtaggggtggcgccctcactgtcttccccttcccctcctctggagtgcgttctgaagcactgggactcctttgactctgagatttggaagaaaaaacagctcattttcttttgcacaagagcatggccttcttactagacctttgcaagcattgcacaatggactcagctctttcagcagtcatatcagacaggcccaaagggaatgattccccaaaactagagaaacaaactcccaggaacccctcaaatgaaacttccagatgccctggcccttcctccctccctttcacattgtcagcttctccaattctaccacccaaacccccagacttttctatggtatttttccttccttcattcatgatttaaaatggctcctatctcttcttctataatgttcctccaaactgggagaagttaatttcctcaaaccttaaaatgcttggcttagggttgagctcggggaacagaacccagaagcctgacatgctgtcaaaagggtaaaaatttttatttttatttttatttatttatttttttttgagacagggtctcgctctgttgtccaggctggagtgcagtggtgcaatctcgactcactgcggcctctgcctccctggttcgggtgattctcctgcctcggcctcctgagtagctgggactacgggcacgtgccaccacacccagcttgctccatcaacactgaatattagtgattgagttgttgccactactggcactcagaaaattatccagctgtggtggtgtgcacctgtggtcccagctactccgggggctgaagtaggaggatctcttgagctcaggaggaggtcaaggctgcagtgagccaagaccatgccactgcactacagcctgggtgacagagcaagaccctgtcccccaccccccccccccaaaaaaaaacaaacaacaacaacaaagaaatatattgaaataactggtatcttcaatacaatgttgaataagagtggacatcattggttcccaatcttagggcaaaactttctgatttcatcattaagtatattagctgtaggtgttttgtgtatgccctttaaaaattattttattttttgtagagaggggtcttgctgtgttgcccacactggtcttgaactcctgggctcgggcgatccgcccatcttgtcctcccagggtctgggattataggcatgagctactgctcctggcctatggatgccctttatcagtttcaggaattcccttctattcctaattggctgagaggtttattttcctttcatgaataggtattaaattttgtcaaatgctttttctgcatctattgagatggtgatatgggttttgtcttatagcctgttagtatagtaaattatattgattgattttaaaatattaagccaaccttgtattcctgggatgaaactaacttggtcatggtgcattattgtttgtatttactactgtattcattttgctaaattttaaaaggatttttgaaaaaaataaagaggattttgtgtctagatccatg

SEQ ID NO: 243 - DNA, 3282 bp, Homo sapiens
agctaggttgacatggtacaaagccacattaccacgctaagtgtggctttgatttttagaaaccgcctcatgctaagtctagggaatacagtggttgaatggggtgagcgctgacctttagctattctggaggaacatgtcactttcacttattttctttcatgttttcccacccagtgctatggactctgatcgcccaaccagagcaaacccagaaggacaactctccaagcctttcaatcactcccactaacccgtattgtggacacactattgtgaggcctactaaggatgtactgctgatgaccttttgaaggccagtggacctgctctgcagacccaggctcctctcccatggagcatcccaagtctgtccttatgggaagaagcaggagccctgtctggctgtaccccaagctgctttctctggaccaatgctgtcagcgatagagcaaacaagccaaacagcagcttgaaaaatgctttctacttggacataccctcttgctacagggaacccttccaccatcatgtgaagaagcctggtctagcctgctggaggatgagagatcacatggaatgaggccacaatcgttccagccaaagccccagtaatagaattaagatcatccaagaccatggcatcccgcctgagaagttcagatgagaagggccacctgaacaaccaacagaatcttaaaaagtaaaaaatgagtgttgccactatgcatctattagaatggcagaaatcgaagacactgacaacaacaaatgctggtgaggatgtggagcaacaggaactctcactcactgaagatggaaatgcaaaatagtgcagctactttggaaaacagctactttggctgtttcttacaacactaaatatgctattattgtatgatccagaagttttgctccttagcacttacccaaaaaagttgaaaacttatgtacacacaaaaacctgcacatggatattcacagcagtttttgatatggtttggctctgtgtccccacagaaatctcatcttgtatttgtataaatttatggagtacaagagtaattttgttagcatgcatagacatgcatagactgcatagctcccataattcccacatgttgtgggagggaccaggtgggaggtgattgaatcataggggcaggtctttcctgtcttgttcttgtgatagtgagtgggtctcacaagatctgatggttttaaataacaggaatttatctgcacaagctcttttattttgcctgctgccatccacataagatgtgacttgctcctccttgccttctgccatgattgtgaggcctccccagccatgtggaactgtaaatccaattaaatctcttttgtaaattgcccagtcttggatatgtctttatcagcagagtaaatgtggactaatacagtaaattggtaccagtagagtgggatgttgctgaaaatatcatcaaaaatgtggaagtaactttggaactgggtaacaggcagaggatggaacagtttggagggctcagaagaagacagaaaaatgtgggaaagtttggaacttcctagagacctgttgaatggctttgacaaaaatgctgatggtgatatgaatgaacaataaggtgaatgaacaataaggaccaggctgaggtggtctcagagggagatgaggaacttgttgggaaatggagaaaagatgactcttgttatgctttagaaaagagactggcagcattttgcccctgccctagagacttgtggaactttaaacttgagagagatgatttagggtatctggcggaggaaatttctaagcagtaatgcattcgtgaggtgacttgggtgctgttaaaggcactcagtttcaaaagggaaacagaacataaaagtttgggaaatttgcagtctggcaatgcaatagaaaataaaatcccattttctgaagagaaattcaagccagctgcagaaatttacctaataacgaggagccaaatgttaatccccaagacaatggagagaatgtctccagggcatgtcagaggtcttcacagcagcctcttccatcaaaggcccagaggcctagggggaaaaaatggtttccaaaggcccagggttcccattctgtgtgcagcctagggacttggtgccctacctctcagccgctccagccatggcttcagagggtgcaagccccaagccttggcagcttccacatggtgttgaacctgggagtgcacagaagtcaaggattgaggtttgggaacctccacctaggtttcagaggatgtatggaaatgcctggatgtccagtcaggagtctgctgcagagtggggcacccatgggaacccctgctaggccagtgtggaagggaaatgtggggcccccacacagagtccccactggggcactgcctattggaactgtgagaagaaggccaccatcctccagattccagaatggtagatccaccaacaacttgcaccgtgcacctggaaaagctgctgacactcaacgccagcccatgaaagcaaccacgagggaggctgtaccctgtggtacaggagcaaagctacccaaaaccatgggaacccacctcatacatcagcatggcctagatgtgagagatggagtcaaaggagatcattttggaactttaagatttgactgccttgctggatttcggacttgcatgggacctgtaacccctttgttttggccaatttctcccatttggaatgactgtatttacccaatggctgtacccccactgtatctaggaaataactaacttgcttttgattttacagactcacaggtgaaagggacttgccttgtctcacagaagatgttggactgtggacttttgagttaatgacgaaatgagttgagactttgggggactgttgggaaggcatgactggttttgaaatgtgaagatatgagactgggaggggccaggggtggaatgatatggtttggctctgtgtccctacccaaatctcatcttgtagcgcccataattctcacatgtgggagggacctggtaggaaatgactgaatcatggggatgggtctttcctatgctgttctcatgatagtgaatgggtctcatgagatctgatgattttaaaaaacgggagtttctctgtacaagctcttttgttttgcctgccaccattcacgtaagatgtgacttgctcctcctgccttccaccatgattgtgaaccctccccagccatgtggaactgtaagtccaattaaacctttcttttgt

SEQ ID NO: 244 - DNA, 3271 bp, Homo sapiens
gtgatgcagggaagttagattgtacgttagagtgtggaggccattgaaattgaagaattttttagtctttttcattgaaatataacattgaagtttgttaaaggatatacaaatataaatttgtagctcaagggattttcacaaaattaaacacaccagcaatgcagagcactccttatgtgttttctcattcattatcttcctcaaatgtttttctgtcagtcaacatatgttttttctgtttctgagtttaatgtaaaaataaccatagaatatgtacttgtttttgtcgtcttctgcataataatgcttgttttatttatctttgttgcatgtagctttagttttgtttttttatttctttaaggtatgtcattatttgaatgtgccacaactaatttctactttatattgtcctttaattttaaaaaattgtttttaataatgctattatgaacattctttttgagatggagtttcactcttgtaacccaccctggagtacaatggtaggctctcggctcactacaacctccgcctcccgggttcaagcgattcttctgtttcagcctcctgagtagctgggtttacaggtgcccaccacgcctgactaatttttgtatttttactagagacaaggtttcaccatgttggccaggctggtctcaaactcctgaacctcaggtgatccacccgcctcggcctcccaaagtgctggaattacaggcgtgaagccaccgcagccggcctattatgaacattcttgtgcatgacttttgtgacacatatacacatttccatttctagtattttggatttttttttttaaattttggcatatgtgcattatacttatcaattagttcagcatccctaatctgaaatgctccaatgagcattttctttaactgtcatgttggctctcaaaaagttaacagatttttggagcatttgagattttggattaggtatgcccacctgtatatctttagcattaacagatacttccacatagttttccaaggtggttgtatttgtttacgtttctaccagcagtatgtgaggctagttcaacttgtcctatggtttcttaacattttgttatacgagttttttttgttttttttttttttttttttgtattttaaccattctagtgtgtgtatagtgttttgtcatggttttgatttgtacttccctaatgatgactgcttttttgtatgtttattagccatttgtatatcctcttgtgaagtgtgcagaatcttttacctatctctaatgtctcttgcttaccagtttgtaagaattctttatatattttagctgtgactcttatcagaaattctatgctttttcactgtcttaatgacgactttgataaactttttatcaaattgctttttaacaaaatccaatttgtccatcattttgtttatgactagtgctttccatgttctatttaagaaatcgttgcttacttcagggctgtgagtgttttctcatatggaggcacatttaaatatgtaaatgacctggaactgattattgtataaggtgtgacatggatgtaattaaagaactttaaacaaaagggtgatagtaatttgataattagatagtagaaaatagaagtcgaaggctgagaaatagtagaaacctgttagtatagtctgattgcttaaaatctgctagcttatgaggaagattaacaaattaatatattcaagtcaaattgatgagatttcattatagactgcctatgggtggagggagaggagatgctgaagaggaacgaatggattttgctttgagaaactgagtctgtacggtgccatcaaataatatggggaaaagaatggactgtgggggcaatagcattaagtttagtagatgctaacatactgagttttatgttcttgtgaagtatcttaaggagaaatacacatctaatactgtactttggatttataaaagataaacacagaattttattttctgtttgtaggtagtgctataaatacaaaaatagaaaatatactactggctacatccatgttttattaacataattttttgtgaattcatctgtagagcctccatctacagcagcaatggggcccggatcttccagacaaaccctggatatatataggtctgcagctcattttaccctttatagggataagaaatcaccatcactctagaacttccagaattgcttattagatttctcatattatttgacaatacttacatggagtttactgtacacataagtcatgcagtaactgtatttttattgagagtattaatcccttggtttcaacattgtttttgaaattagtaactaagtaagtacttgaatatgattggatgggatctcatactcaaaaggctgaaagcatcttaatatgactttctcaaaggaacctaaaacttaaccaagtccaaaagggaatcatttttcattttttaacagaatggcgtgggatggatttatgaattttctaggtaattgtcatttaagtattttgcaaagttcgtagaggtcaccaatactgcaaatatgtatgagatgtaactgtaagatacgcagctaattttttttctctttgtttcttttttagacataccagggtctagagagtctagaagaagtctgtgtatatcattctggagtacctattttccatgaggggtaacttatgcatgacttattaaaatagtttatggtagaatttagaaagttaaacctttctgtctttaaacattgtttgccatgcagtgttattaggcattttacttacattgccattaacatcttcacaatagcctacacaaacacaggggtttgtatgttgtgtgtttatacatgagaaaacagaaacaaggttacagttcttaagtggtcattgtgatataaactgcctgtttttcttcatattctgtatttaaaagtgatgctatttgggctaaatgttttgtttgaaggactgtcctacacattgcagggcatttagaattttgggccctggggcactaagacaacattatcccaagacgacccatacttttccgcatcctgcagttgagagcctctcttctgtattatgctctagtttatagaaatgcagcactgtgtaaaaatcttccactctgtttccacattcttcctgatatactgtacattcatttttagtaacttagacacttgtaaaatgctagagtttgtacacttactggcttattaaaaatcagatttatccct

SEQ ID NO: 245 - DNA, 2358 bp, Homo sapiens
ctgagtgaccaacgcattcctctttctagagggatggccacgcctggctacctccacactgtgggccacagcacacctgtgcaccatctcaattagctgccaactctcttttaaacatcgaaattatttgtcccccaaacgtgtaaatgcatggttttaagaccccttcaagtcaaagtttgcagacaaagctctctgtgcatttgatttgtctggtgtggcagatgagatggcacataggagggacgtccccagggatggacacgtggctttgctctttgctggcgcgtgtagcaaggggtgtgctagggtcccgccgaaaaagaagttgctcctgttgtcgctggcagttcccctcggctgccctggcacctctagctgacgagaaaaagtgctcattcaaagcaaagcaatggagcggctgcactttcacccacagaagtgcagcgttgttttgcagagcagtggttatgccaggcaccactccctggggcctgggaatccgattccagttctctctcacagaactggaaattcaattagcatttgctgagggaggtcgggagaaatggaatgaaaagaccagctctccggggtgccatttctattagcagatgagagagacacccaatggctcagcatccacccgggaccacagaagaggggatgctggtgtgggaggaccctgcggcactctcgtcctaactcctctctcttccttttcagggaggaagagatagtcgctctggatcacccatggctagacgctgaaaacccacctggttccggaatcctgtcctcagcttcttaatataactgccttaaaactttaatcccacttgcccctgttacctaattagagcagatgacccctcccctaatgcctgcggagttgtgcacgtagtagggtcaggccacggcagcctaccggcaatttccggccaacagttaaatgagaacatgaaaacagaaaacggttaaaactgtccctttctgtgtgaagatcacgttccttcccccgcaatgtgcccccagacgcacgtgggtcttcagggggccaggtgcacagacgtccctccacgttcacccccccacccttggactttcttttcgccgtggctgcggcacccttgcgcttttgctggtcactgccatggaggcacacagctgcagagacagagaggacgtgggcggcagagaggactgttgacatccaagcttcctttgtttttttttcctgtccttctctcacctcctaaagtagacttcatttttcctaacaggattagacagtcaaggagtggcttactacatgtgggagcttttggtatgtgacatgcgggctgggcagctgttagagtccaacgtggggcagcacagagagggggccacctccccaggccgtggctgcccacacaccccaattagctgaattcgcgtgtggcagagggaggaaaaggaggcaaacgtgggctgggcaatggcctcacataggaaacagggtcttcctggagatttggtgatggagatgtcaagcaggtggcctctggacgtcaccgttgccctgcatggtggccccagagcagcctctatgaacaacctcgtttccaaaccacagcccacagccggagagtccaggaagacttgcgcactcagagcagaagggtaggagtcctctagacagcctcgcagccgcgccagacgcccatagacactggctgtgaccgggcgtgctggcagcggcagtgcacagtggccagcactaaccctccctgagaagataaccggctcattcacttcctcccagaagacgcgtggtagcgagtaggcacaggcgtgcacctgctcccgaattactcaccgagacacacgggctgagcagacggccccgtggatggagacaaagagctcttctgaccatatccttcttaacacccgctggcatctcctttcgcgcctccctccctaacctactgacccaccttttgattttagcgcacctgtgattgataggccttccaaagagtcccacgctggcatcaccctccccgaggacggagatgaggagtagtcagcgtgatgccaaaacgcgtcttcttaatccaattctaattctgaatgtttcgtgtgggcttaataccatgtctattaatatatagcctcgatgatgagagagttacaaagaacaaaactccagacacaaacctccaaatttttcagcagaagcactctgcgtcgctgagctgaggtcggctctgcgatccatacgtggccgcacccacacagcacgtgctgtgacgatggctgaacggaaagtgtacactgttcctgaatattgaaataaaacaataaactttt

SEQ ID NO: 246 - DNA, 3101 bp, Homo sapiens
cgccatgcagagcactgacctaggcaacaaggagagcggcaagatatggcaccgcaagccgtccccggccacgcgggacggaattatagtgaacattattcacaacacttccgattaccatccaaaagttttgcgatttttgaatgtggcttttgatggcacaggcgactgcttaattgctggggaccaccaaggaaatatttatgtttttgacttacatggaaacagtcaccaaggagctagttagctggatgagaggacatgaatcatcagtattttcgatctctgtgcatgcatcagggaaatatgccatcacaacttcttctgatacagcacaattatgggacttggatacctttcagagaaaaagaaagctgaatattcgccagtctgtgggtatacagaaggttttctttctaccattaagtaataccatcctcagctgttttaaagataattccatttttgcctgggaatgtgacacacttttttgcaaatatcaattgccagctccacctgaaagctctagtatattatacaaagtgtttgctgtaaccagagatggccgaatcctggctgctggaggcaagtcaaatcatcttcatttgtggtgcttggaagctaggcagctctttagaattatccagatgcccactaaagttcgagccattcgccatctggaatttcttcctgatagttttgatgctggttctaatcaggttcttggagtactaagtcaagatggtattatgagatttatcaatatgcagacttgtaaacttctctttgagattgggagcctcgatgaaggaattagctcatcagcaattagcccacatggacggtacattgcatctattatggaaaatggaagtctaaacatatattcagttcaggctttaacacaagaaataaataagccacctccgcctttagtgaaagttattgaagatttgcccaagaataaactgagttccagtgatcttaagatgaaagtaacatcagggagagtacagcagccagcaaaatctagggaaagcaaaatgcaaactagaatattaaaacaagacctgactggtgattttgaaagtaaaaagaatgaattaccagatggattaaacaaaaagcgtttacaaatcttattaaaaggctatggtgaatatccaacaaaatacagaatgttcatttggcgctctctgctacaactgcctgaaaatcatactgcgtttagtaccctcatagataaggggactcatgtggcgtttctcaaccttcagaagaaataccccatcaaaagtaggaagctactcagagtattacagagaaccttatctgcattagctcactggtctgtcatttttagtgacacaccatatcttccactcttggcatttccatttgtaaaattattccagaacaaccaactcatctgttttgaagttattgctactctcataatcaattggtgtcaacactggtttgaatattttcctaatcctcctatcaatattcttagcatgatagaaaatgttttggcatttcatgacaaggaactgctgcaacacttcatagatcatgatataacctcccagctatatgcatggcctcttcttgaaactgtgttctcagaagtgctgacaagagaggagtggctggaattgttcgataatatcttttccaaccatccttccttccttctgatgactgttgtagcctacaacatatgttctagaacgcctctgctcagctgtaatcttaaagatgactttgagtttttttttcaccatcggaataacctggatataaatgttgtgattagacaagtttatcatctcatggagaccacgcctactgacattcatccagacagcatgcttaatgtttttgttgcactgacaaaagggcagtatccagtatttaatcaatatccaaagtttattgtggactatcaaacacaggaacgagaaagaataaggaatgatgaattggattacttaagagagagacagttgaagatatgcaagctaaagtcgaccagcaaagagttgaagatgaagcttggtaccagaaacaggagctgcttcgtaaagctgaagaaacaagaagagaaatgctcttacaagaggaggagaaaatgatacaacaaagacagaggctagctgctgtgaaaagagagctgaaagtaaaggaaatgcacttacaagatgctgcaagaaggcgttttctgaagcttcaacaagatcaacaggaaatggaactaagaagactggatgatgaaattgggagaaaggtatatatgagagatcgagaaattgctgccacagccagagacctagaaatgagacagctggaactcgaatcacaaaagagactttatgagaagaatcttactgaaaatcaagaagctcttgcaaaagaaatgcgagcagatgcagatgcctatagacgaaaagtggatcttgaagaacacatgtttcataagctgatagaagcaggtgaaacccagagccagaaaactcagaagtggaaggaagctgaaggaaaagagttccgtttgagatcagcaaagaaagcttctgctctttcagatgcgtctagaaagtggtttttaaagcaagagataaatgcggctgtagaacatgctgaaaatccatgtcataaagaagaacccaggttccaaaatgaacaggactcaagctgtttgcctagaacctcacaattaaatgactcttctgaaatggatccctcaacacagatttctttaaatagaagagcagtagaatgggacaccacgggacagaatcttattaagaaagtgagaaatcttcgccagagactcactgcccgggctcgtcacagatgtcaaacccctcatcttttggctgcatagaatgcatgtcaccttgagacggtcgagagagagacctattttgcaatcagtgacattgatttttagattatttatttaaaattcctataaagatcagccctttgtacagaaaaatgtgtctataaaaattatgtgttatttaattctgatactttttggcttgtaaatggcttcttgaactttttacaataaaaatgttttagaaactgtt

SEQ ID NO: 247 - DNA, 2146 bp, Homo sapiens
aaatagaaaatttttgaggtaattatgtattcatataaaagtctttggtggatatgctttttcccacaagcacttggttagaatggcccattacctcatttgtttattttttgagacagggtctcttgtcacccaggctggagtacagtggcatgatcatgggttactgtacctccctggcttgggtgattctcccacctcagcctcccttgtagctgcgactacaggcatgtgccaccgtgccctgccaattttttgtagagacaggatttagccgtgttgctcaggctgctcttgaactcccggacttgagcagtctgcttgtctaagccttccaaagtgctgggattacaggtgtgagccactgtgcccagcctgttacctcatttaaaacaaattttgcacatctgaacagcctaaaattgtaatgtgataagtggggtaggagtggggtgggcgtagtgggattttgaatcaatgaaggcccttgttcttgtggcatccttttgcagtgattccctgccaggcaaggcagtaaacctgggattgcctgcccaggactgtaatcacattgatgtcccagcgccatggagtatgtaatgaatgaactgccagcagaactactcactaagaactactccctgtttgtgaggattgtacctgttgagagaagttgcaaaaagaattagtcaaaagaattagtcaaaacttgtcctctgacctaggtctgaaggacatttaacacattgattgttctcttcatccagcctttgagccctatgagttagtgcccttagcctttgagtcccacaggtatggaggagctacctgtggggacctgagccatcactattcctgcttcaagttacactggtgcctctcactagcactgctctgaaaagccagctggaaaaatcaatgcatttgagtacataaattctttggctccaaagaaatgccatagcaatattgcttttaattcagttttgtttagatgttagaattggtatttgttcttgctttttggttgcgatggagttatatactaagttacttatactaaggcattagtagtctcatatctgaggagcaattgtatttttagttcagctaaattaatgcctctttttaaatactaacttgtactacttttgtggctgtgaatggtatcttttattgaactgaggcagcttttaaaagacttgcctgatcatttagagcactcccattgaggttaaattagacttgaatctgtaatgattctcgtaactgttcctggtgtgtgtccagtacaatgttgctgggcagagcagaggggcagaggctcaggtatgtacttcattgacaagtgggcaaggccatcctgggtaccacattggcttaatgatctcttcattgtgaagtccggctacctcgtttgcataagaactacagtaatcaggcaaggcattgtcagaattgggaggaataaaatcagtgagtctggaaggagtgctctgtatacaattgcaaagaacaaaatggtcatctttaaggtacctgattgcatgcacttaaatgcagattattttggagtttgaaaagggactattaatgaaatctttcttttccctcctttctctttttcccttccccgccactgattcagtgagctggagattggatcacaggtataattcaagcttttcatgtagtcatgtagatcactagactccttggtgtactgacgtagcaatttaaaagcagatcatgtgtagtacatctagaagtagatttacaaatattctgaagagttgtaaccttttaaaatactaacagtgacatggttttgtttttaaggtttagcaatatttagcccattatttttgttttattcttaacttgaatgtttgtaaattttatttcttgatgctttcattgtgttatgataacatcaaaataacttgatattctaggttactaataattgttgtgcatgagtgttactacttttggaattgaagactttaaagaattttaaaggcagttgttgactaaacttctttctcttgattcacagccgaaggagtaaaggtgctacaatgatgttagctgcggccactgtggatttttcgcaagaacattaataaactaaaaacttcatgtg

SEQ ID NO: 248 - DNA, 2992 bp, Homo sapiens
accgggatccatgcagccagcaatgatgatgttttccagtaaatactgggcacggagagggttttccctggattcagcagtgcccgaagagcatcagctacttggcagctcaacactaaataaacctaactctggcaaaaatgacgacaaaggcaacaagggaagcagcaaacgtgaagctgctaccgaaagtggcaagacagcagttgttttctccttgaagaatgaagttggtggattggtaaaagcactgaggctctttcaggaaaaacgtgtcaacatggttcatattgaatccaggaaatctcggcgaagaagttctgaggttgaaatctttgtggactgtgagtgtgggaaaacagaattcaatgagctcattcagttgctgaaatttcaaaccactattgtgacgctgaatcctccagagaacatttggacagaggaagaagagctagaggatgtgccctggttccctcggaagatctctgagttagacaaatgctctcacagagttctcatgtatggttctgagcttgatgctgaccacccaggatttaaggacaatgtctatcgacagagaagaaagtattttgtggatgtggccatgggttataaatatggcccaagactgttagctgctattggcgactgggaatttcagctcttttctgtatcaagttctttgagctcaagctccttgcgtatgttgagcgtgcacatattgatggatgttagatccattgttgttgctgttgatatttaatttcatgatagtttttgcagatgaaaatcacttctctagaatatgaagaggactttctgcaaggtgagaaaatagtgggaagccctatcctgtggtgcacaggacaaataaaaacaaataatttctaggagttaaatctttgttctccctgaggctccttaggtgcagtagtttattttcattacgtctcttgtaaaggcagcaccaatattaacaacgcgaacaaaacaaactaatgtttttgtttgctcccatctgaaagttccttaaggcccgtagactcatttacgaaaattcatgtgtgcaaaactcatttgcaaaagcaaataaaatatgtgatcgcaaatgctctttacctgactggcctaggggactagctgaaaatgcgtttatgcctttatgtttactctatggcgtggcttagcagtcgtggggctcctaacctcctctacagatgagtccccgtcaagccacgtatgtcagatgacttgaatgttttgaaattcaggcatcatttagatggttgttaagttgctgtactgatttgtgagtttttgtttgtaaaaaaatattattaaatcattgtgctctgtagccttggaaatgtttttgaagttcattcattacaatgttcagccaaggaaacatctctgtatttagttaagttcggacttttctgtccctttgggtttacatatgctgctttctttcctggtgaaaattttggttacaagtgtgactgagtgatgatgtctagataagggtcaggaaaactgaattgagaaaattagaaaaaagaaacccttatatgtaaattgtacataggaataattggaagctaccagaaagtttgttacaatcctgaatctttgctttttgcatagtaattgaaatatatgaggcaagacaaatacatacctgccagactctctgaggcataactattttttccctaacatttaaatctgtgttttgctttaggctgattgattgatttactcacttaataaatattatttttttgttttgttttgttttgttttgagatagagtatctgtcatccaagctgaggtgcagtggcacgatctcagctcactgcaacctccgcctcctgggttcaagcgattctcctgcctcagtctctctagtagctggaattataggcacacgccaccatgcccggttaattttagtatttttagtatttttgtatttttagttgatgcagaatatatatatatattctggcaatatttttccagtctcagaggcataagccatcttcttgaatactcattgagtatttggctgtatattgtagacacctggatgcaggtgatactatttcatgaaggtggtaccaactaatatagtactaggtaacactatggttactggctaaaaatgagagtcatcaattactgattgaaatttctacacacctggtgtgacacctcagttgtgagacatgcaacaaatgcttgataagagttaattataaattttgtgatgatgaattttttttttaacttttactttaggtttaggggtacatgtgaaggtttgttacataggtaaacacatgtcatggggttttgttgtacatattatttcatcacccaggtgttaagcctagtacccaatagtttactttcctgctcctcaccctcctctcaccctccaccctccaggagaccccagtgtctgtggtttccttctttgtgttcctaagttcttatcatttagctcccacttacaagtgagaacatgcagtatttagttttctgttccttcattagtttgctaaggataatagcctccagctccatccatgttgctgcaaaagacattatctcatttttttatggctgcatagtattccatcgtgtatatgtaccacatttttctcatgcaatctgtcactgatggacatgtaggttgattctgtgtctttgctattgtaaatagtgctgcagtgaacttccgcatgcatgtgtcttgatggtagaatgatttatattcctctgggtatatactcagtaacgggattgctaggttgaatggtaattctgcttttagctctttgatgaatggccatactgctttccacaatggttgaactaatttacactcccaccaacagtgtataagtgtttccttttctctgcaaccttgccagcatctgttatttttttgacttgtaaataataaacattctgactggtgtg

SEQ ID NO: 249 - DNA, 2095 bp, Homo sapiens
agctagcagctggcggacgcgacccggaggcggtgggggtgcggctgagccatgcccggtggcgcggcctgagcccctccacctgctgcaatcatgaaggacagcggggactccaaggaccagcaactcatggtggcgcttcgggtccggcccatcagcgtggcagagctggaggaaggagctaccctcatcgcccataaagtggatgagcagatggtggttctcatggacccaatggaggatcccgacgacatcctgcgggcgcatcgctcccgggagaagtcctacctgttcgacgtggcctttgacttcaccgccacccaggagatggtgtatcaggccaccaccaagagcctcatcgagggcgtcatctcaggctacaatgccactgtctttgcctatggccccacaggctgtgggaaaacctacaccatgctgggcacagaccaggagcctggcatctatgttcagaccctcaacgacctcttccgtgccatcgaggagaccagcaatgacatggagtatgaggtctccatgtcctacctggagatctacaatgagatgatccgggacctgctgaacccctccctgggctacctggagctgcgggaggactctaagggggtgatccaggtggccggcatcaccgaagtctccaccatcaatgccaaggagatcatgcagctgctgatgaaggggaaccggcagaggacccaggagcccacggccgccaaccagacgtcctcccgctcccacgcggtactgcaggtgaccgtgcgccagcgcagccgggtcaagaacatcttgcaggaggtgcggcagggccgcctgttcatgatcgacctggctggctcagagcgcgcctcgcagacacagaatcgtgggcagcgtatgaaggagggggcccacatcaaccgctcactgctggcactgggcaactgcatcaacgccctgagcgacaagggtagcaacaagtacatcaactatcgcgacagcaagctcacccggctcctgaaggactctctgggaggaaacagccgcacagtgatgatcgctcacatcagtcctgcgagcagtgccttcgaggagtcccggaacaccctgacctacgccggccgggccaagaacattaagactagggtgaagcagaacctcctgaacgtctcctaccacatcgcccagtacaccagcatcatcgctgacctgcggggcgagatccagcgactcaagcgcaagattgatgagcagactgggcggggccaggcccggggccggcaggatcggggtgacatccgccacatccaagctgaggtccagctgcacagcgggcagggtgagaaggctggcatgggacagcttcgggagcagctcgccagcgccttccaggagcagatggatgtgcggaggcgcctgctggagctggagaaccgcgccatggaggtccagattgacacctcccgacacctgctcaccatcgccggctggaagcacgagaagtcccgctgggccctcaaatggcgggaggagcagcgaaaggagtgctacgctaaggacgacagcgagaaggactcagacacaggtgatgaccaaccagacatcctggagccacccgaggtggccgcagcccgggagagcattgcagccctggtggacgagcagaagcaactgcgcaagcagaaggtgtccagggtttggggggacaaggagagtgggtttaggggacagggtgagcaggtttgagaggcaaggcggaggggccagggtgggggtagccgtgagacttgggaactcaggccacaaatcctgtgtgactttgctaagctctttaacttctctatgcgtcacattccccacctgtaaaatgggagcagtccatggtgcagccctcatggggttgctgggaagattacataaatgcctggcacataccaaggactcaaaaaatggtaactaatgttataattagggtttttcaggctgggcacagtgactcacacctgtaatctcagcacgttgggaagttgaggtaggcagatcacttgaggccaggagttcgagaccagcctggccaacatggcgaaatcccgtctttacc

SEQ ID NO: 250 - DNA, 2730 bp, Homo sapiens
tgatgtatttgtaaggggcatttttaaagctgtactttaaaaaataataattcttacattcgtttgaaggtttttttatgtgtgtttttgagacggaggcttgctctatcgcccaggctggagtgcagtggcgcgctcttggctcactgcaacctccgcatctggggttcaagcgattctcctgcctcagcctcctgagtagctgggactacgggtgcccaccaccacgcccagctaattttttgtatttttttttttttttttttttgaggcagagtctctgtcgcctaggctggagtgcggtggcgctgtcttggctcgctgcaggctccgcctcctgggttcatgccgttctcctgcctcagcctcccgagtagctgggactgcgggcacccgccaccatgcctggctaattttttgtctttttagtagagacggggtttcaccgtgtcagccaggatggtctcgatcttatgacctcatgatccacccgcctcagcctcccaaagtgctgggattacaggcgtgagccaccacgcccagcaattttttgtatttttagtacagacagggtttcaccatgttagctaggatggtcttgatctcctgacctcttgatctgcccacctcagcctcccaaagtgctgggattacgggcgtgagccagggggccggcatggtgaaaccctatctctactaaagatacaaaattagccgggaatggtggtgcgcgcctgtggtcccagctactcgggaggctgaggcgtgagaatcgcttgggcctgggaggcggaggttgcagtgagctgagatggcgccactgcactccagcctggggggcagtgagactccatctcaaaaaaaaaaaaaaaaaaagaatagaataacccttgtttaggtgttaacaaaatccaggccagacaaatctaaactttaatctcatacccagttcctagatgagtcccttctccagctcaggttccgcctaagcctcagggttccttacttggtgggcaccacctgctcccttccccacctttgtcctctttttcctctgctggctcctccggggttgggtgtgttcagaggcagagacaggctaaaggtctttggcttttaggttctgttggtgggtgagttccagatatagctttctcttgtaggatatttcatttatttatctattaaaaatatttatttagaacacaccattcatgtgccagaccctgtccaggcactggggatagggtgataaatgagatcaacaaaaatacctgcccacattaagctcctgttctagggaagacagaaagaaaatacacgtgtccttagtatattagaagattccaagtactgtagagaaaaataaagcaggctggactcggtggctcatgcttgtagtcccagcactttgggaggctgaggtgggaggattacttgagctcaggaatttgagaccagcctgggcaacctggcagatcctgtctctcccaaaaaaaaaaaaaaaaatttagctgggtatggtggcgtgcatctgtagtcccagccactggggaggctgaggagggagaattgcttcagcctaggaggtgaaggttgcagtaaaccgagatcgtgccattgcactccagcctgggtgacagagccagaccctgtctcaaataaaacaaaaggaaagaaagaaaatgaaaaaaagaaagagatggggcaagcaggggagagggctggggacacaggggagggtgctggggatgcaggggagggtgctggggacacaggagggtgctggggatgcgggggagggtgctggggacacgggaggggctggggacatgggaggggctagggatgcaagctttcctgagttcccacagttctctgcccctctcctgtctcacggggtgtgggccacctgtggcttgcggttgtttcgcgccaagctaatatcttgttcttcccaacagagaggcccgttgaggcttctctgtcctccatggggaacagcattggcctaaacctgcagacaccattgcaaagggaagtcagctcaggcaaacccgctggtgaagaagaattccagtgtggggacacagagactgacatttcttgccatgggtgatttaattttgggcctcagtttttcattcccccctaagagtatgacacagccgcatccttgccagggccggagggagggtggatggacttataggtgttgcttgtggctgggtgacttgcttctgccaacgagattttcacagacacagcacaagcagaagcctggaatgtgtggcactgccaggcctgccctcttaggctcttgattttccccacgagatatgcgtgccccagggaacggcggctctggctgtggaatgagaggcgtgtggagcaggcatggttcccaccctcagcctagagtcaaggccagactagatcagcctaagcccagccacgccacgggtgcagcagtgaagagcaaatgccaactgtccatgacagtgactttcaaaggggcgtgtcatgtgcctcatcccagcaacagggaaggcatttctctatcagtcagttggtaaatgattattgacagtgtgtgggaaggtggagttatttgagtagatttggcctctgttctcatggagcttcctttctagaggggaaggcagatgatggatgaataaatataaatgattctaataggttggtgcagcagtcattaaaagtaatggc

SEQ ID NO: 251 - DNA, 2249 bp, Homo sapiens
gaggcttgcagtcgttgctggccagcacttgtgtagaaagatcgctcttcacaccagatttcacttttgatccttccagctccagggtctcgggcttcagctttgtgccgaggcaccaacactgctgcggtcctctctccgactgatcgctgatctcaccgttcccgctcctgtctcctggaaccatgtctctggtaagccagaatgcacgccactgtagcgcagagatcaccgcagattacggcgacggcagaggtgaaatacaagctactaacgcctccgggtcccccacctccatgctagtcgttgatgccccccagtgccctcaggcgccaatcaactctcagtgtgtcaacacttcccaggccgttcaggacccgaatgacctggaggtcctgatcgacgagcagtccagacgtttgggggcgctcagggtccatgaccctctagaagacaggtcgattgctttggtgaatttcatgagaatgaaaagccagacggaggggtctatccagcagtccgagatgctggagtttctcagagagtactcagatcagttccctgagatcctcagacgagcctcagctcacctggaccaggtctttgggttgaacctgagagttattgatcctcaggctgacacctacaatttagtcagcaaacggggtttccagatcaccgataggatagcggagtccctggacatgccaaaagcaagtctcctggccctagtcctaggccacatcctcttgaatgggaaccgagcaagagaggcctccatttgggacttgctgctaaaagttgatatgtgggataagcctcagaggatcaacaacctctttgggaacacaaggaacctcctcactactgactttgtgtgcatgcgattcttggagtactggccggtgtatggcactaatccccttgagtttgagttcttgtggggctctagagcccacagggaaatcacaaagatggaagccctgaagtttgtgtcagatgcccatgatgaagaaccctggagctggccagaagaatataataaggccctggaaggtgacaaaaccaaagaaagaagcctgactgctggcttagagttctggtcggaggacactatgaatgataaggcaaatgatttggtccagttggctattagtgtcactgaggagatgctgcctatacatcaggatgagctattggctcacactggcaaagaatttgaggatgtgttcccaaatatcctcaatagagctactctaattcttgatatgttctatgggttgtctctgattgaggttgataccagtgagcacatctacctccttgtccagcaaccagaatcagaggaagagcaagtgatgctagagagcctggggagacccactcaagaatatgtaatgccaatcctaggtttgatcttcctgatgggcaaccgtgtcaaagaggccaatgtctggaacttgcttcgaagatttagtgtggatgtagggagaaagcattccatcacccgtaagcttatgagacagcgctatctggaatgcaggccactgtcctactctaatccagttgaatatgagcttctatggggtcctcgagctcaccatgaaaccatcaaaatgaaagtcttggagtacatggccaggctctacagaaagcgaccacagaactggccagaacaatatagggaggctgtggaagatgaggaggccagagccaaatctgaggcaactatcatgtttttccttgaccccacgtgaagtctagggaatatgtatcacttcagctgagtggcataagttaaagatgccttggtaaaataggcattggggctctaaattagaatccaggtagggcttgtgtgggaagtacaaattgtgcttgctgtctgtgttccaattctagtagtatttccttccttttaatatactcttggattaggttaatgaccaatatttataaatggaatttttcatttgccatcccggtcttgtttcagcataaaagttcagacagctctgtaaaatgtattgataatatttacatctttgaaataattagtaaaatggtctggtacaggagttaaataacaatgacacacacacaacaaaacaaacacaaaaccactgatctgtgattgctctccctttgtgtctactgccgtatacatatatacaactatatatacacaaatatatatatacacaaaactgtcatttacctgtatttgcaataaaagcataatgaattag

SEQ ID NO: 252 - DNA, 2176 bp, Homo sapiens
agagccctctcgcggccgcggcggcagcagcagcgccagccccagcaacactgaggccgccgccgccgcctggcgctcccgccgcccggcccgacatgagtgaggcggttcgggtaccctcgcccgccactccgctggtggtggcggcggccgcgcctgaggagaggaaagggaaggagtcagagcgcgagaagctgccgcccatcgtatcggcgggcgccggcgcgaccgcgggtttggacagaggagccaaaggccaaatttccactttcagcagttttatttcagctgttagcccgaagaaagaagctgctgaaaacagaagttcacctgcacatcttgttttccctaacatcaagaatgtgagagaaccaccaccaatttgccttgatgttagacaaaaacagcgtacatctatggatgcatcatcatccgaaatgaaggccccagtccttccagaacctattcttcctatccagcccaaaactgtgaaagactttcaggaagatgtagaaaaagttaagtcatcaggagattggaaagcagtacatgatttttatctaacaacgtttgattctttcccagaattaaatgctgcatttaagaaagatgccactgcctcatttaacaccattgaagactctgggattaatgctaaatttgtgaatgctgtgtatgataccttacttaatactgtaagtattatgacatgcaagtaatattattctgtgtctcttctgtatatcaaaagcagccatacaaatattgtaaaaatcaccttataattaccttagaaactctgatacaattttatagtaaatgtagctggaattctcataaagttagattattttattcttttattttttaattatgaattaagcagcaaatacttttatatccaatccttttttagaaagacttgctaaaatcatgctttacttactcagcaaaaggaggtaagttatttaattatattggaattacactgaatctgtagatcagtggttcttaaacattagcctgtatcagagtcacaagaagggcttgttaaaatacagaatttcagattcagtaggtcttgggtgaagcccaagaattttcatttgtaacaagttcccaggatatgttgatttatgagttcatttatgatgtgacacatactataaaaattatgtcaccattcaaaaaatccagatgcatatttgaaggactaagtgggaatgataaagacagaatgtaaacaaagtctccagaagtttagctatgaagtgaaagacatgttaagaatgaccacattttgagaaccatactgctatagatcaatttgtgaaaaattgacatcttttcaatccataagcatactgtatccttttaggtacctaggtcttctttaatttctcttggtaatgttttgtagttttctggatagaggtgttacacatttctcattacatgtatttctaggtacttcattttttttatcctattataattttattttccaattgtgactaatatatggaaatactttcatatatttatctttatctaaatacagttgacccttgaacaatgcgagggttaggggcgctaaccccctatgcagtaaaaaaaaaaaatctgtgtataacttttaactccccagaagcttaactactaataacctattgttgaccagaagtcttactgataacataaacagtcaattaacgtatattttatgttatatgtattctatactatattgttacaataaagtaagctaaggaaaaggcaatgttattaagaaaaaataaggaagataaaatatatttactatatattaagtggaagtggactatcataaaggtcttcatccttattgagtaggctgaggaagaggaggggttggtcttgctgtctcaggtggcagaggtgaaagaaaataatgtatataagcagacttgcacaattcaagcctgtattcaagagtcaactgtactttgctatattcatccattaattctaatagtacatcagtaaattaacttggattttctgtgtacacaatcttgtcatttgtgaaaaaggagagttttatctccttctaatcctgtatcttatatggatatatgtatgtgtttgcattgactgggacctctttcacaattgtgaataaaagaagtaatagcag

SEQ ID NO: 253 - DNA, 2672 bp, Homo sapiens
tgtctctgcctctggctattcaagtacctctctatgatctgcggctggctgggtggcataaaccagttttgtatgtttctggacaggttgcatgagttggggtgccgtcagtgtagctgtttttggtttctgagcttaaatatcgaataatagctcctcaacctaatgaccagttaggctttggaagccttttgtaaattgagatgtctggaagtccaggatgacaccgaacagtgaccactaaccttccctctggctgccgctgttgagagatgaagtccaggtctgttgtcagtgctcgctggggagcctctttatgagcaaaaagtcccatgttttagaattttgtatgaagatactgtcatgagtgtttctagggcagtgcccaggggtgcgtggcacctgcttaaccgtgcttctctcagccacgtgcatagcatttctgtatatttacacactgctgagctgtgtttattttttaactttgttatgttttcgtgctttctcatcaaaccaatccctgagtggccatgaatggaggcacctcccttcatcagaagtgtcagctcaaaccaagaggctcattcttctccgtagctttaagagaaaggccccgtgagtcccatggggtcttcccatttcagtttagaagcactccccgggcagtcaccgttagtccccctttcctcccaggtgagaagaaagtgcttggtgtgccatctgctggacaaaggaagaacagccctttttttgcccctgtccctaagggcagtttctgttttcattttcacttgagccatggcagaagaccagcgggtgtgcagtttgcagatcctacctcacctatgatgcccaattccatcctcactgtgtcccacgttgccctctctgtgttggggactggggagagtctgtgggctatgatactggggtggacaggagttccatgggctcctctcccaccctcctttccccagtccatgactcgtcagccattcccagtcacttagccaatgcttggacatctgtgagcagcaaagacctgggcccagggacacctgcatgactcccacatgaaagcctctgaggcttctgttgcgagggccttggcaaaggcggaaagagctgtgaacaaccatgggcatgaagatttctgttagcagatggcaggtactggttagtgctttggatacatcagtagctaggtctcaaacgttggacattcccagtttctggtaggcatgagtatcaccagagtgttgcagaaatctttcccagagggagtggtggatgaagtgtgctcattctcatatgcaccccaccagcccacccccagttgcaatggagaatactggtcataggtcctaaataattgctaaaatctggactatatttttagctttgagttttcttgtcaccaaagcagtaaggaagaggtgatgatctctttgtataggtcatacatcttccctggtttgaggttacagtgagctatgattgcaccactgcactctactctgggtgacagaatgagaccccatctctaaaaaacaaaattacccccttctggggaaacaggttagatcctaaagaaaatgttcatgtgcatccattcatagaggggacactgaatggttcagtgggtgacatcttcaagcgcagcaggctttgaatgataactgattaaggcctccctcaggagatggtgagatggttatgataaggcacatttcaagaaagaggctctggggctaagtaaggcaaatggtctataactgtggttctttgaagtctggcttaatccagggatgacacccagactgtctaggaagggctgagctgcgtgccctttaagtgatcacctcttagtataatttcactgagctggaggtgagtgtaagaagttcctggttatagaagaagttataatccttggcatggcctgaagtaggcagtccacactgatatgaaatgtgctgtgtatacctggagaatgaaaatgcccatctaagactggcccaagagctgggcagccttcctccatgggaacctggcaaggcaatgggaagtggacatgggaacacctgaactttctggatgctatgaaacctcaagggaacaaattatgtggcagagagggataatctgttcttcccatctgagaaaagactgcagcaaagataaactatatgttgagatcattttatttgctacatcgggcatcattctaaaaaccattctttgcctgaatctatataaatgacagttgaaagcagtaaaagtgggactgtttcactggagtcagccacactagtggttctcaaatcttggtgaaccctgagagctacccaaggacttgtttgcaatgcagaatcacagcccccagagactgacttgtggggcccagctggttctgattcggtggccagagaaaccgcatgtgtgcactcgggccacacatacagcctggactggcttatgtcaggcccatcctggttgtcaccatgaggacaatataatgtcacttccagtacttcgtgttatttccttctcttttagtatgagaagtggccaagtggtcaatagctttcatctttgtgtaactgaatcttgtgcttcatttccttctgggcatttttcattgttgatgaaataaactttgttcaatttgt

SEQ ID NO: 254 - DNA, 2028 bp, Homo sapiens
gagtctacaagggaaggggagccggcaacacgctcgagcggaaccctgcggagctgcaaccccgggaggagtcgccggacagactcagacgcggtcccctgggacccagggatgcaccgcgcccctcccgccccagcctgcagagactggatgcttccctccccacctggcgggaagcagaggccctcgggcccgaccgagttcgggccaggacccgccccgctttctgcgagcgaccgactgcggccgccacactcacctcgccgccaagcagcactcgggttctgactcggtctcgggttccggtggcggtggtggcggcggcggcggtggcggcggctcctccatggcggcggcaggcgtgacggcaaaggcgggaggagggaccagcgcggcagcggcttctctcatccgtgcacggagccccgcatggccgcggcgggcagtaagctgcagcctggcgcggggcaccggagccccgaagtgcgggagtgactcgactccgcctccgcctctaccccgccgcaggagccgtgcgcgccgcggccatcttggaaacggcgaccggccgagcgccggggctacggtgggcggcgagggacaagcctcccagatcggcggcggtggcggcggcggcggcgggcgccggaatgcgaccggacgggggcggagacggcggcagggaggggcggggagcgccgtcaagtgtcggcgcgattcggtcctggagccgggtctcgccagctcgcccggtgtcgccccggccggtggcagtgggggactgtggagcggagccgggctgtgcagcgggctgggagctcgaggcttcccaggcggtcgtcggtctgggagggacgctgggtagggccgatgagcggggcgggcgcgacgctatgagcccggccggagtcgccgcccagggacctgccacccggatcccaccttccaggaggaccgacgtcacccagacgctcgcaactccggtctcttgacagcgcagccttccacaggctcgaatttttaagacttgacataaagtctccggaattccagattattaaagtgaccccctcatttcaacccggcaaaacttctcaccccagtgtcataagattcgatagcgatctcccagaaacttggactggaatgctcctacactgaggggatggggggaagaagaaatgctaaagattatttcagagttacagaaatctgttgaaattccaatgcatcgtttactcttagcgctggggcttcacagtttttttttaagttggaaatatttacaaaatttcccatagggtgaaatccagagttaatccaaaaccagaatcttttaaaattaagtacattcaaatgtgcagatttcttaaacctcatttagttgagctttgataggtaaaacgcacgttttgaacaactctggtaacaaagaaaaacattaaattgattataggtatgttatatttaaagaccagttgtgaaattagctatattgtgctcaaagtatgttactgacatttctccgtcgttaaaaggaactgctccattctagttttttataatagtctgtattatgtatatagcctgatagtgctgaatttctgaattgaccttcatcttatttactcaataatattcatttgacaaatacttattaagtgcatatatgtgtcaggaactgtactagatgctgaggatatagcagtaagcgcaacagaccaagctaacagcttagtaaagggtgaggtaaaacaaaacaaaaaagtattcaaaaaaataaactaatttttatcttaatttaaaaaattacaaatttttaaaaatcacaaattggtatccatgtataattcatttccgtgcattttcttgtgtgaagaaagctcagtaaaagtatttcttaggtttctgtaattctagttctttactcgattttcttctgcaattttctgagccagaacccttcttagaaggcatattagagactttaaaagttaaataataaaataaatctcttctttaaacagc

SEQ ID NO: 255 - DNA, 2186 bp, Homo sapiens
ttcaggctggagtgcagtcctgcggtcatgactcactgcagccttgacttcctgagctcaagagatcctcccacctcaccctcttaagtggctgggtctacaggtgtgcaccaccacaccgagctaattttgctatttttcatagagacggagtctcactatgttgcccaaggtggtcttgaactccttgggctcaagcgatcctgccccctcagcctcccaaagtgctgggattacaggtgtgagactccacgcccagtcttttcttttttcttttttagagacaaggtcggtctctgtcgcccaggctggcgtgaagtggcgcaaccagctcactgcagccttgacctcctgggctgaagcaatctttctgcctccacctcccgagtggctgggactatagttgtgcaccagcacgcccacctcctgcccagggttgttactggggtggtcacgtgggcagcttctgcctgggatgggccacaaagccagactcccggcagggacacgggtgttccacacaagctgcgttgttggttccctgacgcccttcaggctggggggtgggaaagccgatcccccaagtgcctgcagagcccacctggcgcaggcctcgccgcctcgaggctgctgctcgcacttctgccccttcccccggccaggcccccgttccttgaggccgtaccacaaggtgcgttcatttttccacaccgtgagctgggcttggcagagcctccaccttgtggccagtattcccagtggcccctttgagaggatttcctggagctccctgtctgagcttcccggactgagggcactgggaaggagcctgcggagctggaggtcagcgggtggacgggttgcgctgtcctggctttcggagtgtagagccagaggggatgggacaggtgccctgctgctgggcttggtggtccctgctgcagggaaggggcagctggtgtgaacacaaggagctgcggggctggagaaggccagggccaggagcctgccgacggacaccagcgaggggccaggccgggccaggagcctgccgacggacaccagcgaggggccaggccgggccagactccctggccggctgggatctgacaggagcgccaggctccttgggccgcccgaggaaccgcttgtttgcctgtgctttttcatctgtaaatggaatgagttggacacaagatccaagcgccctcccctgttggagaaggttcttgtgggctctgggcccatcccacatcccacagtgggcaggaggccaccaagaggtgcaagaccatgccctctgtttcgataggaagctgggcctcagaggggcctggggcctgtgtctgagacccggccaagtgctggacgtctccccttcctcatggctgttatggctgaattacgtccccccaaattctcatgttgcagccttaaccccagcacctcagtgtgggactgggtttggagatggagcccctacagaggtcagcaggttaaaagaggccatcagggctctgggtgggccctgatccaagctgcttggtgtccttgtaagaagaagagatgaggacacagacacacacagagggacagccccatgaggaaacagggaggcaatgccgtctgcaagcccagggcagaggcctcaggaaccagccctggtgacacctggaccttggacccccgtgcccaggacagtaggagaattggagccgcctggctgcagtccttcccgatggcaccctgtattagtccgttctcacactgctaattgttgggaaaagggcttgtggaatgcctgtataaactggccatgaaaatatgggacaataagttgtggaaagccacaagaggcctctgaggaggaaagcctcctaattgccatcatgttcgcatgctcagggcgagacctgctgtcttatctgtaaacactgtgttcaaggagaaagacattccttcgaagcactggactgtggacagacacacgagctcctggttaagcccgctcccaccagctcctgtccgataagttaaagatacgctgtttgagcacaaaggagattcattgaaaccgctattgctgtagattacgcctgtgacgcactgcctccctttcactgtttcgccctgaatatctgcttctcagatctaagtgactgtactcaataaatagcgtggagacc

SEQ ID NO: 256 - DNA, 2935 bp, Homo sapiens
cagctggataaagagttactgaggcatgacagtgatgtgtccaacccgcctaaccccactgcagtggcagcagattttgacaatcgaggcatgattttctccaatgagcaacagtttgaccctctttggaaaaggcggaatgttgagtgccttcaacccctgactcatctgaaaaggcggctcagctacagtgactcagatttaaagagggccgagaacctcctggagcaaggggagactccacagacagtgcctgcccagatcttggttggccacaagcccaggcagcagaagctcataagccattgttacatcccacagtctccagaaccagacttacacaaggaagccttggttcgcagcacactttctttctggagtcagtcaaagtttggaggcctggaaggactcaaagataatgggtcaccaattttccatggaaggatcattccaaaggaagcacagcagagtggagctttctctgcagatgtttcaggctcacacagccctggggagccagtttcacccagctttgcaaatgtccataaggatccaaaccctgctcaccagcaagtgtctcactgtcagtgtaaaactcatggtgttgggagccctggctctgtcaggcagaacagcaggacaccccgaagccctctggactgtggctccagtcccaaagcacagttcttggttgaacatgaaacccaggacagtaaagatctgtctgaagcagcttcacactctgcattacagtctgaattgagtgctgaggcaagaagaatactggcggccaaagccctagcaaatttaaatgaatctgtagaaaaggaggaactaaaaaggaaggtagaaatgtggcagaaagagcttaattcccgagatggagcttgggaaagaatatgtggcgagagggaccctttcatcctatgcagcttgatgtggtcttgggtggagcaactgaaggagcctgtaatcaccaaagaggatgtggacatgttggttgacaggcgagcagatgccgcagaagcactttttttattagagaagggacagcaccagactattctctgcgtgttgcactgcatagtgaacctgcagacaattcccgtggatgtggaggaagctttccttgcccatgccattaaggcattcactaaggttaattttgattctgaaaatggaccaacagtttacaacaccctgaagaaaatatttaagcacacgctggaagaaaaaagaaaaatgacaaaagatggccctaagcctggcctctagctttcactcgtggtgaatatttcagacctaaagatccagatagtatctctgttcatatgtgaataagttgaagattgtggggctactttttctcatagcactttattttgaatgttgttagtttgtgctgagaatggtcgtccgtatttgaaccaattatttattttaaaatatatttaagctacatttttgttttgaaaaattgccataaatttggtgccactttcttttatttatttgactgagttaatattattgtattaacattttaagtatatggtgtttacattcttatttcttttgacattttggaaataatcataacttgtctttccaaaataaccattttcttgatggaactcttcctagagtttttaccaaatagctaactttagtagtaaaacctcattgtatccattcccccacagatgaactaagaaagtcaccaagtgtcttaagctgttttatatttgttacgaagaaggctattgctacaatatttttaaaggtttcttttttaactttgaaattttttgtttttccttttctttttacaaatgtaacagagggtttcaaagcatattatttttcagagagatttagttttactttaatggagtgactgtgaagtggttgggattttttgcttgtagaaagtagacttgctctttgtcagatttccaaacaaccttgccagccttggctgtcaaaaggaggcaggagcagttctcaacacaccaagccttattcccactcccttgggttgctgctgagccaaatagcatctttacagaggaagtgggatcagaggcaggaagtgtggaaagttgctaagaagcagggcttgcctctgtcctcccggggactccacagggatattcgtgcagggcaggggctctgtgccagccctgctctctcagatgccacagccactctgcagaggtgactcttggagctggaggaagtcaaaactgggccactgtttgtactgatggtgtattagcatgagcagcgtggccctggccccacactcccaaatctgccactccatagacccacttgcctcaaggctttatatttggctgctttcttacaatgagaattaagatttttaaactgaagttgaccatacaggttgcattagccctaactggcttcatgtaagaagggtgactgcctaaactagttccttgtaagctgaaccatcaattatcagttgaagccatacttttatttaaattaatatacgtaagataccagaggccaagccacagagaggataatagttcttcccaataaaggtgatattaatcagactaatttcgaactaaagaagttactgcttaaagacggaatttcaggggaagcaagactcatttagaacaaatgaaatttctccagtcctacatttctgaattgacttctagcacatcaaaaatatttcagtcattatcagtctcattaactgaaatgccaaatgctaaatgcagtgttctttcacactgttttaattttcttgggaaattgagtccagtggatgttaatggagtgggttgcccatccctgaaatgtcttattttcaagtgcctggcctgggaaagaaggggaagaaacaattgcattatatccaaagatacactataaaaatagagtttttacc

SEQ ID NO: 257 - DNA, 2130 bp, Homo sapiens
atttcggcggcgggaccagcagcagcgcagcggctacccagcgcctggcggactacagcccccctagccccgccctgagctttgcgcacaacggaaacaataacaataacggcaatgggtacacctacacagcggggggagaagcctcagtgccatcccccgacggctgccccgagctgcagcccacttttgacccggctcccgctcccccacctggggcaccacttatctgggcccagttcgagcggtccccgggaggcggacctgcagctccggtatcttcttcctgctcttcttctgcatcttcgtctgcttcttcctcctccgtggtcttccccgggggtggcgccagtgcgccctccaacgccaacctggggctattggtgcaccgccggctgcaccctggcaccagctgcccgcgcctgtctccacccttgcacatggccccgggggcgggagagcaccacctggctcgccgggtgcgcagcgacccgggtggaggaggcctggcctacgccgcttatgccaacgggctgggggcacagctgcctggcttgcagccgtcggacacgtcgggctcctcctcttcgtccagctcctcctccagctcttcatcctcttcctccgggcttcggcgtaaaggcagccgcgactgctccgtgtgcttcgagagcgaagtgattgccgcgctggtgccctgtggccacaacctcttctgcatggagtgcgccaatcgcatctgtgagaagagcgagcccgagtgcccggtctgccacaccgcggtcactcaggccatccgcatcttttcttaaaggcagcgggcgctgctagtgcgcaccgtgctgggggaagggggaacccctccccatcctctttccccagcgctcgcctgcctccctgggtgccccccctctcccttctccttcccggccccaccaacactctgagatccgagaggagcttggaaagctgtagtatccgctcatttttaaaatttaatttttaagtaaaggaatttgccaggatatctgcatcaagagtactgtagcctgggaaacctgaacacctgaaatgcatgctctataaataataggaacggcgacattctagtaatgatagtttttacactgtacttaataggaagcttccaaaagaagaaaaccccacaagttttccattttcttaaagtaggaaaaaatgaacagtaataattatgatgaagatgatagtagtgctatgggatgtgtggactgtttagtgtgttcccctttgtgggtgggttcctatgatacttattatagaacacagtggatcctttttgaatgttcgtggaagggccaggagttcctgtgaaaccaggatactgcagctttattaaagttaaagaaactgtaacatatctcttatatattaaaaacgtttaaaagttttaaagagaaattgcattaatacagattgaagtattttattcttttttgacttgaaaaattatatttcatattgcaaagatgtttacaagtattttaatttaagttcagtgaacttttttgtagctgggttaaatctttttattttagtatggccttatggcaaagaacactgtattattttaataatcacacaattgtgacggaattacaaccataaaatgtgtaatgttttgaacagtattctgttgggatggagattttataggttcagacaaatcttctagatctgcttcacccagcatattttctattcagtgatataaagcatattttattctatattattacaaaaacggaaatgtataaacatgtcaaaaagaactgttgatgctttctaacatttgtataaatagaattcagtgcaagttacaaaaattctgttgcaccactctagttttagtatttctattttaatacatttgtttaccacttgtttatgtatatgtaggtgatgttacttgagcttaaatgtactttactgagcaaagtttaaaaaacaaagtatattttattttatgataaagggcctttaacctcatggtcaaatactaatattatatttgctgagacaagatttgaaattgtatcaagagttttatttttctgacatttaaagttctacataataaaggtaaaactt

SEQ ID NO: 258 - DNA, 2392 bp, Homo sapiens
agccaacatagagccctcagtgggatgagggtgaaactgctattgccggcggctcctgttttaccgcgtcagcatgctggtgcatttatttcgggtcgggattcggggtggcccattcccaggcaggctgctaccgcccctccgcttccagacattctcagctgtcaggtactctgatggctaccgcagctcctccctcctccgggccgtggcccacctgcggtcccagctctgggcccacctccctcgagccctgctaggccccatggtactgagtaagcatccccacctctgccttgtggccctgtgtgaggcagaagaggcccctcctgccagctccacaccccatgtcgtggggtctcgctttaactggaagctcttctggcagtttctgcacccccacctgctggtcctgggggtagccgtcgtgctggccttgggtgcggcactcgtgaatgtacagatccccctgctcctgggccagctggtagaggtcgtggccaagtacacaagggaccacgtagggagtttcatgactgagtcccagaatctcagcacccacctgcttatcctctatggtgtccagggactgctgaccttcgggtacctggtgctgctgtcccacgttggcgagcgcatggctgtggacatgcggagggccctcttcagctccctgctccgacaagacatcaccttctttgacgccaataagacagggcagctggtgagccgcttgacaactgacgtgcaggagtttaagtcatccttcaagcttgtcatctcccaggggctgcgaagctgcacccaggtggcaggctgcctggtgtccctgtccatgctgtcgacacgcctcacgctgctgctgatggtggccacaccagccctgatgggagtgggcaccctgatgggctcaggcctccgaaaattgtctcgccagtgtcaggagcagatcgccagggcaatgggcgtagcagacgaggccctgggcaatgtgcggactgtgcgtgccttcgccatggagcaacgggaagaggagcgctatggggcagagctggaagcctgccgctgccgggcagaggagctgggccgcggcatcgccttgttccaagggctttccaacatcgccttcaactgcatggtcttgggtaccctatttactgggggctcccttgtggccggacagcagctgacagggggagacctcatgtccttcctggtggcctcccagacagtgcaaaggtccatggccaacctctctgtcctgtttgggcaggtggtccgggggctgagtgcaggtgcccgggtctttgagtacatggccctgaacccctgcatcccactgtctgggggctgctgcgtccccaaagagcagctgcgtggctccgttacatttcagaacgtctgcttcagctacccctgccgccccggcttcgaggtgctgaaagacttcaccctgacgctgccccctggcaagatcgtggccctcgtgggccagtctggcggaggaaagaccaccgtggcttccctgctggagcgcttctacgaccccacggcaggcgtggtgatgctggatgggcgggacctgcgcacccttgacccctcctggctccggggccaggttgtcggcttcatcagccaggagcccgtcctgtttgggacgaccatcatggaaaacatccgctttgggaagctggaagcttccgatgaagaggtgtacacagccgcccgggaagcgaatgctcacgagttcatcaccagcttccccgagggctacaacacggtcgtcggtgaacggggcactaccctgtctgggggccagaagcagcgcctggccatcgcccgagcccttatcaagcagcccacggtgctgatactggatgaagctaccagcgcgctggatgcagagtccgagcgggttgtacaggaggccctggaccgggccagtgcaggccgcacggtgctggtaattgcccaccggctcagcactgtccgtggggcccactgcattgtcgtcatggccgatggccgtgtctgggaggctgggacacatgaagagctcctgaagaaaggcgggctatacgccgagctcatccggaggcaggccctggatgccccgaggacagcggccccaccgcccaaaaagccagaaggccccaggagccaccagcacaagtcctgagaagggccccctgaggtgtggtcgctgccaagcatcagtgttagggctggggctcagcctgggggagcctactggggactgagcccccaggagggccagcatgtggagagtcgctgcggctgctcctgctcacaataaagccggggccgagcagctggcaggggaggccaatccctccctcccctccccagtcctgccggctgcctccctccc

SEQ ID NO: 259 - DNA, 3114 bp, Homo sapiens
attgaaccctctgcattccacaggcaaggtttacctaaagcaccagggtggactgagaagaattctcatcatagttgggagccattggatgccccagagggtaagctgcaaggctctaggtgtgacaacagcagttgcagcaagctccctccacaagaaggaagaggcattgctcaagaacagctgttccaagaaaagaaggatcctgctaacccctccccggtgatgcctggaatagccacctctgagaggggtgatgaacacagcctaggctgtagtccttcaaattcatcagctcagcccagccttcccctgtatagaacctgccaccccataatgcctgttgcttcttcatttgtgcttcactgtcctgatcctgtgcagaaaactaaccaatgcctccaaggccaaagcctcaaaacttcattgactttaaaagtggacagaggcagtgaggagacctataggccagagtttcccagcacaaaggggcttgtccgttctctggctgagcagttccagaggatgcagggtgtctccatgagggatagtacaggtttcaaggatagaagtttgtcaggtagtctaaggaagaactcttccccttctgattctaagcctcctttctcacagggtcaagagaaaggccactggccatgggcaaagcaacaatcctctctggagggtggggatagaccactttcctgggaagagtccactgaacattcttctcttgccttaaactctgggctgcctaatggtgaaacttctagcggaggacagcccaggttggcagagccagacatataccaagagaagctgtcccaagtgagagatgttaggtctaaggatctgggcagcagtactgacttggggacttccttgcctttggattcctgggtgaatatcacaaggttctgtgattctcagcttaagcatggggcacctaggccaggaatgaagtcctcccctcatgattcccatacgtgtgtaacctatccagagagaaatcacatccttttgcatccacattggaaccaagacacagagcaggagacctcagaattggagtctctgtatcaggccagtcttcaggcttctcaagctggctgttctggatgggggcagcaggataccgcctggcccccacttagccaaacaggctctgcagatggcatggggaggaggttgcactcagcccatgatcctggtctctcaaagacttcaacagcagaaatggagcatggtctccatgaagccagaacagtgcgtacttctcaggattcatcaaacgtgaggaagcctttggaaaccgggcaccgttgttccagctcctcttccctccctgtcatccatgacccttctgtgtttctcctcggtccccaactctaccttccccaaccacagttcctgtccccagatgtcctgatgcccaccatggcaggggagcccaatagactcccaggaacttcaaggagtgtccagcagtttctggctatgtgtgacaggggtgaaacttcccaaggggccaagtacacaggaaggactttgaactaccagagcctcccccatcgctccagaacagacaactcctgggcaccctggtcagagaccaaccagcatattgggaccagattcctgactactccagggtgcaatcctcaactaacctacactgccacactaccagaaagaagcaagggccttcaggttcctcacactcagtcctggagtgatcttttccattcaccctcccaccctcccattgttcatcctgtgtacccaccatctagcagtcttcatgtacccctgaggtcagcttggaattcagatcctgttccagggtcccgaacccctggtcctcgaagagtagatatgcccccagatgatgactggaggcaaagcagttatgcctcccactctggacacaggagaacagtgggagaggggtttctgtttgttctatcagatgctcccagaagagagcagatcagggctagagtcctgcagcacagtcaatggtaaaggttattcctttcctttcctggagctacacctttctttgtaaaactgtactgtgggccgggcgcggtggctcacacctgtaatcccagcactttgggaggctgaggcgggtggatcacgaggtcaggagattgagaccatcctggccaacatggtgaaaccccgtctctaccaaaatacaaaaaattagccaggcgtgacggtgcgtgcctgtagtcccaactactcggaaggctgaggcaggagaattgcttgaacccgggaggcagaggttgcagtgagccgagatcgcaccactgcactcccgcttggcaatagagtgagactccatctcaaaaaacaaaacaaaacaacaacaaaataaactactgtggcagcgttggtaccctgcatcactgccatggttgtgctattctcatctcaacatagaattggtgggttctcctaagggtgtcaggaacctctaaaaagatgtgattctttgggaggggatatttgaaattccaacttccattccccctagcaaaaggaagcagctgctgtttaagggttttatctgagccactttaaagatgaatccatggtattactctggatactagccattccttaggattttaaggtcacattttattcctggatgctttatgtccccacctccacctgagccctcatcctctgttccctactatactcccaacttctactctttgttttatccacctatccctattacctgaccctttgtcttccctgtctcccatccttggggggacatgtagccctgtggtcatggttctgatgacatcatcagggcagcccccctgcccaggtattatggcctgtcagcattccctgtgccctccaaaccttaggcctagaatgcggagctgccaacataacattcacccttttgaacagatggagtcaggcacactaacacagccttctgtcctcaataacacagccattattgccacttgctcagtcgtcaatgtaaaccctcagagtcagctgaactattttaggccaaacatactgtttttgtaaagtatttttcattaataaatctataagacagttctattt

SEQ ID NO: 260 - DNA, 2110 bp, Homo sapiens
tattagataagatgcaccgttgacacaggtacagaagtttccatatagttcaactgattttttatttattttttatttttttgagatggggtctgactctgtcacccaggctggagtgcagtggcaccatctgagctcactgcaacctccatcttgcaggctcaaacgatcctcccacctcggcctcacaagtagctgggactacaggcatctgacaccacacccagctaatttttgtatattttgcagagacaggatctcgccatgttgcccaggctggtctccgactcctgagcccaagtaatctgcccccctcggccacccaaagtggtgggattacaggcatgagccaccatgctcggcccagatcaactgaatttaggatttgatattactttgactttcctgcaatccaagttccttttgccagtttacttcatttgcttctgcaaatataagtacagtggtttggctttctttttaagcctttaataaaatgtctaggtgttgagactaacatcagactctttctcattaatataatacaaagccagctcgattctaattaactagttggaatttcacatgttagctctacaaatcatttttcacgcattattcctatctctataggcttgttaaaaagtgatttataaatttgctccagactctcaaagatgaagacttttgtaaacgtgtatctttggctactgtggataaaacagttgaaactccatcgcctcattaccatcatgagcatcatcacaatcatggacatcagcaccttggcagcagtgagctttcagagaatcagcaaccaggagcaccaaatgctcctactcatcctgctcctccaggccttcatcaccaccataagcacaagggtcagcataggcagggtcacccagagaaccgagatatgccagcaagtgaagatttacaagatttacaaaagaagctctgtcgaaagagatgtataaatcaattactctgtaaattgcccacagattcagagttggctcctaggagctgatgctgccattgtcgacatctgatatttgaaaaaacagggtctgcaatcacctgacagtgtaaagaaaacctcccatctttatgtagctgacagggacttcgggcagaggagaacataactgaatcttgtcagtgacgtttgcctccagctgcctgacaaataagtcagcagcttatacccacagaagccagtgccagttgacgctgaaagaatcaggcaaaaagtgagaatgaccttcaaactaaatatttaaaataggacatactccccaatttagtctagacacaatttcatttccagcatttttataaactaccaaattagtgaaccaaaaatagaaattagatttgtgcaaacatggagaaatctactgaattggcttccagattttaaattttatgtcatagaaatattgactcaaaccatattttttatgatggagcaactgaaaggtgattgcagcttttggttaatatgtctttttttttctttttccagtgttctatttgctttaatgagaatagaaacgtaaactatgacctaggggtttctgttggataattagcagtttagaatggaggaagaacaacaaagacatgctttccatttttttctttacttatctctcaaaacaatattactttgtcttttcaatcttctacttttaactaataaaataagtggattttgtattttaagatccagaaatacttaacacgtgaatattttgctaaaaaagcatatataactattttaaatatccatttatcttttgtatatctaagactcatcctgatttttactatcacacatgaataaagcctttgtatctttctttctctaatgttgtatcatactcttctaaaacttgagtggctgtcttaaaagatataaggggaaagataatattgtctgtctctatattgcttagtaagtatttccatagtcaatgatggtttaataggtaaaccaaaccctataaacctgacctcctttatggttaatactattaagcaagaatgcagtacagaattggatacagtacggatttgtccaaataaattcaataaaaacctt

SEQ ID NO: 261 - DNA, 2402 bp, Homo sapiens
gtagccgtgtgctcatttgtatagactctggccccataagggaaccggaaggcagagcagcgtctgcctgacggggagggcgcggtctctgagcacccgggcgcccgcctcccatggggcccagcagtaggggtgcagaggctggcgtgcccagacgcactgtgggtggcctctgggtagtggtcagaggtcagaggcaggtctgtgatggacggagatgaggctgccacagcatgggtgactgtcgcatggaagcacagcagggaggagatttctcactgccacaccctctgggtcccccctcgtggattgcccggggcagctgtggcggggcggccacaacactgtttagcagaggctccaagacgggggaggggagggaggcttcactgtgggaacagggaggctccaggtggtcctgaggaggccgttggcttaagggagccggaggtagggaccggacagacgcatggcctcccaggtgactggcgggtaccttggctctctcaggctcgtcttgggttggaggctgctgtcataaccgaggcctgtggccgtcccaggccccccacgtgccctgtgcttgagctgcaggatgtggggatgccctgggcaggaggcgggcagagccctggagggaggggttccacccctcatgtcccctccagggccccgcacccaggggctgcctggcaggtgctcttcccggaaagcatctggttcccgagagcccattaggaccgtgcttccgtttcgatgtggttatttttaagaattcttcatcagatttcatttcagaaaaaacagcccttacaaagcagggctttgaggactccgattgtcgaggtgcacgtgcatggcttggagtgggtgggctctgagcacctgttgggggcttgggtgccagaaatgttttaataactccaggcattgagcgcacacagaatcacgactgtggcacctgacccagtgccctgcgacacgcccacaggtcgaaagctgccctgcgcctgaagttcgaggtgtgcaaggagctgagggcccacctggagctcctgcccgagacaggctacatccaggcacagtcgtcctactccgtgcagctcaagttcctgccgcggtaggtgccaggatgccaaggccgggacaggaggacgtgggaggttgtgggctccgaggcgctcctcgccactggccactcctctgttctcattgctgccgggatcatcagcctccagggatgtgttctggggcagaggccatgacgctggggggcagtcacagctgggtctgtggtccgttttggttgcttttgtttaagatgtgagccgagttgaagttcatttttttgtacagaggtttccaattattccagcctcgttgttgaaaagactgggaggctgcgtgtctcccatgcatggccggtggctctcatggccactgagggtctgctacctgccgggataaggtggcccaggataaggctctggcttgctacgggtaccctgcggtccgtgcactcccccgctgtcttccctgtcttcatccctttcccagtaactccctggggttctgtttcaagctcagtgcacacctgacatttgctcctttacctgtgtcttgagggtgtccctgtcacccagctgtccctcgtctaatccaaggctcttcccaggcctgctggctgcatcccctggtctctgcttttgccaggtgaactttgatttctgcgcttgaacatttgttgtgctttggagactggacgtcctgtgtccgatcccagccccccagagctgccctcagcatccgggccgggaccaaggtccagacaaatgatgctcagtggagcttggtgggggaggtgggcgcagcaggcacgggcctggtgggactaggaggggaacagggcggagctgagcttaaaatcggctgcttcctggacttgcccccgccggccgcctgtcacagggaggctgatgtttttctttcttattttacttctcctgatatttctttctttctttctttcttttttgagacagagtctcgctctgtcgcccaggctggagtgcagtggcactatctcggctcactgcaagctctgcctcccgggttcacgccattctcctgcctcagcctcccgagtagctgggactacaggcgcccgccaccacacccggctaattttttgtattttttagtagagatggggtttcaccgtgttacgcaggatggtctccatctcctgacctcgtgatccgcgcgcctcagcctcccaaagtgctgggattacaggcgtgagccaccgtgcccggcccttttcctgatagttctttaacaacgttaacttatgtaatcagagatcaagctctgattaaagtgaaaatgcatttttaaagggc

SEQ ID NO: 262 - DNA, 3297 bp, Homo sapiens
atgtttttttgcggggggtgggtggcgggggggtttggtactggccagtgccttaggggtggaactccctgcgagggccactgtgatcagaagtggggcagggctttaacaacacccctctgcctggctccccacctgggcctccccaccacgtccagccattccatgtatcacctgtgttctgcctgtcaagctctgttcccagaatctggatgcaggagctgggagtgtggctctgttttgagctgagtcgagaggaggggccctgtgtgtccttggaggccccgggctcatcctctgcctggctgtggtgtgtgggatttctatggggtcgtgagcatgaggctcctgtagttactggtgcccagcgccgcgcagctcacggtcctccaggagccacacggcccccaccaggcgggctccaggcctggtgcccagccccttctctgagactctggggttatcttgcgtcatgttctgaggcccacctgggctctctcccgcctgtgaggttggcagcacctttcttggatcatgttctttgtctgggatggagggagggaagaattctccgttgcatggctcgcgtcttctgctttagaattcagccagctacaaatcctaactccctccccacctctcttttctcctgaaaacagaacatgaaaggctcccggagcagcgctgactcctccaggaaacactgaggcagacgtgtcggttccattccatttccatttctgcagcttagcttgtgtcctgccctccgcccgaggcaaaacgtatcctgaggacttcttccggagagggtggggtggagcagcgggggagccttggccgaagagaaccatgcttggcaccgtctgtgtcccctcggccgctggacaccagaaagccacgtgggtccctggcgccctgcctttagccgtggggcccccacctccactctctgggtttcctaggaatgtccagcctcggagaccttcacaaagccttgggagggtgatgagtgctggtcctgacaagaggccgctggggacactgtgctgttttgtttcgtttctgtgatctcccggcacgtttggagctgggaagaccacactggtggcagaatcctaaaattaaaggaggcaggctcctagttgctgaaagttaaggaatgtgtaaaacctccacgtgactgtttggtgcatcttgacctgggaagacgcctcatgggaacgaacttggacaggtgttgggttgaggcctcttctgcaggaagtccctgagctgagacgcaagttggctgggtggtccgcaccctggctctcctgcaggtccacacaccttccaggcctgtggcctgcctccaaagatgtgcaagggcaggctggctgcacggggagagggaagtattttgctgaaatatgagaactggggcctcctgctcccagggagctccagggcctctctctcctcccacctggacttggggggaactgagaaacactttcctggagctgctggcttttgcactttttttgatggcagaagtgtgacctgagagtcccaccttctcttcaggaacgtagatgttggggtgtgttgccctggggggcttggaacctctgaaggtggggagcggaacacctggcatccttccccagcacttgcattaccgtccctgctcttcccaggtggggacagtggcccaagcaaggcctcactcgcagccacttcttcaagagctgcctgcacactgtcttggagcatctgccttgtgcctggcactctgccggtgccttgggaaggtcggaagagtggactttgtcctggccttcccttcatggcgtctatgacacttttgtggtgatggaaagcatgggacctgtcgtctcagcctgttggtttctcctcattgcctcaaaccctggggtaggtgggacggggggtctcgtgcccagatgaaaccatttggaaactcggcagcagagtttgtccaaatgacccttttcaggatgtctcaaagcttgtgccaaaggtcacttttctttcctgccttctgctgtgagccctgagatcctcctcccagctcaagggacaggtcctgggtgagggtgggagatttagacacctgaaactgggcgtggagagaagagccgttgctgtttgttttttgggaagagcttttaaagaatgcatgtttttttcctggttggaattgagtaggaactgaggctgtgcttcaggtatggtacaatcaagtgggggattttcatgctgaaccattcaagccctccccgcccgttgcacccactttggctggcgtctgctggagaggatgtctctgtccgcattcccgtgcagctccaggctcgcgcagttttctctctccccctggatgttgagtctcatcagaatatgtgggtagggggtggacgtgcacgggtgcatgattgtgcttaacttggttgtatttttcgatttgacatggaaggcctgttgctttgctcttgagaatagtttctcgtgtccccctcgcaggcctcattctttgaacatcgactctgaagtttgatacagataggggcttgatagctgtggtcccctctcccctctgactacctaaaatcaatacctaaatacagaagccttggtctaacacgggacttttagtttgcgaagggcctagatagggagagaggtaacatgaatctggacagggagggagatactatagaaaggagaacactgcctactttgcaagccagtgacctgccttttgaggggacattggacgggggccgggggcgggggttgggtttgagctacagtcatgaacttttggcgtctactgattcctccaactctccaccccacaaaataacggggaccaatatttttaactttgcctatttgtttttgggtgagtttcccccctccttattctgtcctgagaccacgggcaaagctcttcattttgagagagaagaaaaactgtttggaaccacaccaatgatatttttctttgtaatacttgaaatttatttttttattattttgatagcagatgtgctatttatttatttaatatgtataaggagcctaaacaatagaaagctgtagagattgggtttcattgttaattggtttgggagcctcctatgtgtgacttatgacttctctgtgttctgtgtatttgtctgaattaatgacctgggatataaagctatgctagctttcaaacaggagatgcctttcagaaatttgtatattttgcagttgccagaccaataaaatacctggttgaaatac

SEQ ID NO: 263 - DNA, 2104 bp, Homo sapiens
gcgtcttctttctggactggagaagagacaagtgtcagatcatggcccagggaagagtccaataccaggtccaggcacagggctaaacatcagactaatcccaggtccaggcccagatccaagcaagaagcctatgttgattcctggtctggatctgaggatgaggccagcaacccattctccttctgggttggagaaaataccaataacttgttcaggcccagagtcagggaggaggcaaatatcaggtccaagctcaggacaaatagagaagattgttttgaatctgagtctgaagatgagttctataagcagtcctgggttttgcctggagaagaggccaatagtagattcaggcacagagacaaagaagatcctaatactgccttgaaactcagggcccagaaagatgttgacagtgatagggtcaaacaagaacccaggtttgaggaggaagtcattattgggtcctggttctgggcagaaaaagaggccagtttggagggtggagcttcagcaatctgtgaatctgagccaggaactgaggagggggccattggcggatccgcgtactgggctgaggaaaagtccagtttgggggctgtggccagagaagaggccaagccggagtctgaagaagaggccatatttgggtcctggttctgggacagagatgaggcctgctttgacctaaatccctgtcctgtgtacaaggtcagtgataggttcagagatgcagctgaggagcttaatgcatcctccaggccccaaacctgggacgaggtcactgttgaattcaaacctggtctttttcatggggttggcttccgatccacaagcccctttggaattcccgaagaggcttctgaaatgcttgaggcaaagcccaagaacctggaacttagcccagaaggagaagagcaggaatctttgcttcagcctgatcggcctagtcctgagttcacatttcagtatgatccttcctaccggtcagtccgggaaattcgagagcatcttagggccagggagagtgcagagtctgagagttggtcctgcagctgcatacaatgtgagctgaaaattggttctgaagagtttgaagaattccttttattaatggacaaaattcgggatccttttattcatgaaatatctaaaattgcaatgggtatgagaagtgcttctcaatttacccgagatttcattcgagattcaggtgttgtctcacttattgaaaccttgcttaattatccatcctctagagttaggacaagttttttggaaaatatgattcacatggctccaccttatccaaatctaaacatgattgagacattcatatgtcaagtgtgtgaggaaacccttgcacatagtgtggattcccttgagcagctgactggaataaggatgcttagacacctcactatgactattgactatcacacactgattgccaactatatgtccgggtttctctccttattaaccacagccaatgcgagaactattcagtgccaaagctctttcaatatttgtgggtctctttaacatagaagagacaaatgataatattcaaattgttattaaaatgtttcagaatatcagtaacattataaaaagtggaaagatgtccttaattgatgatgatttcagtcttgagccgcttatttctgcatttcgtgaatttgaggagttagctaagcaactacaagcccaaatagacaaccaaaatgatcctgaggtgggacaacaaagttaatatgattaaccacctgccgctgatcagccttatgttcccaaagagccctgagtagtgctttggtgttcacagtctgtttttttgttgtaacttatattttttaatgctgatgttaactttgtcaaactcttgttttgagctggatcattttgtggatgccaaatgaatatcaaaactgaaaacacatttgttgatatttgtcttgctgtccagattgcggtatttttcagtattaagttttcaatgaactgtgtcacctaagtaagctaccctgctattcgttgtttaaatatatggttctctatttgagtctgtgttttcaataaagttctatgttaaaattgg

SEQ ID NO: 264 - DNA, 2501 bp, Homo sapiens
gtgctaatctgcgtcagctggggctgtatttggaggaagaggcgcggcctcccgtcaagtctgtttttttcaggtggggactgtaggcctttgtgccctgctggaaatcgtgaaaagcaagagagaagagtcccagttattcttgctgcctttgataagtgaatttagggcaactactagtgccagtaggcatgggggatctaccgatgaagaagacacaaagtctccgctctcgtggggtttacagagaataatgaatgagattaattaagaaatgaatgagattaattgaatgaaattgccagactgaatgaagtgaatggcctgaatataaacaatttccaaatacagataacactgcatatctggtgtttgcaatactcccttcgcacttgaggaagaagcactatgtctggggccaagtgtgaccctttgtctgttgctgggtacctttcatttcgcactttctcctctgctgctctccagaggaagttattgtcccaaagttgtgtgtcatgcccgaagtgtctgggatccccgagtgcctgtggtgcccaagagctatgaatctgctatcatcaacacagagggtaccttctgaatgggctatgtctacagtgatgctgcaaatggaagctaaccctaggatgactggcctctgacacttgagccatcccatcatctgtcatgggttgacccatccatcccctcaatgagcctgaccttcaggaccactgacagaggagcagtcaatagaaattaattgttaaatacccagaaaatctgaaatggtatttaatatgcagttcatcaagagcaaaagttccttaaatcttcatctagaaaagttatttataagggatgaatatgttgtatgaatatgttgtatgcaaatattatattcaagggcaagaccatgaaaacagtttaagaatccgacagggaattagataaagacatcggagtgcacttgtcaaaatacagctatcaagaatgatgatgttgaaaaatagttttagcaatataattgtctagaaccacagggagtctgagattttacccaacttgtgagttaacaactctgctatagcttcatgaaagaagacacaagactcctgggtcaggaacaaaggtctctaatactcacagcaatatcaggagccagaatttcaggatcctttttcctgccagtttctcaagtcctaattaccaccgagttacaggaaagggccaggtaacactagcactgccatcagtggctgtattacagaacaggaactccaagcttaggaaacccaaatcttttatagttaacaatgaacacatctgccattgttctgaagggagacgctaccccaatcttccacacctgttcactatataaatatctgtgaaaagatagacagaaaaataggtggagaatgcctctgctcacaagatgtgcagaaacgtgagaggctcatggagaactgtttccctacaatgacaaaatgctgacgatatattgttatgtaaaataaagcaggcatttttcacctcattttcatgaaatatagtgtgtttatatagatatttagaaaagtatgaaaggacattcatccagatatcaatagaagagtttattatttttgctagttgtaagttcaaacttttctagtaaaaatagattacttgtgaaattatttttaatctttttttttttttgagatggagtcttgctctgtcgcccaggctcgagtgcagtggcatgatctcagctcactgcaacatccacctcctgggttcaagcaattctcctgcctcagcctcctgagtagctgggattataggtgcatgccaccatgcccagctaatttttgtatttttagtagagacgggatttcaccatgttggtcaggctggtctcgaactcctgacctcgtgatctgcccacctcggcctcccaaagtgctagaattacaggtgtgagccactgcacccctcctaaatgtcaatttaataactgagggagcccttaaaataccccgctgacttccacacgggtgtgtaaaatagaatctgctcacgtcttagaggagataagtacatgcttaatgttcttaggagagacctgccttttgacatggaagctgtggtattgttgacaagagcatacctccttaaaccatgcaaaccacgttcacatcaaagctgcctacgaatgattattttccatgatgctatgctccctcctgcctgcctcagtggcaagtgtgacccagcaagtgtatccagggcatccctcactcttacttatttttgccaaatgcagtggaaatgtatagactttttttcatatttatgttggctgcagagcataaatctgaataggttctccaaagtaagctttttctgcatgcatttgctcccaatgatgataggtattatgaattgctttatagtaatcattatccttttccatatgttttacggttagtctgtgctataaacttgtttgattt

SEQ ID NO: 265 - DNA, 1948 bp, Homo sapiens
acagccgcgcgttctccctgcactctcttcgcggtcccatctgttccccatggcgtctcatccgcaaacccggatccaggcttacctggagaagaacaagatcggtcccctgtttgaggaattaatgaccaagttaataactgagacacctgaccagccaatcccatttctcattgaccatcttcagtctaaacaagggaaccgtggacaacttcaaagaactttgtctggatctgcagctctatgggcagaaagtgaaaaatcagaatccaaaggaacaagaagggatttcagaagctatgataaaccttggcaattaaatgcaaagaagcctaaaaaatcaaaaagtgaccttgctgtgtctaatatttctccaccatcaccggactccaaatcatgtaaggaagtctcttattcaaatgctattcaaagcatgtaagtttatgttgttaagaaaatgaagaaaaggtattaattgaagcccaacttttcatctgatatttctggcctttaatcttagtgaatttcacttttactccgcatttacattgatcttcattcatacgtatgtatttgcttgcttatattctcaaacatgtgtaattcacttggacccttttgagtataatattccttgaagaatataaactgcatggagtgggtctcttgtttctcatagccaattgtagcattacatcatattgaaagcagtagctacctatatttaatgaagtatgtaaaagcaaattaaatctcttagaatagaagcaaagaagatttctattcaaaacatttcataaaatttcttaaaaaatatttcatctgggattttcctgaagtcctactcattaatttgtgatggaagtccctatattctcttcactactactgtaatatctttgtttttatgttactacaaaggaatgactgaggttgggtattttataaagaaaaaaggtttatttggcttacggttctgcagactgtacaagaagcatgacactagcatctgcttcttgtgagagccgcaggaagcttccactcatggcagaaggtgaaggggtgcacgcatcatatggcgagaggaaggagaaagagatagcagagggaggtgccaggctctttttaacagtcagatcttgtaagaaccaacagagtgagaagtcactccttaccatgaggacagcaccaagccactcatgagggattgacccccataacccaaataccttccaccaggccccacctccgatattggtgatcaaatttaccatgtgatttggagaggacaaatatccaagctataccacctaagtatcccttctctctcaatggcctactgctttggtagctactgggattctccagtgctctgctatccccacatatgtataaacatgtcaaaaatctcaggagcctctagcaaatcacagctattcttggaagaaaagagaacttgcaagctgttcttcttatacatcaattccttgtgcttgttacagggtgaggtgtttgattttagtttcaacagagaaaggagtaggcagaaaatatttatctttgtttgaaaatgtttgaaaaaccactatgtgctaactggaatctgcatctgggtcatttgtgaaagcaactaaatttaactttgtgagcagcttcatttacatagtggtactcataaaaagtattgcattaaccacaccaagttcttgtgagaattatatgaagtgttaacaacttaaaatgttcttcagaaattgtgattgtaaccaaattgtcctgcttcatcagtttggtatatagaattaggtcccaacattttaaaaaatatacaagtttaaaatttgcaggtcttttttacaacagtatagccagtaatatccagcacagtgcctgtttcaattaataaatgctaaatgataaaaatgaataaaggaagaaataaaaaatg

SEQ ID NO: 266 - DNA, 2624 bp, Homo sapiens
cacaaacaggttcccttcgaggagcaggaagggatgagtcactctcatgactgggttgggttaagcaaccggacagagctgttggagaatcacatcaactttgcctcctcgcaagatgagcaaatcactgccattgacaggggcatggatttcgaggaaagtaaatatctcctcagcacaaactcccaaaaaagcatcaatgggcagctgttcaaacctttgggacccatcatcattgatgggaaagatcagaaaagtgagcccccaacatcccctacctcaaaaaggaaaagggtaaaatttaccaccttcaccgccgtctcctcagacgacgagtaccccaccaggaactccatcgtgatgagtagcgaggatgacattaagtgggtctgccaggatctggaccctggggactgcaaagagctgcacaactacatggagaggttacatgaaaatgtgtaagccagacacacacagacattggttctcactcacctttcagcctttaattccaggatgtgtagcaacggtgcccccggaagagaaacaaagcagcaggacaaaataaggatgacactatccatacagcctcagccaatgaccccggctcggcggcgaggcctggagtccgcatcgacgcacacattccagagtacagtgtcttgcttaagaggtttatcatgcatggcaagatttttaagacttgaaacaaaaacgagttctgaatcactgagcgtctgagagcgtccaggaaagaacagcctctctctctcgaatcaaagcaatttggatattgtaaaatccacatggctccaatattcaatattgcagactatggaagaaaagtacaactcaggtggagcatccatggatcgcatccatggatcgcatccatggatcaatgggaggaagcgtgtcatcgaaactggagcagcacatcttgctgtgagcgcgatcacaggcagtccagtgccgccgtcagctgtgggaggcatgattgtgagtcattgtctctcaaaggctgggccagagctgtctcagatcatggacaggccaaggaagtggctgacaaggactgaaagggaacatgtgggctaacaggccacaaatacctttgtaactacatgccaaggacaaacacatggacgcaaatcctctgagcccttcagggtacttctttatttgtaaactaaggatactgggcatagaatttgaatcaggttcaaagaaccacgctcttttgattcatatcaagttcacaatgtatccatttctattcctccactgcattgccatcctccccaaagccgttggtcacctgtgggtgggggagggagagggcagtttgtagtatttgctgggtcttttttctccccctgggttttgtgtcaactcccaagtgacattctgtagagaagctccccccgcaacctgggcatatgtcccacgccgtccgtctttgaagaggctggtctctaggcatgggcggtagtcacggtgaattccataccaggggatatacattcccttgctttactagaaagaaaacagggccacttgggatgggtctttcactgttcatggcagatctcctgtccaaagatgtggcctcgaggctgttgagacaaatcggggtgcctgtgtggaacgtgcagggcgtgtggagttgggggggttctgggtgtgaaagtggtggatccagcaggaagcccagcctcacacacaccggacagcacagaaaccttcttcatcttggaggtgcgaagggataaggggcatcagtgcatgtggtgaagatgcaggtttgcaagcacttggtcctgcagtcagccccgaaaggttcagcattgcttaagaccagccatgactctggatatccctgaatcccttcacttatgaagcctatgaagatgggggcaaggatacatcagagaattcctgcctcatctcacgctcactccaaggtagagaatggtgtgttgggtgattgccagccagataggatcctgcgaaagatggtcgggggcagcgggtggtgggcagaagaggccgtgctgttgaattgatcttctatttttccctctggtcattttctctctctctctgctcttcagttgtctgttttccagtctctctgtgtgtctgtctctgtatctctctcctcctttgaacctatcttctccctgcttcctctccatctcatctctgtaattttgagtgtgtgtctttactccttcttcctctccatagaattgaactctctttagatcatgtgtgtgtaaatttcaccagtttaccctcccaaccttagccctctcccctgcaactgtggtgctcttgagactgaggtttctgcagccagtaagtcacctgctcctgtccgcaagcttacctaccttgtttggttgggtgattaagctgtcaccccttttcaatgagaatcctttgctttcagtaacgtcctcatatttctttccattcttacctgtgtcatgttctgttgaatactgcagccgctgcccgcttccaaatccatctgcgtgtagaatgtattgtagattgtaagaatgtaatatatatttataaacttactgactgtaaatataaagtttgcattcagtggc

SEQ ID NO: 267 - DNA, 2114 bp, Homo sapiens
ctctggctgtgctctctgctgctccaggctggcagcagatcttgaggatgcagcctctggaagctctcagggctcctgagttttggggtgtttgacctccagcctgctcagccccgagtcacctttgagctgtgggggtgccaggtctctcccctgcaaagtggggtgatagtcccatgctggttggggtaagacctggggggagtgagaccaggctcagcctgcaggagagatggagggcagttgtggggtctcaccgatctctgctgggattccagaaaggagctggggactcagcagatggaaagggccctctccgccaggtgctgcgcccaagcagaaccaacccgaggacagaaagatgctggccgggcatgcctggggcctgggttcctcagcctcacctgactcaggtgctgttttccttgctggggagcaggggcccagccggggtcttgaggcagccctgtccccatcagctgcgctcagacctgtccacaggaggctgggctgcctggtcacaggcagtcccgtggagcgggtttcactcttagcctggcgaccgccccgtctgaggtggaggtagagctggtggggtgaggcccacggtgaccccagtgtggaccggctgctgcttcactcatcacggtgcattggtaggtggttgaaaagagagaggcctcgttttcaggatgactgtgtagacacatcacccgtgacacccatgtgtgccccctttctagccctccgatgctcctccccctcctcactccccagcatccctaggcagccctgggctggtggggtgagctgcccagagttggctgacccatcagcctgggtgcaacgctgctgcactcccacacctacatcctgaggcgtggccacctgctgtccatcacccccaacaccccagatccccggatccttctgatggcgacggctctgccggtctgttctggctcatgtgctgtgtgccctggcccgctggcactcagcttacatttgaacctcgtctttagagttaaggtcccacctgtgctgtggaccagacgtgggcctcccagtgagtggggggcatctgataggtgaggctgcttaggaagcctggcacaccctgtccctcagcagggtgggcctgggtaagtctgcccgccgcatgggagggagtgtggagagatgaagagatgagggagcccgagaacgcatggcctcacgtctcaccccaagggaggctctcaacggctgtggagccctcgctactccgtcttcaggcccctgaaggacacaggcaaccgcggacaagacttagttgctcagcggaactcactgcccctaccggtgcctctcactgctgatcttagggtcttggcattccttaggggcctggtgctccatgtgccccgtccttccagctggcacctcgggggttaagcgctggtggctgcacacactcatgctcccggctggggcgcctgcggcaccctgggggttaagtgctggtggccggacacattcacactccatgcccacgtggtttcctgcagctgcctgtaaggtgcagtttaaaaattcaaggcatgggatgattttgtgcagccaccgctcgaagctcagggcgggcacacgcctggtctgtgcagctttgcctggacctcccctgtgtgtgcgccagccgcacattgtggggctgggggctcgggctggcggggatgctggggtgcacatttgagtgctgcagctgcacgggcgggtggtgatgaccgtcacctggccagaaccccctgagaagctccacatactctttttctttttggattcagcagtccctttttcaaaggatttgttgttggctgttgtcttccagatgttcctcttgactccattgtgtgtagccttttaggggaacacgtgcttgttatctggtcttgacattcacttataatttggggctgcagaatgtggcgggaaccaggcacggtgctgcatgcctttgctcccagctacttgggaggctgaggtgggaggatcgcagaaacctaggagttggagaccagcctgggtgacatagtgagaccccatctcaaaaaataaaaaaaatgggatatggtaag

SEQ ID NO: 268 - DNA, 2272 bp, Homo sapiens
aagtcaaaaacttcctgatgtgaaaccctcgcctatcaatcttaggaagaaatcacttacagttaaagtagatgtgaagaaaacagtagatacattcagggttgcttctagctattccacagagagacagatgtcacatgatttggttgctgttggcaggaaaagtgagaactttcatccagtgtttgaacatcttgactcaactcagaatactgaaaacaaacctacaggagaatttgctcaggaaatcataacaataatccatcaagttaaagcaaattattttccatcacctggcattactttacatgagcgtttctcaacaatgcaagatatacacaaggcagatgtaaatgaaattccattgaattcagatccagaaatacacaggagaatagatatgtctttggccgagcttcagagtaaacaagctgtgatctatgaatcggaacagactctgatcaaaataatagatccaaatgacctacgacatgacattgaaagaaggcgaaaagaacggttacagaatgaagatgagcacatttttcacatagctagtgctgcagagagggatgatcagaattccagtttttcaaagggtctcgctctgtcacccagactggagtgtggtgtcacaatcacagcttactgcagcctctacctccaagactcaggctatctcccgcctcggcctcctgagtagctgggactacaggcatgagccaccatgcccagctaagaataaaaattaaaaatatatatattgatatataaaatgagctaggaagccagcttgagagaaacctactttctcaccatcattgactctttctgttttaacatctataaggcctagaatccaggacagctccaagtaccagacagtttttcatctgtttttttgttttgttttgtttgagacagggtctcactctgtcacccaggctggagcgcagtggcactcttttgtacttttcaagcatagagaacagtgactcgctgcaacgtccgcctcccaggttcaggcgattctcctgccttagcctcctgagtagctgggattacaggcgcctgccaccacgcctggctaatttttgtatttttagtggagacggggtttcaccatgttggccgggctggtctcgaactcctgacctcaagcgatcagcttgaggagttctgcctcagtctcccaaagtgctgggattacaggcgtgagctactgcacccaaccacccactcatctgtttactaataaagtagacttggaaggtgtagttttagcatttaattccttttttttccttcacagagcaactttagaggtggcagatgccagcccaattataaatcaggcctggtacagaagagcttgtacattcaggctaagtatcagcgtttacggttcactggcccaaggggatttatcactcataagttcagagaaagattaatgagaaaaaagaaggttagttgaattaaaatgatttaaaaatgtttagtgacttttaaactcctagattatctatgttcattagataaattggtttctcatttaattttaagaaacaacctgggtttttaaatgttcttgttgcatgatagttgaataagatcttcagggagtaatggtaatacagttgtgaggctgtgtaaccttaaaatgcttttaggcattatgccttgaatactttgcatatgttagctgtttgaacttttgactttagaatttctgttgtatggttaatctttgaaatggaaactcaggtaaaggcttttaattgatgtattttaatcttatacaaagtgaattatctgaatgccaaaaatatattgaatatatacaaagggtgcataattgcaaaatacactaactcttttccccattcatatatttttttgttgtggtaaaatatgtataatataaaatttgccattttaaccatttttaagtagcatcaagtacatacagttcagcgacactaatttcattcacagtgctatgcaatcatcaccattatatgttcttttgcaatttatgtttttaattgacaagtaaaaattatatatatttatggtgttcaacatgatgttttgatgtatgtatacattgtggaatggctaaatcaagctatttaaaatacccattacctcacatacttatttttttgtattgagaacacttaaaatctactctgttagcaattttcaggtgtacaatatattgtaattaactgtagtcaccatgatgtataatacatcttttgaacgt

SEQ ID NO: 269 - DNA, 2829 bp, Homo sapiens
tttcacccccaagacaaatagtggcctgccattttccagcccaggtagcttcctgggaaaagttgcttgttttatctttgactcagcctggctagttacattgtcgattatttcttccagatgatatttacctgttaaataatgtttattactctgctgatgaatgttttcagcaacgctggagaaccctaggctgcaaggggttcttcacctgttgactccatcccccacccccagtatggcatatatctctgccgtgctatcatctttattctttcctttttcattgtctcttcctgactgtcctcctttgttcattatgtctgacacatattgtggattgaaagtagaacagaaagatatactttctctaccagactaaaaagttttgagatggccctccatttctcccatgcctcacttcaccttagttgtgtttttatttatttttatattttcgccaccttcactagcgagtacatcccctcactcttgaggtgggcactgatcagtaggaaataagattaatacctggctggtgataatttggggggaagacttaattagatagagatggataatgggatggcagcagacctttccccttgtgacccttcccctcatttccaaaatacacctctagagtagataattgcttaccattaagaagagttaatggaaggtgatactctgattctttggcattggaactacattcaatccgcggtatcctcggattagttctaggacccccttctccataccaaaacctgaggatgctcaagtccctgatagaaaatggtgtcatatttgtatgtgcatattctcttgtataatttaagtgatctctggattacttaatacaatgtaaacaatatgtaaatagttgttatagactgtattttaaaaattttgtattctttataaatttttctgaatattttcaatccatggctggtgaagtcctcggatgcagaccgtgtggatacagagtgccgattttatacaggagttcacctgtaactccctgtacctatcaacagctgactccaaattagaaagaaatagagtaagggagcctcagggagagtcctagcaaaacggattcgattaaacttcagttccttgtatagtttctttagttgtttatggtccattttctattttagcatttattattctatgtagtctatccaaagacgattaagggagttccacatgttttccggaacattttgaaaagagagcttatccagtgtacagatcctaataaagtgcacattcagtgtaattttatttttttaatatcttttttaatcctatttttcttcctcttttgctcagtaaattttgtatgaaactttaaaaggacttatggcatgtaaacattatttataaagtaagtcatggttataattatttttctcctgcctccttatgtatttatttcagaaatgagccgtcagactgctacagcattacctaccggtacctcgaagtgtccaccatcccagagggtgcctgccctgactggcacaactgcatccaacaatgacttggcgagtctttttgagtgtccagtctgctttgactatgtgttaccgcccattcttcaatgtcagagtggccatcttgtttgtagcaactgtcgcccaaagctcacatgttgtccaacttgccggggccctttgggatccattcgcaacttggctatggagaaagtggctaattcagtacttttcccctgtaaatatgcgtcttctggatgtgaaataactctgccacacacagaaaaagcagaccatgaagagctctgtgagtttaggccttattcctgtccgtgccctggtgcttcctgtaaatggcaaggctctctggatgctgtaatgccccatctgatgcatcagcataagtccattacaaccctacagggagaggatatagtttttcttgctacagacattaatcttcctggtgctgttgactgggtgatgatgcagtcctgttttggctttcacttcatgttagtcttagagaaacaggaaaaatacgatggtcaccagcagttcttcgcaatcgtacagctgataggaacacgcaagcaagctgaaaattttgcttaccgacttgagctaaatggtcataggcgacgattgacttgggaagcgactcctcgatctattcatgaaggaattgcaacagccattatgaatagcgactgtctagtctttgccaccagcattgcacagctttttgcagaaaatggcaatttaggcatcaatgtaactatttccatgtgttgaaatggcaatcaaacattttctggccagtgtttaaaacttcagtttcacagaaaataaggcacccatctgtctgccaacctaaaactctttcggtaggtggaagctagacacatgaaggtaaataaaaagaaaggctgttaaatacaggaaacagttgcatgtagtaacactaatatatttaaaaataagtcaacagtaaaccactgaaaaaatatatgtatatacacccaagatgggcatcttttgtattaagaaaggaagcattgtaaaataattctgagttttgtgtttgttgtagattgattgtattgttgaaaaagtttgtttttgcgtgggagtgtgtgcctgcgtgggtgtgtgcgtgtttgggtttttttcctttaactgacaagccatcttgagtggtcatgggccactgcttttccctttgtgagtcaatacatagtgctgctgtgtgctttttttgtgtgtatttgctaatttttattaattttagtttttcattaaataaatttgacttttctgt

SEQ ID NO: 270 - DNA, 2738 bp, Homo sapiens
actccggcttctgtgatgtcagcgccggaacctggaatcccggctccgcgagggaaggccggggaggcggcggcggcggcggcggctggagagggtcctcggcagcctctgaggagcgcggggcgcggccatgagcgagtccagcggcagtgcgctccagcccggcaggcccagccggcagccggcggtccatccagagaacctctctctagactccagttgcttctcttctccacctgtgaacttcctccaagaattgccaagctaccggtccattgcacgtaggagaacgactgtccattcccgggacaagcaaagcggaactttgctaaagccaaccgactcttacagctcccagctggaggacagaatcgctgaaaacctcagcagccattctcttcgaaattatgcactgaacatctctgagaagcggagactaagggacattcaagagacacaaatgaagtatctctccgaatgggaccagtggaagcggtatagcagcaagtcttggaagaggttcctagagaaggctcgagagatgacgacccacctggagctgtggcgggaggacatccgcagcatagaagggaaatttggcactgggattcagtcctatttctccttcttgagattcctggtgttgctgaatttggtgatatttctgatcatctttatgctggttttgctcccagtcttactcacgaaatacaagatcaccaacagcagcttcgtgctcattcctttcaaagacatggataaacaatgtacagtctatccagtaagcagttctggactcatttacttttacagttatatcatagacttgctttctggcactggtttcctggaggaaactagcctcttttacggacattacaccattgatgaggtgaaatttcagaacttcacctatgatctgcccctggcgtatttgttaagcacaatcgcctccctggccctgagccttctttggatagtgaaaaggtcggtggaaggattcaaaatcaacctgattcggagtgaggagcactttcagagttactgcaacaagatatttgccggctgggacttctgcatcactaaccgcagcatggcggatctgaagcacagcagcttgcggtacgagctccgagcagatctggaggaagaaagaatgcggcagaaaatagcagaaaggacctcagaagaaacaatacgcatttactctttgagactgtttttgaactgtattgttctggctgttttaggggcatgcttttatgcaatatacgtagcaactgtcttctcgcaagagcacatgaaaaaggaaatcgacaagatggtttttggagagaacctcttcatattgtatctaccgtctattgtgatcacgctggccaattttatcaccccaatgatctttgccaagatcatccgctatgaggattattctccaggctttgagatccgtctgacaatccttaggtgtgtctttatgcggctggccaccatatgtgtcctggtgttcacgctgggctccaagatcacatcctgtgatgatgacacatgtgacctttgcggctacaaccagaaactctacccgtgctgggagacccaagttgggcaggaaatgtacaagctgatgatcttcgacttcatcatcatcttggctgtgacactcttcgtggattttcctagaaagctcctggtgacctactgttcctcttgcaagctgattcagtgctgggggcagcaggagtttgccattcctgataacgtcctggggatagtttacgggcaaaccatctgctggatcggagcctttttctcaccccttctccctgcaattgcaaccctgaaattcattatcatcttctatgtgaaagagtggagtctgctttacacccgcagaccctcccccaggccgttcagagcatccaattctaatttcttcttcctgttggtgttgttgatcgggctgtgtttggcaataatacctctgacaatcagcatatcacgcatcccttcctcgaaagcctgtgggccgttcaccaacttcaacaccacctgggaggtcatccccaagacagtgagcaccttccccagctcgctgcagtccttcatccatggtgtcacatccgaagcctttgcagttcctttcttcatgattatttgcctcatcatgttttacttcattgccttagctggagcacacaaacgggtggtcatccagctccgagagcagctatccctggtaaggaagcatagctccagagggtcatggctggggacatttacccaggacactgcaaggaaagtgctgttttcctgggagggagtgaaattactgcagccttctctcaccaccacctccccaaaactctgccttgaggcccagccgcgtccggcttcattaattcactgattcatccattccttcaagatgtgtattaagggggatgtggtggctcatgcctgtaatcccagcacttttgggaggccgaggcaggcagattacttgagctcaggagttcaggaccagcctggccaacatggtgaaaccccgtctctactaaaaatacaaaaagtagttgggcgtggtggtgggcacctgtggtcccagctacttgggaggctgaggcgggagaatcccttgaactcaggaggtggaggtcgcagtgagctgagattgcgctattgcactccagcctgggtgacagagtgagactccatcttaaaaataaaaataaaaaaag

SEQ ID NO: 271 - DNA, 2140 bp, Homo sapiens
agcgtccttgtttgtgtggtgccgccgccgccggtgcagccgtcgccgccgccgctgcccccgtctgtaccgcagtgtctgctccgcccgcccgccccggtccggcccgcccccctcccctacccccgtccctagtcccgtcagcagggtctggatcccctgtgccgtcgcctcttcctttttcgacgcctccgccgccgcctgaggaggcgagctagccgggagttacaccgccaccgccaggatggatagaatgacagaagatgctcttcgcttgaatctgttgaagcggagcttggacccagcagatgagcgagatgatgtcctggcaaagcgactcaaaatggaggggcatgaggccatggaacgtctgaaaatgttggcattgctcaaaaggaaggatttggcaaatcttgaggtgccacatgagttacccaccaaacaggatggcagtggtgtcaagggctatgaagaaaaacttaacgggaatctcaggcctcatggagacaacaggactgctggaaggccaggcaaagaaaacatcaatgatgagcctgtggatatgagtgctagacggagtgagccagagcgaggaaggctaactccctcaccagacatcattgttttgtctgacaatgaggcttccagtccccgttccagttccagaatggaagaaagactcaaagcagccaacttagagatgtttaaggggaaaggcattgaggagcggcagcagcttatcaagcagctgagggatgagctacgattggaagaagcccgactggtcctgttaaagaaactgagacagagtcagctacagaaagagaatgtggtccggaagactccagttgtacagaatgcagcatctattgttcagccatctcctgcccatgtgggacagcagggcctatctaagcttccctctcggcctggggcccaaggggttgagcctcaaaatttgagaacattacagggtcacagtgtcatccgttcagctaccaataccacccttccacacatgttgatgtctcaacgtgttattgcaccaaacccagcccagctacagggtcagcggggcccgcctaagcctggccttgtacgcaccacaacacccaacatgaatcccgccatcaattatcaaccgcagtcaagttcttctgttccatgtcagcgtacaacatcctctgccatctatatgaaccttgcttctcatatccagccaggggcggtgaacagagtgtcctcgccacttcctagccccagcgccatgactgatgctgccaactcacaggctgcagccaaattggctcttcgcaaacagctggaaaagacactcctggagatcccaccccctaaacctcctgctcccttacttcatttcttgcctagtgcagccaatagcgagttcatctacatggtaggcttggaagaagtcgtacagagtgtcattgacagccaaggcaaaagctgtgcctcacttctgcgggttgaaccctttgtatgtgcccagtgccgcacagatttcacccctcactggaagcaagaaaagaatggtaagattctatgtgagcagtgtatgacctccaaccagaaaaaggctctaaaagctgaacacaccaaccggctgaaaaatgcatttgtgaaagccctacagcaggaacaggaaattgaacagcgattacagcagcaggcagccctctcccccactacggctccagctgtgtccagtgtcagtaaacaagagaccatcatgagacatcatacgcttcggcaggctccacagccccagagcagcctccagcgtggcatacccacatctgcccgctccatgctttcaaactttgcacaggcaccccagttgtctgtgccaggtggcctccttggtatgccaggtgtcaacattgcatacttgaatactggcatcggaggacacaaaggccccagtttggcagaccgacagcgtgaataccttttagacatgatccctccccggtctatatcgcagtccatcagtggacagaaataacgcctgttccacttgtactgccccatccttgaatcctttatccctttcctctttcattcccccaacttctgtcgcatgcagtgcctgtactggtgcctaccatacacggaaacc

SEQ ID NO: 272 - DNA, 2666 bp, Homo sapiens
tttaatgagagaattgtcaaatttggaaagatttattgagccttaggttacatggacagttaagcttaagtaaactgtatattgattatcaaacacaagctgtaattggaaaagttgagaggaaaagcatgagatcacaaattagggggaaaaaagaaaagggatttttaaatttggtgtattaaattcattgtccaagggggaaaatgaataatgtttcattagattccttatatgcaaaagtatttattttgaacatgtgtcctaaaatatatgcactaactgatgtgattaaaattgtccaagaaataaacttgagcataacatactttgtgtgcaccacagtaagctattctgcattgaagtggtcttttataactaaggcctggactttgctccaacagagtcgtggtcttctgaatagtgacttaaggagttttgtttgcttaagtcagataatagcacattcacagggaaacaaagagagttggtggatagaattttctgactattaatttttcttccatgaaattttattatgcctttggcactttctgccactcttacagcatatcacaagatatctgtttagcagaagattatgtagttactttaattttaatataaaagtagcttgtgatacattaccaagagatctctgattctttagtaagtttgagaacacctattctacagagatgataggtacttagaaatgaagactttaaagtacattttaatctaatataggccagtaattgggggaaggggctttgagcagtacaattttaagatgattttgagggttgtatttctttatcatttaaaaatatcctaaagtcagtaatttatatgaaggaaactcattcattattgaaggtattaaaaatagccatcatctgtattaggtagcagttttggaggatcatctttttcttttgctataaagccctattaatgaagaatacttccagtagagttaatagctgtagcttacctagtgtgttaatgaagtgtgtttatttatgtgacttgataccagtagtcataatagagactgaagaggtatgcgttaagcacgcctacttctatgcagtaaacaggctgcagctgcctagattagattcttagaaatgtcatattttgaattgttttatttcttgtaggggaagctttgtcccacttcattcatttgcatgccataggaattacatattggttatcattacgtatctaacaagattcagaaacaaaaatcttggacttttcacatccgaaatatgtcagctcttaataaatgtgtggtgcttaagtctacatatggcatccatagttgatctagagtatggatatgagtgtgttgaccagttatcagtaggtggacaaatatttgggcatctacagatgagactatgcactaagtgtggactgagtcctaaagaagcttatagtcaggtgttgtttaaaacattatcagaattcttaaacccaaggaatttaattttatttggtatttcttaagcctaaaatgaaccaagagaaagatgattttagaaagtacttgtagtgaaagatgattttagaaagtacttgtagtgcatgtgtggcttctgacttttgggatggcaccattttataatagtttcaaaatttagcttttgaaattctcaacattttatggtagaagactttggacctcaagtataaaattatacgtttataatttttttaaaatttaaattataagtattgtgaattcacactctcaggctattgtctgacttgatctacgtctcataaagcctgtacctgagtggagtggaaggtggagtcttaggttaatcagttactgactctaccctcaccctctttcaattgaggtaaactttgctgtttttctttttcataaagcattctcaaattgttgagtttattgctgaaaaaaatctccatgactttacagatagaattacaaactaaatgatgtcttgtatttagaagcagagtacagacctaacgaactgttagattctccaccatcacttagggtttgcccagaagcaacaccagagaattacagacaacgcgcttttgctgaactgtccattttggtggttgtgtttttcagtcaaatataagcaggatgggcgatagagatatatttatatatagatacatattctatatatctaatgcctaaatatgggtattaaagggaaaatttttaaagtctgattaaatccaatatgacatgaaattaaatatatggattagtaaggaaaaatgttaaaaagtagagaggataccaagaagattaaactggactagccttatttgcaagtgaaggatctggtgctgctttcagatgtttatcttttatttttttcccttaagctttaatcttcgtcattgtcttaaagtcaactggtgtttcttgttcattgactttggtacgatggtgctttgcaaggatgtatttatgttataatggccaacatttggtcagcccttgtccacttattcacttccctccttttgtaaaataagtgctttaattataaactgtataaaaataccttgtataaaccccttttttgattattacaataaataagctgaattgtaacaaatgaaatttgatttttgtaataaaacagtggaaaagt

SEQ ID NO: 273 - DNA, 2595 bp, Homo sapiens
aaagggtggggggcgggggtagggggagccaatcccggcagcgccaaagaggggaggaggcggtgacagccgcggggagggggcgggaggagagaggcagctcggctcggctccgcgctcagctccgctctgcctccggctctgcgctcacctgctgcctagtgttccctctcctgctccaggacctccgggtagacctcagaccccgggcccattcccagactcagcctcagcccggacttccccagccccgacagcacagtaggccgccagggggcgccgtgtgagcgccccctcccacggcccgggcgggagcggggcgccgggggccatgcggggccagggccgcaaggagagtttgtccgattcccgagacctggacggctcctacgaccagctcacgggccaccctccagggcccactaaaaaagcgctgaagcagcgattcctcaagctgctgccgtgctgcgggccccaagccctgccctcagtcagtgaaattggccgggtcttccgctttctcggtgacagttcgctcccttcagcattagccgccccagcctccctccgcccccacagaccccgcctgctggacccagacagcgtggacgatgaatttgaattgtccaccgtgtgtcaccggcctgagggtctggagcagctgcaggagcaaaccaaattcacgcgcaaggagttgcaggtcctgtaccggggcttcaagaactcttccctcccatcacatgagccacgtggaatgtcccagcggaattgtcaatgaggagaacttcaagcagatttactcccagttctttcctcaaggagactccagcacctatgccacttttctcttcaatgcctttgacaccaaccatgatggctcggtcagttttgaggactttgtggctggtttgtccgtgattcttcggggaactgtagatgacaggcttaattgggccttcaacctgtatgaccttaacaaggacggctgcatcaccaaggaggaaatgcttgacatcatgaagtccatctatgacatgatgggcaagtacacgtaccctgcactccgggaggaggccccaagggaacacgtggagagcttcttccagaagatggacagaaacaaggatggtgtggtgaccattgaggaattcattgagtcttgtcaaaaggatgagaacatcatgaggtccatgcagctctttgacaatgtcatctagcccccaggagagggggtcagtgtttcctgaggggaccatgctctaaccctagtccaggcggacctcacccttctcttcccaggtctatcctcatcctacgcctccctgggggctggagggatccaagagcttggggattcagtagtccagatctctggagctgaaggggccagagagtgggcagagtgcatctcggggggtgttcccaactcccaccagctctcacccccttcctgcctgacacccagtgttgagagtgcccctcctgtaggaattgagcggttccccacctcctacccctactctagaaacacactagacagatgtctcctgctatggtgcttcccccatccctgacctcataaacatttcccctaagactcccctctcagagagaatgctccattcttggcactggctggcttctcagaccagccattgagagccctgtgggagggggacaagaatgtatagggagaaatcttgggcctgagtcaatggataggtcctaggaggtggctggggttgagaatagaagggcctggacagattatgattgctcaggcataccaggttatagctccaagttccacaggtctgctaccacaggccatcaaaatataagtttccaggctttgcagaagaccttgtctccttagaaatgccccagaaattttccacaccctcctcggtatccatggagagcctggggccagatatctggctcatctctggcattgcttcctctccttccttcctgcatgtgttggtggtggttgtggtgggggaatgtggatgggggatgtcctggctgatgcctgccaaaatttcatcccaccctccttgcttatcgtccctgttttgagggctgtgacttgagtttttgtttcccatgttctctatagacttgggaccttcctgaacttggggcctatcactccccacagtggatgccttagaagggagagggaaggagggaggcaggcatagcatctgaacccagtgtgggggcattcactagaatcttcaatcaacctgggctctccccaccccaccccagataacctcctcagttccctagggtctcttcttgcttgactcaatctacccagagatgccccttagcacacctagagggcagggaccataggacccaggttccaaccccattgtcagcaccccagccatgcggccaccccttagcacacctgctcgtcccatttagcttaccctcccagttggccagaatctgaggggagagcccccagagagcccccttccccatcagaagactgttgactgctttgtattttgggctcttctatatattttgtaaagtaagaaatataccagatctaataaaacacaatggctatgc

SEQ ID NO: 274 - DNA, 2880 bp, Homo sapiens
gaggggcccgcgtccccgcccgccctgggcgccgcgcctggcactgatcctgccggtcgcccactgtcgccgccgccgccgcccgcgggcaccatgacagctctgagcgctggggttacagactgtggttttgtgcttgctcaccaaagctaacctcagcatgctcaaaaggaagcagagttccagggtggaagcccagccagtcactgactttggtcctgatgagtctctgtcggataatgctgacatcctctggattaacaaaccatgggttcactctttgctgcgcatctgtgccatcatcagcgtcatttctgtttgtatgaatacgccaatgaccttcgagcactatcctccacttcagtatgtgaccttcactttggatacattattgatgtttctctacacggcagagatgatagcaaaaatgcacatccggggcattgtcaagggggatagttcctatgtgaaagatcgctggtgtgtttttgatggatttatggtcttttgcctttgggtttctttggtgctacaggtgtttgaaattgctgatatagttgatcagatgtcaccttggggcatgttgcggattccacggccactgattatgatccgagcattccggatttatttccgatttgaactgccaaggaccagaattacaaatattttaaagcgatcgggagaacaaatatggagtgtttccatttttctacttttctttctacttctttatggaattttaggagttcagatgtttggaacatttacttatcactgtgttgtaaatgacacaaagccagggaatgtaacctggaatagtttagctattccagacacacactgctcaccagagctagaagaaggctaccagtgcccacctggatttaaatgcatggaccttgaagatctgggacttagcaggcaagagctgggctacagtgggtttaatgagataggaactagtatattcaccgtctatgaggccgcctcacaggaaggctgggtgttcctcatgtacagagcaattgacagctttccccgttggcgttcctacttctatttcatcactctcattttcttcctcgcctggcttgtgaagaacgtgtttattgctgttatcattgaaacatttgcagaaatcagagtacagtttcaacaaatgtggggatcgagaagcagcactacctcaacagccaccacccagatgtttcatgaagatgctgctggaggttggcagctggtagctgtggatgtcaacaagccccagggacgcgccccagcctgcctccagaaaatgatgcggtcatccgttttccacatgttcatcctgagcatggtgaccgtggacgtgatcgtggcggctagcaactactacaaaggagaaaacttcaggaggcagtacgacgagttctacctggcggaggtggcttttacagtactttttgatttggaagcacttctgaagatatggtgtttgggatttactggatatattagctcatctctccacaaattcgaactactactcgtaattggaactactcttcatgtatacccagatctttatcattcacaattcacgtactttcaggttctccgagtagttcggctgattaagatttcacctgcattagaagactttgtgtacaagatatttggtcctggaaaaaagcttgggagtttggttgtatttactgccagcctcttgattgttatgtcagcaattagtttgcagatgttctgctttgttgaagaactggacagatttactacgtttccgagggcatttatgtccatgttccagatcctcacccaggaaggatgggtggacgtaatggaccaaactctaaatgctgtgggacatatgtgggcacccgtggttgccatctatttcattctctatcatctttttgccactctgcctccctctcttatccgtgacctctgtggcactcaagacgcctgtccatcctgccttcctctccagcctccaaaccctctgcctggaagccagactctggccagacttactcaccaggccctcaccacaccacctggaatgcgttcctcacagctcttttccaaaatcagtcttctccttggcatctgcgtggcttgggagagcatccttggctctctgtcattgtctcacaatcttcaataagtagtgttcggaaagtgcccccctggcccatgtgcccagatgggctctccaagtctaaaggcttcaaaatggtacagaactaaatgtgtgaatttatgatggggcttcatttctggtcctccttcttcacacttgcgtggccgcccttcccatccactctccaattttctttcacgtttctgctttctgagaagaaataagactgatttctgggatggagcatgagagagacagatgcagagagagagagacaaagcttgtttccgtgggagatgcccacacacctcacttgggagcatcggcagtgttggtacccacacaggtgtgttttgacatccaagacttgaccctaattcttcttggaacctgatggggagagaaccttgctgggggccccacatgggccaggggcagccagggcagagttgggcagctgcctgagagttctcggtggagaggcccggaatatcccacaagaacaagtctccgttagttccaagtggaatgacagccctttctgagtttccctgagttgagagctaatacatgtgttgtgggaacaacagcccaagccaaaggccacgcggaggccaggcgtggtgactcacacctgtaatcctagcactttgggaggccaagatccacggatctcatgagctcaggagttcaagaccagcctggtcaaccttgtctctacaaaaaatacaaaaaag

SEQ ID NO: 275 - DNA, 1933 bp, Homo sapiens
tattttgatgcttaaactttaaacatttatatttaccatttgccacccacaaaggtcaggtttgttatttgttgtttgataattatattaattttcttggaaagatcctcttttcaaggtactggtaaattggtgagtatttttattagtaaagcatgaaatagtatggtaataaatgataagacatgtatttgtggaaagctgtagggtattcagtttaccctggctttcctttaagcagagggcatctttttctctcctacagtcacaaaatgtgttatcattaaaaaaaatcaaattaaagccaaaagtaggtacataaaaaccacacacatgcatgcacacaaacatcactgcagcccacagcagacccagccgttgttaccatgaagtgacaccactccaggcctctcttgtctgcaggctggcaggctgtcttctctccagttgccttcgtcttgcgcctgcctttgcattccttgcgacgggctttcttgtttctgcggtttggattccagccaaggctgtttgtatctcactactgtttatgtgtttgtggttctgtgatggtgttgctttgatcctcagtttattttcttacccatgtttttcttgtttccttctcaggatgattttatcatctcatctttgaagtgttgttttccgaaattcatcgtattcctgaaatttcttcttagctgtcttagtgcagtttgtttcttggatttgtattctctggcatgctcttttcctctctctcatttttctgtagtatgcctgccctcctaccctgctatttctttacatctctctcatgcttaacatggatagctgtgtccagatcttctgtctgctcatccatgtgactcagagaggagggttctgggcaggggggccttgccggactgcatgagaggacatgagttttgctttctctgctctaatattttgcttaagccaagaatccttttcttagagatgttctatatgattcctgtcaggattttctagttttttttggattatagcttgttcatttcttttgtttttagtttggtttatatataatgagggaagaagatgattacattatttttgtcactttgccatcattgtttagaagtcatagaaagaatttttaaataggccaataagtcttaaacttgagtacttggcttagaagaaagtcaaaactccttcctttttgactaagtggtttgtttctggggagctcttaatttctatttttataatcattagcctataaggaaattgtgtcttccttgttctcagggtgatctgctgaccttgttcactcatgaagcatttgggtatcatacttatagtgtctgaaacataaactgtattgagctagacaaggtatagcctcctcttcaagtagcaaatactatcaaaagctataatgcagtaggagcaaggtggtccttgttccagtttttgtctcagttctgctgctgatgtaccatgatcttgggaaggtggtgtctcagtgtggagatctgacacattgttaccgtgcctcctggctggagggacttggagaacaatgcagttaagtagaatggttttaacaatacagagaaatttattcatttagataaaaatctgatttttagaactttaaaagctttgtacagtgtaaatagatttaatgtatttaacatgctttatcagcacaaataaaggattttaaaattttgtcaaaaaattaaatgttaatactatcaccattaaaaatgttcaagcaatagtctgcctccccacccccacaccatcttgcacctgttccacagctaagtacagccctaggtttggtgtgtattctccatgcatttagagaatcacatgacacagactgctgctataatgtcattttcccattcttcctttactaataaaatttttgagtttt

SEQ ID NO: 276 - DNA, 2376 bp, Homo sapiens
acaggaagctgaaatgcatattgctagatagaagaaccaatccgaaaaggctactttctctatgattccaactacgtgactttctggaaaaggcaaaactatggagatggtaaaaagagaaaaggatttctgctttcaaatccgctgtttcctgaggctgggtgctgagttcagctgcccctggaggagcagcagctctgggccgctggcagggccgcatcctcttcagtctggacaaattccctgcagccaggggaagtggcccatgcctgctgtcctggtatgcaacatcggacctgcatgctggaatttgacccttttcctgcctgacacccagcaaaataaaccccagggaagggatcaatgcctgcaaccggaatccagaagaaagaggagtgacagataagccctgggtcagaggccagtgaggtcaggacctcccagggacggacacacagcccaaggtttgggtgtgagatttcagagccccaggtaataaaaataaaagagttaaggtgcctagcagctcagtccctcacagtgctacctggggcaaggatggaaattcacctcagtttgctgtggttgctattggctgaatcatgtcctcccaaaattcatatgttggagtgtacctcgggatgtggtatctcaggatacctcagtacctcgggatgtggcgttgtttggagaaagggtcgctagagaggtaattaagttaaaatgaggccatgagggtgggcccaaatccaatttaattggcatccttctaaaaaggggaaatttggacacagagagagacacaaacagggagggcgccctgggaacaggaaggcggccacctccaagccaaggaggtcctggagcagatcctcgtctcagagctccagcgggaaccacccctgcccaaccttcattttgaacttctggcctccagagctgtgagacgatacacttctgtggtttaagccgtgtaacctgtggcacttggttatagcagccccaggaagcccaacacagtggccaaaacagagaggacagctggcttgctaacgtcgcacagcacactgacgagcagggtcttcaactcactactcaggaacccagtagtcaggggtgagggggaatgcccttccaatatggctagagccagactgtctgggcccaatccccagctttgtatgtattacctaacctctctgtgcctcagtttaccaagctataaaatgggcataatgacagcacctgcctggtgatgctcttggagggatgaaaggaggcaacggtgtgggcatctggacggcaccaggcattgccctgagagctgcccatgcggggaatgctccatccttacgccagccaggtgttgccacccctctcttgctgatggagaccaggagggtcgggacagaaggccttgcccaaggtctcacagccaggagcctgcctccactggtccctgtgtggccagtgctgccctgggggctgctgctgtgcactggagggtcagctgcatggaggagccagaggagatggtgccgaggacagagcttgcggccctgtacctggctcccagaggaatgggtcttggagctgctctgcacagacactgaccttgaggagagacaggggcgccactccctcctccactcgctcaggtgagcattcaaagcgtcataggtaaccaggagcactagttggcatggcgatttcagaggtgagtccaatgtggaccctggccctgggaaggtcacagtttgatggaagatgccagactcacacattcactcactcactcattccctcgtgtattcattccgcaaagcttcactcattacctacctggggccaggactcagtctcagagccaaggagagcgtggttgggaggagactcagacgctttccagcatccctgcccccaggtgtctacacacctgtgtactccccaacttggagtgtggcagggctgcaaagagggtggatgtgctcccgtggtgaggttactttatatcgcaaaggtgccggacttctgcaggtgtaattaaggtcctaaccagctgaccttgagttaatcaaaatggagatgatcctgggtgggcccaagctaatcaggtgagccctttcaaaatggccttgaagtcagagactctcctgcaggatttggagatccagccccatgaggaacaggggcaaggaaatgcaatcttccacaaccgagagagcttggaagagggtcccaaacctcagaggagaccccagctccggttggcaccttgactgcagccccatgagacagaagacccagctatgccatgtcctggctcctgacctgcccaaactttaagacaatagataaatgccattttaagctttt

SEQ ID NO: 277 - DNA, 2007 bp, Homo sapiens
ttccttgtgatcacacccctgccccttccttgtgatcacacccctgccccttccttgtgaaagacctcagcggggaaacgctccgggccacgcccactccccttatcccaattccgcgtgctggtcccgcacacggtcatccggtttctgtcctgtggtctccagtcctggggcaccctagaggcagagcaggggattccatcaaaggacccactgagaccccagcatggccctgcccgagatgccctgctgcccacggagtcctggcttcccctggtgtggccgggcagggccgagatcgcaggagggggctgccctgacctttcccagtgttcaatgtgtgtgtcttgcgttctactccgggggtggcggcggcaggtctgtccccagcattctcgctctgggcagaaccctcgggaccctccgctgtcgtgtgtctgagccacccctgcagcttcacagggcccctgcacacctctgcccactcagtgtgccctgtcagccctgtccttgtcgtagccccagccctgcagggctgagagcaccacagatgctgggggctgctctggactttggggatggctgtcagcctcagagggccaatggggggctttcacgggcccaaggcttgggaaaatgcccagacatcctttagtgaagactcgacttccaaaaccagccaccgctgggactggattccactccagtataggcacttagcaacacgaaggtttattccaaaaagaaaaggggctgacagacgggagattctcatggacaaaatccctttccctttttctcgtctccatgaacatctgggtaccaagccctgactcaaaggacagatgtggatgacagcaagacttctgtgaaagcaagtggcccgtccctaggtgggagggagtccagagggtcatgggtgtgaaactgtgcacagctttccctccctccctcttcctccttgtctgtgacacatgtgcacccacacacacacacacaaacacatgtgcatatcacacacatgcacacacacaaacacatgtgcatatcacacacgagcacacacccaaacacgtgcatatcacacacatgcacacacacaaacacgtgcatatcacacacatgcacacaaacgtgcatatcacacacatgcacacacacccaaacacgtgcatatcacacacacgcacacacacaaacacgtgcatatcacacacaaacacacgtgcacacatacttaacacacacttgcacctgctatgcacatgtgcacacacacgtagtagtgtgttttccagccacccacacactgggtttgcattggagattgtttcaccctgcaaacgtcaacgtcagcagactcgtcggtgcgctgtgctatccggttgggaggtctcaccaggagcagagcctccctaacgtgcacctccgagaagaggggtgtcggggagtgttcccagcacctgctcggtggaagggctctccggagactggcactcagtatctgagtatgaggagcctcacttcccggggtgtcggtaaacttgaccgtgactcagtaacccacagcgtgctcctcccagcaaaccccgtgtgtccttacaggtcgaccagacgggccgtcggaggaccaccaggtggctctgcctctgcctcaccttctcacctgcttccatagctgatgtgaacccgaatccccacgctgtgctgtgtacgcactgtaggtgcagaaccgtccacacaaaaatacagtcttggcattgtttgttctttgtgaggctggttaatagcatccccgtgtgtttttctcaccctcgatggggtagaggggcacctgaatgtgtggcccccgtctgtgtcctggatcctggggcagggctgctctccctggcccctgcagcccctcatgaactttccaccctcagtgcccccggctgagcagagaggcgtcccaccattcaaccaaagaaagtcaacattgaacattaaacctctgtgtgtttctag

SEQ ID NO: 278 - DNA, 2437 bp, Homo sapiens
gcttccgtagaggccagctggttgctacgcagcaacaggaaacattccgcgctaccgagtactttctactcccgaccaggcattgctctctctggagaccctcggcggtggttgctgtattttgacttggagtaaggatgacttttcgggccacagatagtgaatttgacctgacaaatattgaagagtatgccgaaaattctgcactttcaagactgaataatataaaagccaaacaaagagtgagttatgtgacatccacagaaaatgaatctgatacacaaatcctaacgtttaggcacattacaaaagctcaggagaagacaagaaaacgacagcagcctataaaactagagcctttgccagtgctaaaagtctaccaagatcataagcagccagaatacatacatgaacagaaccgatttcagttaatgactgcaggaatcattaaacgtccagtaagcatagcaaaaaaaagttttgccacatcatctactcagtttcttgagcatcaagatgctgtgaaaaaaatgcagattatcataaagtgcagagcagtggaagtttcattaatacaccacatgagttgcccacttatggagactctgagaaaatgacatatacagaacaggccagcaaaaggcattattgcatgaggctgacgtgctttattcgtctaaacgactatctaattgagaacacaatgcacatcttaacggtaaatgctgttaattcgcttttgaaccatctcactgacaagctaaaacgaacaccttcagcagatgtcattcagaaatggattactgaagagaagcctgaagtccctgataaaaaggggacccttatggtggaaaagcaagaagaagatgaatctctcatccccatgtttctcacagaactaatgttgacagtccagtcactgctctttgagccttctctggaagactttctggatggtattttgggtgcagttaatcactgtcaaaacactgtgttatcagttcctaatctcgtgcctgattcgtattttgatgctttcaccagcccttatattaacaacaaacttgaaggaaaaacctgtggaactgggccaagtttagcagcagtatttgaggatgataagaattttcacacaattatttctcaaataaaggaaaccattcaggcagcatttgaatcagcccgcatctatgcagctacctttgaaaagttccagatattcttcaaggaaaatgaaagtcttgatttacaagctcttaaacttcaggaacctgatattaacttttttagtgaacaactggaaaaatatcacaaacagcacaaggacgcagtagcgctcagacccaccagaaatgtaggattgctgctcattgatactaggcttctaagagaaaaattaattccatcacctttgcgatgcttagaggtgctaaattttatgcttcctcgtcaaagcaagaaaaaagtggatgccattatctttgaggcacaagatgcagagtataaacttgagtttgttccaactactaccacagaatatgttcatagcttattatttcttgatgaaattcaggaacggattgaaagccttgaagatgaggggaatatagtgactcaaatgtacaagcttatggaacaatatcaggtgcccacacctcctgaagactttgctgtttttgcaactatgaagccatccattgttgctgttcggaatgccattgataaatcagtgggtgatagagaatcaagcattaagcaattttgtgtgcatttgggtagtgatcttgaagaattaaacaacgaagtgaatgaagtaaaactgcaagcacaggtaagctaaatcattattttgtaaaaataatctatgcaaagttttactattacatttgtttattaaagtataatcaacagataaaaattgtatatatttacaatatataatgtgatgttttgatatacgtatacattgtgaaattgttaatcaagctaattaatgtgtccatcacgtcacatacatcattttttgtggtgagaataattaagactactcttcaaaccatttagagaacacatttaactgatgtagctttagttttttatagtatcattctaaccaatcaacaatgtctttgagctgctacacttaaaaattaatgtttcaaaatctctgtttaagtagtgaatacatttcagactatcacaaagcatatatgtaatattaaaattgaatttagccaattaaattctagtcctaacttgtatttattattttgaagagtgttttaatgacttgctagcacattttacagctattgtcacaattttaaagtttgcttaatacctgggtgatgaaataattcatacaacaaacccccatgacacaagtttacctgtataacaaacctgcacatgtatccctgaacttaaaataaaagct

SEQ ID NO: 279 - DNA, 2052 bp, Homo sapiens
tttgtcaactgactttgggtatgttcagccaatgaaagttaccagcagaagactggcagatgggaggagggaagaagccaggatttatttccctctgaagctcagccaggggctcccttcaggtggccccctctgtggttctggctcctgcagggtgatcctagcctcttggcatcagagcaccattcacttcctttatctctccagtcttaagagtagtagtgacttccggctgttgctcatctttggattgcctcatcatcccccatttggtcattcaattctttccctgtatcaaatttcccttgtctgaaatacctagggtaatttctgttttgctgactggttgttaactgacgtatactctatagtccactctctacacaggggctgaagtggatcccgctaaaaacaaagcagatgggggcatgacccagctctcatccctccaagagcttcccatcatcagaatagatgagaatagaatctcagctcctctggaactaaaaaaaaaaaaggcagataaaagggagctaggcccttttatctaccttttccatccctttctgagctcaccctcctccttgcccacagtatttctagccacagcagtctgcttgctgttccttccgcccatcaagccagtttctttgcatttgctgtttccattgcaagaacacccttgctgcagatctgtccatggcttgctccctcacatgattcaggtctctgctctagagggaccttcagcgaccatctttttttttttttgagacggagtcttgctctgtctcccaggctggagtgcagtggcacatctcggctcactgcaagccccacctcccaagttcacaccattctcctgcctcagcctcccgcataggtgggactacaggcacctgccaccaccctggctaattttttgtatttttttttagtagagatggggtttcaccgtgttagccaggatggtcttgatctcctgatctcatgatccacccgcctcagcctcccaaagtgctgggattacaggcatgagccaccatgcccgcccttctttttttttttttttgggacggggtctcgctctgtcgcccaggctggagtgcagtggcacgatctcagctcactgcaagctccacctcccgggttcatgccattctcctgcctcagcgtcccgagtagttggcactacaggtgcccgccaccacgctcggctaatttttttttttttttttgtatttttagtagagacggggtttcatcgtgttagccaggatggtctcgatctcctgacatcgtgatccgcccgcctcggcctcccaaagtgctgggattacaggcatgagccatcgcgcccagcttgcgaccatcttttctaaaattgttccaccttcccatcactcaaatccttttatcctgctttatttttcttcccggcactttccctacctgctgtggtatttcatatttatgcatacatttgcttagagcctgctttactagaatgtaagctccatgacagcagggacctcatctgagcctcacttgtgcctgtggccctagcacccctcacagacacacggtcagcattgctgcagatctagatggtgaagacaggacatggacctcctggtttaactgattttgtgctggaattcaaagggctccagcgcagttctccattattcagatgagaaaagtagagtggagaaatgggtcccaggtcacacagctgagttttgcttcctagagctctgtccacacagctgtcccttcctgtccttggctacaacttgaatttgggcatttgcctctaggaggtgaagatggatttttgaagttttggtccttacccaggcagccctgtaggcctggggcagcccctgagttaccagagcctggagagagctcggtggggccaagtgggaacagcaaatgagaaaagtggactggggaacgcgatagggaggggtggggactgtggtgggttgcagagttcatgctcccttcgacatcattaatataaataaaaaattaaaacacttcctt

SEQ ID NO: 280 - DNA, 2769 bp, Homo sapiens
ctttttttctttggatgctctccccaccccgccatctagatcccatctttagacctcagcttcactctggtctccttgcaacactccctccccgtgttcccactccctctagcatcttcatcttccgccacgcccttcacctgtcctcgacctccaccttcatacaactgcactgttcccttaaaagctttctccgatttcctccacctgccttcatccttattctccttatccctctaccacccagactcatacccaaccccacgcatggcccctagtgggagccttttcagttcttctctttctcttgagctccagccttaagtgctcagggtttgccttctgaccctacttcaaacactgctgatgtttcaaaacctttcattcccgactccagcgcgtggaatctaggacacccctttcccagtgatgctcacctcagaatcacctgagggtttttcagaatgcccaagcttctagatcgaagttgttagggatggacttgaacatctggcatactgttctgcagcttcacttctgctccctgaagctaagagatgtgttgtttgggatcgactctgccaccaacttgttagatgactttgattctgcccatacgggtttcacagaccatctgactttcctggtcccttcatccctcaggttgaggccccaggcttggcctcaccacaatgtggcacgaggctcggaagcatgagcggaagcttcgaggcgtgatggtcgactacaagaagagggcggagcggagacgggagtattatgaaaagatcaagaaggacccagcccagttcctgcaggtacatggccgagcttgcaaggtgcacctggattctgcagtcgccctggccgctgagagccctgttaatatgatgccctggcagggggacaccaacaacatgattgaccgattcgatgtccgtgcccacctggaccacatccccgactacaccccccctctgctcaccaccatctccccagaacaggagtcggacgaacggaagtgtaactacgagcgctacagaggcctggtgcagaacgactttgccggcatctcagaggagcagtgcctgtaccagatctacattgatgagttgtacggaggcctccagagacccagcgaagatgagaagaagaagctggcagagaagaaggcttccatcggttatacctacgaggacagcacggtggccgaggtagagaaggcggcagaaaagccagaggaggaggagtcagcggccgaggaggagagcaactcggacgaagatgaggtcatccccgacatcgacgtggaggtggacgtggatgaattgaaccaggagcaggtggcagatctcaacaaacaggccacgacttatggcatggccgacggtgacttcgtcaggatgctccggaaagacaaggaggaggcagaggccatcaagcatgccaaggctcttgaggaggagaaggccatgtactcgggacgccgctctcgacgccagcggagagagtttcgggagaagcggctgaggggtcgcaagatcagcccacccagctatgcccgccgagacagccccacctatgacccctataagcggtcaccctcggagtccagctcagagtcccgctcccgctcccgctccccgaccccgggccgcgaggagaagatcacgttcatcaccagttttgggggcagcgatgaggaggcagccgcagccgctgctgccgcagcagcatcaggagtcaccacagggaagccccccgcacctccccagcctggcggccccgccccgggacgtaatgccagcgcccgccgccgctcctcctcctcctcctcctcctcttctgcctcgaggacctccagctcccgctccagctctcgctccagctcccgctctcgccgtggtgggggctactaccgttccggccgccacgcccgctcccggtcccgctcctggtcccgctcccgctcccgctcccggcgctattcccggtcccgtagccgtggccggcggcactcaggtgggggctcccgagacggacaccggtactcccgctcgcccgcccggcgtggtggttacgggccccggcgcagaagcaggagccgctcccactcaggggaccgctacaggcggggcggccggggcctcaggcaccacagcagtagccgcagccgcagcagctggtccctcagcccgtcccgcagtcgcagcctgactcgcagccgcagccatagccccagccccagccagagccgcagccgcagccgcagccgcagccagggcccctcgccatcacccgcaagagagaagctgaccaggccggccgcgtcccctgctgtgggcgagaagctgaaaaagaccgaacctgccgctggtaaagagacaggagctgccaaagtcatcaaggcggataagaaggcggcacaagaaaagatgatccagcaggagcatgagcggcaggagcgggaagacgagcttcgagccatggcccgcaagatccgcatgaaggagcgggaacgccgagagaaggagagagaagagtgggaacgccagtacagccggcagagccgctcaccctccccccgatacagtcgagaatacagctcttctcgaaggcgctcaaggtcccgatcccgaagcccccattaccgacattaggcagaagagtggggggtggggaggacaagggggtgggtaaggggctcaagctgtgatgctgctggttttatctctagtgaaataaagtcaaaagttatttaattcccgt

SEQ ID NO: 281 - DNA, 2997 bp, Homo sapiens
ttgaccccagaaaaggccaagtggtggcggtgagtgcctggcctggccactccccagaaccccttgaccagtggccagctgtcagcacccttgtacccaccattatcagagcccctggtcccggctttcacctgtcgcatccctgctccagagactagcccccttcccccgtctctgcaaccacaggtctctgccctaagtaagcccccagcctgcaattctctgcccggctcctgttccctcccctcccttgcatctcagaagctcagagaagggctcctcgctttgggattgaggaggggagaagctggaaactccatcctcccaccagaacctgcatgaaacctgagctcctggacccctctcctctcagccggcacccagacgcatcttccagggtctggggcctgacactggctcgagggctggccctttctccttgtggacccgctgggcgggggatggggcaaccctcgcgcgttgcttatcccagccggatgccctgggagggcggcggccctggcctcgccagcctcaagtctaacctggggtgcgggtgcgtgggccgcgtgcatgtctgcgtggagcaagcgcgccgagagcggtcggggctggcgccggggcgctctaacccactaacccggcgagcaggagcaagcccggcctcacgagggcgcccgcccgctgcgggctgtcttcaccgcagacgggaagctgctcagcaccggcttcagcaggatgagtgagcggcaactcgcgctctgggacccggtaggccaggccgcgccgggcgcgctagctcgctccttctctgggtctgccgggagcgccttcccgggctgtggctggcgcccaagaggccagagcggagcggggagctcccattcgggaaaagcctcgctgcgactccggggagccagcagacacccctgctctagggatcggcctttgagcgcgcttaagggttcgggatcggctgagagccgcgtgcctcctgctctctccaggcccggatgctctccaggtcaggggccagacgtggccccgcaggaagctgagtgcttaggccccatttgtctcttccccgcatccgctcctccaccccggacacccaagtcagcaagctggttgctcatccctccatgctcctcagggcaggcagctgggtgatgtccctccctgtctccccctccccccaggagaggtttgcggcccacgaggggatgaggcccatgcgggccgtcttcacgcgccagggccatatcttcaccacgggcttcacccgcatgagccagcgagagctgggcctgtgggacccggtaacgcagctggaggcttggggtgtgtgcctcggggactggcatcacgggagagtggccaggcgccccccacccgcagggcatgcccacctggacaggactgaaggctgctgccacctctgcagcgcctgccattctcacacccacccctctgcccagttttgctgcgtcgcgtgaaggatcctgcgctggcgcccccacctggtgatgccgagtccctgggggtggtttgctgtgactgcatgcggcgcgcagcggaacaacttcgaggagccagtggcactgcaggagatggacacaagcaacggggtcctattgcccttttacgatcccgactccagcatcgtctacctgtgtggcaagggcgacagcagcattcggtactttgagattaccgacgagccgcctttcgtgcactacctgaacacgttcagcagcaaagagccgcagcggggcatgggtttcatgcccaaaaggggactggatgtcagcaagtgtgagatcgcccggttctacaagctacacgaaagaaagtgtgaacctatcatcatgactgtgccccgcaagtcagacctcttccaggacgatctgtacccggatacgccaggcccggagccggccctagaagcggacgaatggctatccggccaggacgccgaacccgtgctcatttcgctgagggacggctatgtgccccccaagcaccgcgagctccgggtcacgaagcgcaacatcctggacgtgcgcccgccctccggcccccgccgcagccagtcggccagcgacgcccccttgtcgcagcagcacaccctggagacgctgctggaagagatcaaggccctccgcgagcgggtgcaggcccaggagcagcgcatcacggctctggagaacatgctgtgcgagctggtggacggcacggactagccccgcgcgccaggcaggcggagcggggcggggcgcacaagctcggccccgccccggcttttagtcccgaactccggaccccgccttcttgggctgggcccgggggcgggactggggagggaactccgcccctcgcgggagaccagaactcttggagcttaggggagacccacgtcgctccagcggaggctggactgcgagcctcgtctgggactcggctggagctggcctagggaggcctggggtaacctggggggctcagcaatggtgctgcacggcgaggtggtgtccccctttgtcctccgcccagggcagggaaagtgcttagtattagcgtgatgcttggggttattggagcctgagcttgacctcaaacgggtggcgatttgatgggtacccccaggctggggaaaatgacagcgcttctcctaatcagctcactggattccatcaccctgagcggtaaaccagatgggcgtcaccccagttctgcagacacatacacaacccgtttgctgcagagccggacccagtggctacacccacagcggtctgtggtagagaactctcttccttctttccaccgacaggggcgagggctgcttcctcgcggcagcccccgcgaagaaatctcgagagaactggcatgaggagttaggttcatcacaaatacacacacactgcccccaaccctctgccgttgcctctctcagaaaaacaagacgtactgaatgaaatattttactaagcgttc

SEQ ID NO: 282 - DNA, 2907 bp, Homo sapiens
tcgggaaacgcgggcgtaggtgaccggcggctttctcagttttggtggagacgggcgcatgtgggcgctttgctcgctgctgcggtccgcggccggacgcaccatgtcgcagggacgcaccatatcgcaggcacccgcccgccgcgagcggccgcgcaaggacccgctgcggcacctgcgcacgcgagagaagcgcggaccgtcggggtgctccggcggcccaaacaccgtgtacctgcaggtggtggcagcgggtagccgggactcgggcgttcagagactcatgcaggagcacaagttaaaggttgctcgcctggacaacatattcctgacacgaatgcactggtctaatgttgggggcttaagtggaatgattcttactttaaaggaaaccgggcttccaaagtgtgtactttctggacctccacaactggaaaaatacctcgaagcaatcaaaatattttctggtccattgaaaggaatagaactggctgtgcggccccactctgccccagaatacgaggatgaaaccatgacagtttaccagatccccatacacagtgaacagaggaggggaaagcaccaaccatggcagagtccagaaaggcctctcagcaggctcagtccagagcgatcttcagactccgagttgaatgaaaatgagccacaccttccacatggtgttagccagagaagaggggtcagggactcttccctggtcgtagctttcatctgtaagcttcacttaaagagaggaaacttcttggtgctcaaagcaaaggagatgggcctcccagttgggacagctgccatcgctcccatcattgctgctgtcaaggacgggaaaagcatcactcatgagggaagagagattttggctgaagagctgtgtactcctccagatcctggtgctgcttttgtggtggtagaatgtccagatgaaagcttcattcaacccatctgtgagaatgccacctttcagaggtaccaaggaaaggcagatgcccccgtggccttggtggttcacatggccccagcatctgtgcttgtggacagcaggtaccagcagtggatggagaggtttgggcctgacacccagcacttggtcctgaatgagaactgtgcctcagttcacaaccttcgcagccacaagattcaaacccagctcaacctcatccacccggacatcttccccctgctcaccagtttccgctgtaagaaggagggccccaccctcagtgtgcccatggttcagggtgaatgcctcctcaagtaccagctccgtcccaggagggagtggcagagggatgccattattacttgcaatcctgaggaactcatagttgaggcgctgcagcttcccaacttccagcagagcgtgcaggagtacaggaggagtgcgcaggacggcccagccccagcagagaaaagaagtcagtacccagaaatcatcttccttggaacagggtctgccatcccgatgaagattcgaaatgtcagtgccacacttgtcaacataagccccgacacgtctctgctactggactgtggtgagggcacgtttgggcagctgtgccgtcattacggagaccaggtggacagggtcctgggcaccctggctgctgtgtttgtgtcccacctgcacgctgatcaccacacgggcttgccaagtatcttgctgcagagagaacgcgccttggcatctttgggaaagccgcttcaccctttgctggtggttgcccccaaccagctcaaagcctggctccagcagtaccacaaccagtgccaggaggtcctgcaccacatcagtatgattcctgccaaatgccttcaggaaggggctgagatctccagtcctgcagtggaaagattgatcagttcgctgttgcgaacatgtgatttggaagagtttcagacctgtctggtgcggcactgcaagcatgcgtttggctgtgcgctggtgcacacctctggctggaaagtggtctattccggggacaccatgccctgcgaggctctggtccggatggggaaagatgccaccctcctgatacatgaagccaccctggaagatggtttggaagaggaagcagtggaaaagacacacagcacaacgtcccaagccatcagcgtggggatgcggatgaacgcggagttcattatgctgaaccacttcagccagcgctatgccaaggtccccctcttcagccccaacttcagcgagaaagtgggagttgcctttgaccacatgaaggtctgctttggagactttccaacaatgcccaagctgattcccccactgaaagccctgtttgctggcgacatcgaggagatggaggagcgcagggagaagcgggagctgcggcaggtgcgggcggccctcctgtccagggagctggcaggcggcctggaggatggggagcctcagcagaagcgggcccacacagaggagccacaggccaagaaggtcagagcccagtgaagatctgggagaccctgaactcagaaggctgtgtgtcttctgccccacgcacgcacccgtatctgccctccttgctggtagaagctgaagagcacggtcccccaggaggcagctcaggataggtggtatggagctgtgccgaggcttgggctcccacataagcactagtctatagatgcctcttaggactggtgcctggcacagccgcgggccaggaggctgccacacggaagcaagcagatgaactaatttcatttcaaggcagtttttaaagaagtcatggaaacagacggcggcacctttcctctaatccagcaaagtgattccctgcacaccagagacaagcagagtaacaggatcagtgggtctaagtgtccgagacttaacgaaaatagtatttcagctgcaataaagattgagtttgc

SEQ ID NO: 283 - DNA, 2082 bp, Homo sapiens
ccaatagcacatctttgaagagcaagagagacctggggcagagccaagacactctgggaagtgttgaacttcagtacaatgagagcctcgtatctggtgaatacattgactcagactgcattggcaacccagatgaggactgtgaaagattcaggcagctcttggagctcaaatgcaagattcgaaatcatggagagtatgacctgtattactcaagcagcacaattgaatgcaatcaaggggagcaagagggagtggagcatgagctacagttgcttaatgaagaactgagaaacattgagcttgagtgtcagaatatcatgcaggctcacaggctccagaaagtgacagaccagtatggagacatctggacattgcatgatggaggattccggaattataacaccagcatagatatgcaaaggggaaagctagatgacatcatggagcatccagaaaagtctgacaaggacagttctagtgcttacaacacagctgagagctgcagaagtactccgctcactgtagaccgttcccctgacagttcccttccaagggtgatcaacctcaccaataagaaaaacctgagaagcacaatggcagccacccagtcctcttccggacagagcagtaaagagtcgacctccaccaaagccaaaaccactgagcaaggttgtagcgctgaaagcaaggagaaggttttagaaggcagcaagcttcctgatcaagagaaggcagtcagcgaacacatcccttacctctctccttaccacagctcctcatatagatatgcaaacatcccagcacacgcccggcattatcaaagctacatgcagttaattcaacagaaatctgcagtcgagtatgctcagagtcagctcagcttggtgagcatgtgcaaggagtctcagaagtgttcagagcccaagatggaatggaaggtgaaaattaggagcgacgggacacggtacatcacaaagagacccgtgcgagaccgaatcctgaaggaacgtgccttaaagatcaaggaagagcggagtggcatgaccacagacgatgacaccatgagcgagatgaaaatggggcgctactggagcaaagaggagagaaagcagcacctggttagggccaaagagcagcgccgtcgccgtgagttcatgatgcgaagcaggttagagtgtctcaaggagagccctcagagcggcagtgagggcaagaaggagatcaatatcattgaactgagtcacaaaaagatgatgaaaaagagaaacaagaaaattttggacaactggatgacaatccaagaactgatgacccatggggccaagtctccagatggcacgagagtccataatgccttcttgtcggtgaccactgtatgaccgaatgaatggaatgcatgcgactgattttaggaggatgctaccagtttcggtagagtatgattgcctcgttcaatgtggcgtttttatatatattttgtgactctttatagtttaaattttttgtaagcaaaaaatacctggtaatttttcatttgtttttcatatactggtaccttctttttggctgagatctttcttttacttgtgatatattcatattactcgtttataaaaaatcaaaaacaaaaggaaagaaaacaaaaaaaacttgcacaaaaatactgaggagccaattaatttcctacttcaatgtatctaatgtaagtgaaaatctggatttatttctctagtttacttattttctactttaataataactcaatgccaaaatatttctatgcttgtttcttggcataatacattttaaatcaaacctgttcgtaataaatcatgtgccacatcttgtcttacacataaaagccactgcttttaacatcccattgtacatttaacacataaatggtgttaacatcccattgtacatttaacacataaatggccattgtctttgtctcagtaaagtgtaggtggacaatcttcctgtgatatgtagtgacattggtcatgtagctagataattatggtaattgtgacaattaaagagaaataaattattgattatccttcaaaaaaaaag

SEQ ID NO: 284 - DNA, 2118 bp, Homo sapiens
ctttgatgctttttgcccatgaagtatctcttttgtgtgtttgtgtgtatgtgtactgatttgctgtaaatttcacagtgctcattgtcagggatcatcagaatcaggcctaggcagagagctgagcagtactctcagtatgtctctgtgtcctggttgccgcatatctctgttgtttatttataaattggagagctctctgatgtgtaacaaaggttggatagatcagagacaattggaagacgaatcctctactctattgtcacctcttctttttctattcacacatgtcagatagagacatgcgtgttgtaaattattttgtcagaatgaaagcctggcagattaagtgatttcttctctttttgctgtacttgatatcgatctcttgttcatttcttgataatatgtttggttatttttgttttcattgcttttggtgtcagagatggctttggattccctgttctgtgtgctcctgtctggctcctgaacccagctggagaggtgtgtcaatcccaactggtgaagtactgagaggaagctacacaaaaggcagcaaggtgttaataagtgtacctctgacattttaaccacctctgacttttccatggaatggacaagtagtagtctctgtcagagcaatgttttaaaggaaaaaaagaaacttgaggtcgtaaactgtttattaatttatgctgttattttgtgtttactcaactcatttatattgacttgtaaattagtaatttatgaactactattcatcaattcattgcctacatgtcagcaaacaagttttcttcttaataaagaatccggtggctgggcacaatggttcacacctgtgatctcagcatgttgggagggcaaggcaggaggattccttgaggccaggagttcaagacccgcctgggcaacatagcaagatttcatctctacaaaaaaatgaaaatattggctgggcatggtggctcattcctgtagttcaggctactcaggagcctgaggtaggaggatcgcttgaacccaggagtttgaggctgcagtgagctatgatcctaacactgctctccagcctgggtgacacaccaagagaccacctcttcaaaaaaggaatctaggggcatcagtgtgtgcacacagcatggcttgtgaatgcggaagtgcctgtgtgcatagttgtgctcaagaatgtgttgatgattatatcttctcagcatgaaaaaaagttgttgttgtttttttttgagatggggtcttgctctgtcaccagactggagtgcagtagtgctatctcggctcactgcaacctctgcctcccgggttcaagtgattctcctgcctcagcctcctgagtagctgggactacaggcacacgtcaccactcctggctgattttttgtattttagtagatacggggtttcgccatgtgggccaggatggtcttgatcccctgacctcgtgattggcccacctgggcctcccaaaatgctgggattacaggtatgagccaccgtgcctggcctgaagttcacatttataaagatctctctacgtcttagatttgattcttcctttaaatatttttctcattgacatttgaaagcacctgaccttatataaaatgaagaattttcataactccataaaaggagaattatgacatcatctactatttctttctcttgtctcataaatctaaaccatcaacctgcttatttttgtatactgtcacactgtgtattccctgcattgaatgcctttctattgacattgtctgtaaaaattgtgggaagttttctgcaccctaaattttctgttatggggattagatatccagtatccatgtttttccaagtcttacatcagaaagggtaaatacagccctcacagcagcctgttgtttgtcctgcagttgtgtttccatcacattacacaaagcctctttgtcttcgtggttgtaccctgctaataagttttttttaaattatgtaatatgtgtatatacaaatacctatatgtatgtgtgtacacatacagctgatatctactgagattatgtatgcatgaactatagaattaacttgtaattttaagaaaataaattattttgt

SEQ ID NO: 285 - DNA, 2219 bp, Homo sapiens
agctccgcgaccgcccgtggccacaccagtcggggacttcgtgctttacgatgggggcgcagcggtctggcacgcgcaggaccccgggccttgcaccccaacgctggccgccctggacccgcggcggggacccgcgcagtcagggtacctgcccataccgatggggtggggaccagcacggagactttccttcaccccgcggcttctgttcctttcaggacggacagcgcccacccggaggaaagcctgacagatgagacttcgcaaggaacctgccagttcagggaggcccacctttctagaaggttaacaggaacttccagcctccagcctacttagtgaccagctgctggaggacagtgagtggcccctgctgtccgcatctccacaggggtcaccaagcgcactcacagggtccccctccacctggagcagagaattcggaggagcccgtcttgctgtcttttctgatgttgttaaactatgcttgggcctgtcctttgctgaaaggagctttctacacagctggacttctgaggtgggacctgccacgtgctaactctggcactcggagcggtctctgccactggcaatgtcctgtcctgaacatttccagtgtggcctctctcctgaaaggcctgtgtgcgacttctttgtgaagccggaagaaagttctgggacttccccttctcctttggtgcaaagttacactaactgtcatgatgttgttgatttccttttttttttttttttttttgagagtctcgctctgttgcctagactggagtgcaatggcgtgatctcggctcactacagcctccgcctcctgggttcgggtgattctcctgcctcagcctcccaagtagctgggattacaggcgtgagccaccgcgcccggccttgatttccttcttaagcagagctgagtctctgtctctgtccacaccagtgcctcctgggccttcctgagcacgtgtggctggcatcgcttcccatctctgctccctgtggcatcttgctgtgtccccggcacctctgcaaagcacagcctggccaacatggtgaaatcccgtctctactgcaaaaactcaaaaattagccaggcgtgctggcacgcgtctgtagtcccagttactctggaggctgaggcagaagaatcacttgaacctgggaggcggaggttgcagtgagccaagatagtgccactgcactccagcctgggcaacacagtgagactctgtctccaaaaaaaaaaaaaaaaggtaccggccaggtgcggtggctcacgtctgtaatctcagcacttagggaggccgaggcaggtggatcacttgaggtcaggagttcaagaccagcctggccaacatggtgaaaccccatctgtattaatagtaaatccaaaaattagctggttgtggtgatgcacgcctgtagtcccaactgctcgggaggctgaggcgggagaatcacttgaacccgggaggtggaggttgtagtgagacaggattgcgctactgcaatcccacctgggcaacaagaaggaaactctgtctcaaaaaaaaaaaaagaaaagaaaaaagaaaaaacatattgtcctggctgctgaggggcctaaggccacacacgtggcagttagctcagccgtgcacctgtgggagtgacagacctcagcctggaagacattatctgtggatctccagtgcaaaagtggccagtaccaaaatggagtcacttatgtcaagccctgaaaaatggagccaggaggccacgaaggacgggctctcccaggtgtgccaggaaagaaactacggaatttctcaaaaccacagtactgccgctaagctgcctgcacgaggacgcttgcctgacaagggccgtcttcacctccagatgaatgccaactcctgcaacaagcctgatacagtttggctgtgtccccatccaaatctcatcttgcatttcccacaatccccacgtgttgtgggagggacctggtgggaggtaattgaatcatggggccagttacccccatgctgttctcgtgacagtgagttctcaggacatctggtagttttataaggagcttttcccctttgctcagcaggtttctctcctgcagccaggtgaaggatgtgtttacttccccttctgctgtgattgttaagtttcttgagccacgtggaactgtgggtcaggtaaacctctttcctttataaatt

SEQ ID NO: 286 - DNA, 2254 bp, Homo sapiens
agatgtgtggagcttacggaatgtggagcccatttattttgcatgcacatttaatgtgaaaaattatttttaagttctaaagcaacctctcggaaatgctaagaactgcaaagctacgcagaccctgatgcattcctaaatataatgaagaaaaaacagaaatgcaccaagaattgaaaaccctggttactcacgattcttttcacctttccaccttgacccagctttcgttctgtccgagacacccacaggagaagttatctcagccatcgagagcagcagcatcagtaacagcacagccatgccagactcagcaattctgctcttagaagttttacccaagagaaaaggaaaacacatgcccacatgaagagtgtttatatcagctttattcataatcacctccacctggtaacaaccaattgtccaccgaatgagacaaagtctagctctgttgcccagactggactacagtggtgtgattatagctcacatcctcacatcagacttgcactcctagactcaagcaatccttctgcctcagcctaaagagtagctggctacaggtgtgcaccaccagacccacctaattaaaacaaggttccatgttcatgggtaggaagaatcagtatcgtgaaattggccatactgcccaaggtaatttatagattcaatgccatccccatcaagctaccaatgactttcttcacagaattggaaaaaactactttaaagttcatgtggatccaaaaaagagcccacattgccaagacaaccctaagccaaaagaacaaagctggaggcatcacgctatctgacttcaaactatactacaaggctacagtaaccaaaacagcatggtactggtaccaaaacagagatatagaccaatggaacagaacagagctctcagaaattaatactgcacatctacaaccatctgatctttgaaaaacaaccatctgatctttgacaaaaacaagaactggggaaaggattccctatttaataaatcgtgctgggaaaactggctagccatatgtagaaagctgaaactggatcccttccttacaccttatacaaaaattaattcaagatgcattaaagacttaaatgttagacctaaaacaataaaaaccctagaagaaaacctaggcaatactattcaggacataggcatgggcaaggacttcatgtctaaaacaccaaaagcaatggcagcaaaagccaaaattgacaaatgggatctatttaaactaaagagcttctgcacagcaaaagaaactatcatcagaatgaacaggcaacctacaaaatgggagaaaatttttgcaatctactcatctgacaaagggctaatatccagaatttacaaagaactcaaacaaattcacaagaaaaaagtaaacaacaccttcaaaaagtgggtgaaggatatgaacagacacttctcaaaagaagacatttatgcagccaacagacacatgaaaaaatgctcaacatcactggccatcagagaaatgcaaatcaaaaccacaatgagataccatctcacaccagttagaatggcgatcattaaaaagtcaggaaacagtgccggagaggatgtggagaaataggaacacttttacactgttggtgggactgtaaactaattcaaccattgtggaagacagtgtggcgattcctcaaggatctagatctattaatatcatttgacccagccatcccattactgggtatatacccaaaggattagaaatcatgctgctgtaaagacacatgcacacgtatgtttattgtggcactattcacaatagcaaagacttggaaccaacccaaatgtccatcaatgatagactggattaaaaaaatatggcacatatacaccatggaatactatgtagccataaaaaatgatgagttcatatcctttgtagggacatggatgaagctggaaaccatcattctcagcaaactatcgcaaggacaaaaaaccaaacaccgcatgttctcactcataggtgggaattgaacaatgagaacacttggacacaggaaggggaacatcacataccagggcctgtcgtggggttgggggaggagggagggatagcattaggaaatatacctaatataaatgaccaattaatgggtgcagcacaccaacatgacacatgtatacatatgtaacaaacctgcacgttgtgcacatgtaccctagaacttaaagtataataaaaaataaataaat

SEQ ID NO: 287 - DNA, 2458 bp, Homo sapiens
gttggtggggctgggggatgagagctgcaccgcgcgggacaagtcgccggcggcgcccgacggagcaggtgatttcccctcctgcccccggcccagggctaggagagtcgcggagagcgctgacccagggtacccgtccgatgtgttcccccacggtaccccccccggggcccgtcggacccccatctctgattctcgccgtggcctgtatcaaggcacatccagtttgctcaggcctgcctcgtcatgtgtcctccaaggccacagccgcatccctgtgccttcgggcccactattctggacgcttacgggtgtcccgctagcgggtttagggagctgctgcttcaggggtcgtccatcatcgcggtcccacttcctgtgctcgccctccctgtttgtgctcccgcctgactttggatgcagggatcccttgttcccctcaatgcccttggtgcctctaaggtctgacttgggtatcagaggacaatgatatcctctggggcctgcgttatgggtccagggcctcaggaaccgggcttcacaggggctgagagaagcagtgaagaccttccatgctagaccccttgctgcctccctgagaagttcgctaggactcctttcacactagctcccaggattcctcctcccacatggcctgctctccctccactttaagcacctccccaccccaagggagcagcatagtacttcttaccccactctcacttaaatttgtccacagtgtctctgtctagcatctggagggtccaggcctgtgctgcccttgggaagctcccaggctagctgggagcagtgaaggtggggcagttagggttggctgcagaaagggagtcctgcagaatgagatttggagaggcagagggacagatgctctgggctgggagagtggtgtgagcaaagattctgaaatagacaatatagccagccaggcaggagaggagattcagaatataggatggggccacacaatttgcatcgtgagaggtgatgtagtgtggtggttaacagtgagggttctggatccagacagcctgggtgtaaatctgccattaacttgccttgtgaccttgggcaagttacttaacctcatagtgccttcatttcctttcaggtaaaatgtggataatacggccgggcgcggtggttcatgcctgtaatcccagcactttgggagaccgaggcgggtggattgcctgaggtcaggagttcgagaccagtctggccaacatggtgaaaccccgtctctactaaaaaatacaaaataaatttgccaggcatggtggcatgcgactgtaatcccagctactcaggaggctgaggcaggggaattgcttgaaccagggaggtggaggttgcagtgagctgagatcgcaccactgcactccagcctggatggcagagcgagactccgtctcaaaaatacataaataaataaaataaataaaataaaatggggagaataacagtatctacattttagagttattgtaaggattaggtaagttaatacatgtaaaagtgcttaggacaatgcctcgtaagcagaggcaataaatgctaatattaccatcatcggaggcatttaggcaggactcatgacaggatgacagtcacatttggtagacaccatcaaccaatgatctctaatttgcggcccccaagaagcaatggggttctgtgggctacatctggaatttgaaatgtctcatggaaatcatgttcttaccctggagaagggtggctgcttaggtgctacttaggaaaccagtctggcagaccagatcttccccaactcaggggctatgcggggagaagtattaggagcccctgagcaggaaggatgtacttaggaaggctaccggggatggggaagggtaaaagagcttagaagcctgggtgaagtttgggtagaccaaaaacaggagggagggagggaggatgttcccttggaatacaaactagagaaaagcttaggggagcaagtctttttatttggggacagtgaagagtttcctaaaaattccctggcccccaggccttggctaaaaacccagaagcatgagacacatccctgagaagcttcttccctagaaactgggctctcaggccgggcacggtggctcacgcctataatcccagcactttgggaggcctaggcgggcagatcacctgaggtcgggagttcgagaccagcctgaccaacatggagaaaccctgtctctactaaaaatacaaaattagccgagcatggtggcacatgcttgtaatcccagctactcaggagggctgaggcaggagaatcgcttgaacccaggaggtggaggttgcggtgagccaagatcgcgccattgcactctagcctgggcaacaagagtgaaactctgtctcaaaagtaaaataaataaataaataaataaataaataaataaataaaatt

SEQ ID NO: 288 - DNA, 2261 bp, Homo sapiens
tcatccacaaataaagatgtgctgtccaccaattcctctacacagaatcctgagggacaaagattttcatcgcatagtccaaatttcttcttttataggtaaaataattagcctctcagtttttaagtttgtatccaggtgtagtgcacggagttctgttgcagaaagtatagtccactcgtcctctaataattttgtttttctgtctgaagttgaaatattggccggttgaagtttattgcaaggcatacggttgtataatttagttggctagtgtatattatagtggaaagaagcagagttaagtttaaatttccattctcactagtttgtgacctttgccaagttactgaaaaaaaaaaaaaaaaaaaacaaaagaactttgttgtatgaaaagcacccaaaacattgtcactgaagtgttatttttgtacttcattaaatataattaaatctatttaactccagtttttatttgtcctcattgcttcccagcgtttagtgggctacagatggcatggcatctaaaaccttacaatgcttgattttcatacagaagacactttggccagttgatgtgggttttacctcttcataaaatggtaaactgaatgtgcataaaatgcaagctgtcagtcttaaatgattggctgccaatgtttcatttctttatcattcccctccccccttttttacccttttttgaatgtgcatggaatgtaaattatcagtcttaaatgattggctgccaatgtttcatttatcattcccctccccacttttttgcccttttttgcaattctgatagttttgtctcctaggtggtttatttctgttttgctcggagacattgcctttgtatcataaagtcacaaaaccatgataagtggaattccattgcagaagacattgaactgtgcttatttggaagaatagagaaaggaactgaactccacctagtatgccctttagtgtttaccactaccttagggaataaacagtactctcatcctatgtacggtatatagctgttggctcccttagtggtcaacacattaatttgcttgctgaaggtcacatagctggtaaattgaatcagaatttgaacccagttctttgtgactccagagcactttccacagctccacaatgccttcacagcccttgagttacttttcaaattatagtattactttcctacctaagtccctctttgtatttgcagagttgcatgctgagaatttgaaaaatgaagatgatgtagacactggactattaggattctggactctacttataatatccctaactgctggattctcctgttgcagcttttcttggacagtgacttactttgattcttttgaaccaggaatgtttcctcctactcctctttcacctgccaggttcaagaaactgactggacattctttccacatgggctatagcatggcgattttgaatggcatcgtagctgctcttactgtagcatggtgcctcatgtaaacccacactggagcgatattgttggcaaaacttaatcatgattgttttgtaataacaagaaggagcatcactgtctactcagaagactgagaaacctgctgttcattatgtagttcagatatttatcacaatcatcctcattatggaagaccttttaaagcattgttttagaatgtctgagtattaagatacagattaattgggaatatctgagtattaagtactttcttcagagtataagatgtttacctcatctttttacttttgtgtgtgtagttctttcaagttgtaggaaacattttaatggaatttaaactcaaaaacttgaatacaggacaatgcttgccttttcatgtatgtactacattttttgctaagaaatactgatatttctgtttagttgagctagaaatacttcttatttatacatttaggaaagcaaataatgcctactactccgacttttatagaagctacttttaaatcagaatatttaatttttgatattcatataattaatagaagttgcatttatattttttatggggcatagttccttatgtgtttttttaatgtattttcatactacatactgaatttgtatgtttttaaaattgttacatctagacaactgtaaacattatttttttagctagtgcaaacctagtacctgccatttttactaatttttgtctttaaaaaaagcaaaaaagcacattgacctaagttgaaaattaagtaagtttatttttaac

SEQ ID NO: 289 - DNA, 2700 bp, Homo sapiens
agtttatctccacggatctctatgcatttctggaatgccaaacaacatctgcatttcctgctgccatggtgattggcagcccatcccagaggacggtgctggaacccccaaggctgggcacaccctgggacggagggatctccagcacagcgacattctgatttggaatttgttatggactgtgacgtgcagatcaagctgcacgtcaggagcacatggaacgctttggggtccctttttagccggggattccagtgaatgaaaacggtagcaggggctcttttgagcttggtcatggggcagccctccgaggtcagcaatgtgcagaaggggtttggagagaaggcttgagcatgtgagggtggcacggccagcctcatcagcagcggactcctttcccagggcagagtggagggcagcaaacaggagaatgagcaacctacctaggtccttgggatgcccctcaggaggacgagctctagggggaatgctgtacgtcaccatgctcggtgccagtgttggggattttctaaagggagatgcccactcggagggcaaagggtgatggcataggggctgcatataaccccggacatggtgctgacgtggcccccctgtgccttccccaaggggcggcctgagctgacacccacagcgatcatggccgggaggctcctggtgcagcggctcttcggcgggtcctcagatctgatggactacgacaatgttcccacgaccgtcttcaccccgctggagtatggctgtgtggggctgtccgaggaggaggcagtggctcgccacgggcaggagcatgttgaggtctatcacgcccattataaaccactggagttcacggtggctggacgagatgcatcccagtgttatgtaaagatggtgtgcctgagggagcccccacagctggtgctgggcctgcatttccttggccccaacgcaggcgaagttactcaaggatttgctctggggatcaagtgtggggcttcctatgcgcaggtgatgcggaccgtgggtatccatcccacatgctctgaggaggtagtcaagctgcgcatctccaagcgctcaggcctggaccccacggtgacaggctgctgagggtaagcgccatccctgcaggccagggcacacggtgcgcccgccgccagctcctcggaggccagacccaggtatgcaggtggggctggctctgtttgaggacagggcatgtggcaggggtgcaggagccctggccatgggctccctccaggtgtacagcaaggctacacctgccacgccacccagaatgggtgctccatcctgtaaccaggccacagcggtgacaggcagaaggggaagttcccaggggcccaaacctccccgggggaccccagaccccggcctggccacagctgctccccacacacaggaggtatcaagaaacggggctcatccttagcagcctatcccaggtggatgttggcgtggaaggtgtcccgggtgggctaaagtcgggcatctcaagttgctgccccacagggggctgcagtcgggaagctggcctcccaccgaggcctcccaccaaggcctggctcctgcagagttcagcgcccgctcatttccctatctcccagaaggtggagacgctgccctgtgatggccggccctgcccagcctgccctgcacatctggttctgttccagctctgcagagccaggctgaccggggggcatgttgttcatcgtgacctcttctggggaggaagaaactggcaagggctcctggcctctgccccagggatgcctgtgccagagccccctcgcctcgtggtctaatagtgcatcctccggcctgggctgcagggcaggggccggggcagggtgggccctcagcccgtgccatccagcccacctggggcacccccatggctgtcagcccctcccagggttggggtgtttgggctccatctctcccccggggctgaggtggagaccaggcagagcagtgggctccccccaagatgcctgtggacaggctctagggtctgcatggcgccgaggggctctggggaggcctctctgggggtactcagggccccctgcttcaccgtggccgcctccccccggcggggccgcgctcgatagggataaacaaagggcatcctgaggaaactcttatcagaacattacacctcccagagctgttttgttaggagcctgctataaatttttatcatttcaaaatatttttgtagcaccgcgtcgctccctgtgacgcatcgccctggggtggggccattctctgctgggtttatttctcacccatctcccttgggggtccctgggtgtggcagtgggagacatagctaggctgatgtgaggggtgggtggctgacctgtgctgaccttcctgttgttggcaggatggctgcaggccaggtttggggggcctcaaccctctcctggagcgcctgtgagatggtcagcgtggagcgcaagtgctggacaggtggcccgtgtgccccacagggatggctcaggggactgtccacctcacccctgcacctctcagcctctgccgccgggcacccccccccaggctcctggtgccagatgatgacgacctgggtggaaacctaccctgtgggcacccatgtccgagccccctggcatttctgcaatgcaaataaagagggtactttttctg

SEQ ID NO: 290 - DNA, 2932 bp, Homo sapiens
catttttattaactggaggcgacggcggctgcggcggcggcgggacccccaggcctcctccggggtatgaaaatcggcagtgggttcctgagtggcggcggaggtaccggcagtagcggtggtagcggctccggcggcggtggtagtggcggcggcggcggcggcggcagcagcggcaggagggcagagatggaacccacctttccccaggccccggccgctgagcccccccctccgccagccccggacatgactttcaagaaggagccggcggcgtcagccgcggccttcccctcgcagaggacctcctgggggttcttgcagtctttggttagcatcaaacaggagaaacccgcggatcctgaggagcagcagtcccaccaccaccatcaccaccaccactatggggggctgttcgctggagctgaagagaggtctccaggcctaggaggcggtgaaggggggagtcacggcgtcatccaggacctcagtattctccaccagcatgtccagcagcaaccagcccagcaccaccgtgacgtattactcagcagcagtagcaggactgatgaccaccatggcactgaggagccaaagcaggacactaatgtcaaaaaggcaaaaaggccaaagccagaatctcagggaatcaaagccaagaggaagccaagtgcatcttccaaaccttctttggttggagatggagaaggtgccatcctctccccaagtcagaaacctcatatctgtgatcactgtagtgctgctttccgaagctcctatcacctgcggagacatgtcctcattcatacaggagaaagacctttccagtgcagccagtgtagtatgggtttcattcagaaatacctactacagagacatgagaaaattcatagtagagagaagccatttggatgtgatcagtgcagcatgaagtttattcagaagtaccatatggagagacacaagaggacacatagtggagaaaagccatataagtgtgacacttgccaacagtatttttcaaggactgatagattgttgaagcacaggcgcacatgtggtgaagtcatagttaaaggagccactagtgcagaacctgggtcatcaaaccataccaatatgggtaatctggctgtgttgtctcagggaaatacaagttcttcaaggagaaaaacaaagtcaaaaagcatagctattgaaaataaggaacagaagaccggtaaaacaaatgaatcgcaaatttcaaataatataaacatgcagagttactcagtagaaatgcctaccgtgtcttccagtggaggcataattggcactggaatagatgaactgcagaagagggtgccaaaattgatctttaagaaaggaagcagaaagaatacagataaaaactaccttaactttgtgtcaccattaccagacatagtaggacagaaatccttgtctggaaaaccaagtggctcacttggcatagtatcaaataatagtgtggagaccattggtcttctccaaagtacaagtggcaaacaaggtcagataagtagtaattatgatgatgccacgcagttttcaaagaaaagaagatatttaccaactgccagcagcaacagtgccttttctataaacgtaggacacatggtctcccaacagtctgtcattcagtctgcaggtgtcagtgttttggacaatgaggcaccattgtcacttattgactcctcagctctaaatgctgaaattaaatcttgtcatgacaagtctggaattcctgatgaggttttacaaagtattttggatcaatactccaacaaatcagaaagccagaaagaggatcctttcaatattgcagaaccacgagtggatttacacacctcaggagaacactcagaattggttcaagaagaagatttgagcccaggcacccaaacaccttcaaatgataaagcaagtatgttgcaagaatactccaaatacctccaacaggcttttgaaaaatccactaatgcaagttttactcttggacacggtttccaatttgtcagtttgtcttcacctctccacaaccacactttgtttccagaaaaacaaatatacactacgtctcctttggagtgtggtttcggccaatctgttacctcagtgttgccatcttcattgccaaagcctccttttgggatgttgtttggatctcagccaggtctttatttgtctgctttggatgctacacatcagcagttgacaccttcccaggagctggatgatctgatagattctcagaagaacttagagacttcatcagccttccagtcctcatctcagaaattgactagccagaaggaacagaaacacttagagtcttcaacaggctttcagattccatctcaggagttagctagccagatagatcctcagaaagacatagagcctagaacaacgtatcagattgagaactttgcacaagcgtttggttctcagtttaagtcgggcagcagggtgccaatgacctttatcactaactctaatggagaagtggaccatagagtaaggacttcagtgtcagatttctcagggtatacaaatatgatgtctgatgtaagtgagccatgtagtacaagagtaaagacacccaccagccagagttacaggtaaggtcccaaaagtggccaggctggaggtcttctaatgtaattttgttttattttgagaacactgccattggaatgtttctacacgatcctattaagaataatgtgatgccctttcaatgcaacttttcatatttagtttattttgttagcgtgattttagctgtttgtattatgatttttaatcaaaatcaatagattaaaaatagtttgacattcaaagtgacaatgtttagcaatcaaatttacatgtatagatcgtcagggaatagcccaaatgttttaaacgc

SEQ ID NO: 291 - DNA, 3095 bp, Homo sapiens
ggaacacgctggccaacagctgcggcaccggcatccgctcttctaccaacgatccccgtcggaagcccctggacagccgcgtgctccacgctgtcaagtactactgccagaacttcgcccccaacttcaaggagagcgagatgaatgccatcgcggccgacatgtgcaccaacgcccgccgcgtcgtgcgcaagagctggatgcccaaggtcaaggtgctcaaggctgaggatgacgcctacaccaccttcatcagtgaaacgggcaagatcgagccggacatgatgggtgtggagcatggcttcgagaccgccagccacgagggcgaggcgggtccctcggctgaagccctgcagtaacccgcccagcctcccgtggggccacacacttcccctcccaacacacacacacacctgccatcttggtcatgagctactgtctgtccctccccaggacccgcggtgggtgctgcatgttcccggccctctgcccctcctgtcctaccccctttccccaccgagagctgggccgggagaggaccgcagggcaggtggcgtgaggtccgtgttgccttctttaacacacactcgtgcagtgggggagttctggctccccaacctaacccctagccgtcatctccacactcaccaggcccaccaggggagggggctggcctgggggtcttgggaaggcccctccccaggccctaggccacctcgcggaagccttcagcctccgcccctcactgcagccccttgggacttgaggggggccccaggggttctcaggacccctcccaccacctcccagtgcttccacgtctccaaaagcgccttcctgtcaccctcgtctatccctgcgcctgggggctggggtaggcgaggccgtggggactacccattttatagctggggaaacaggctccgagaaattgcacaaccgacctcaggtggccggcagtggcgtgcctggtgccctttctcctcttccgcctctgttgctccctttggtcctctggggcctcagagaggcaggtcctaaaggagggggggtctcctgggggcagaccgagggtctcggaggatagaatgagaggtttccagggctggcagagtgtgtgcgtgtgtgtgtgcagaagttttgctttcaaacaaatgaagatacaagaggcagtaggacctgggttggaacccaggggagcagactggggggctgttgcccctccctccatctccccacacccaccccaccccacagcagggctcctggcccccacccccctgtacataatttttaaaacctttttttagcgaatgaaatattgaagtataagattccttttatttttcaaaccaatggggctgtgtctattgtccccctcggtccccaggggtggggggccttggaaggcagggcggtgttggggggctggggggcaggctgaatgtgtgtgtgtgggtgtgtatgtgtggagtgtgtgtgtgtgtttccatggtaggactccagtcccagctgctgcctaggctcctgtgggtcctgtgggtccccctcccctgttcaccttccccaacagggctatagtttaagggtgtcccaggccttggctggttggctgggcccagctcctgggggctgggcagggcagggcagggccgggtccacttccattgttagcagttgtttgcagaattttctcttttaccattcctctctttttgttctcgcccagagtgggtggttttttgttgttgttttagattttcatgtgaaggcagttttttttcttttttaactccccatccccctatgcagggtgtcatttcaccatccacatccacatccttgtttgtgtttctggccctcgtcctccctgcctctcatctgcctccccaacccccacctacccactgctcccaggggtctctccaggggcagggggattttaggagatggggtgggggccagcccctactggacccttgtaatctgatttggagaccatccccccgatgggaccagcagccccgccggcccactgggggtccctcttaacatctgcttgttgcgggggtcagtcatgagtgccagggtctggctggggtcttggcactgtcttcctggccggggcctgaaaccttagcccccagccggcctgagtgggggatattgacacccccagctaaagcacaagcaccttagtcacccctcctctccccccgcctcctggcctgccaccccaccccagcgtttaccccaaagcacaatgccctggtcacttggcaagcggctgggcctgacggaggccgaggggcagaccggggctccagccagacccctgaaaggaaggtgctcccccacttccaggccttagttggggtgggggggccagctcctgggcctggggtcttctcacccccacccccttgtcctgggtaggcccctgcctgcccctctctgccttttcctcgggtgtccctcctcgagcccctgtggcattggcttgggtggcagagcccacttgtttcagggaccccaggaggtgccccctggctcccaggactgtgtgtgggtccggggggtggggggggtggggagaagggtcgggcagggggtgcaggggaggaaactcctcaccaggagagccaaagacagggttgtgccttaccccaggagccacccctgtaccccccttgccctgccattcaccctccacccctacccctgggcggcctgctgctttttccttctcttcctcccctgccctgagctgcatggttcccccaccctgggcagccaggaaggaatctgaatggagaatcaccaaccaccagagaaaaaagactgtggggccctcccctgccaactccccttccctggccgcccactcaacccacacctctttcacgcaggacaggctgcccaccctgtccacgtgaagtgccaacgccctccccaccctgggccgagcccccacccctccctgggcccccaagtgagattgcacatttaactactgtaaggagaggagcggcgttggcaaatgtgaaccatgagaatatcagtgatactgatgagaataaactaaacgcctttgt

SEQ ID NO: 292 - DNA, 3023 bp, Homo sapiens
agagccacacttctcactgctcacaatgagaggccaaagattacccttggacatccagattttctattgtgccagacctgacgaagagccttttgtgaagatcatcactgttgaagaggcaaagcgcaggaagagcacatgcagttactatgaagacgaggacgaagaggtgctgcctgtcctacggccccacagcgcgctcctggagaatatgcacatcgagcagctggcccgacgccttcctgcaagggtgcaagggtatccatggagactggcctatagcacgttagagcacgggaccagcttaaagacgctctaccggaaatcggcatcactagacagtcctgtcctattggtcatcaaagatatggataatcagatttttggagcatatgcaactcatcctttcaagttcagtgaccactattatggcacaggcgaaacttttctctacacattcagccctcattttaaggtctttaagtggagtggagaaaattcatactttatcaatggagacataagttctttagaacttggtggtggagggggacgatttggtttatggctagatgctgatttataccacggacgaagcaactcttgcagcactttcaataatgatattctttccaaaaaggaagacttcatagttcaggatctggaggtgtgggcatttgattgaaattcagactgccttaaaatataacattaaaaagactgggttcgatcagccctcctaaagctggctggaaaaagaagccccagcccagcctgcctcatcccaccccaatgcttcctttctgccatcatctcagagcatgatcacattgcagaaagattctggaaggtccatgtagagggcagacattgaagaaagaaacttaaaatccaggttgttgaaaagactttgtactcccacttcctccaaatccatacagtgaggaatcagagtgtttatagatatatgagttgaatgcaatttttatttttggtaactgtgaaaaataagatactgtggatatatacatgccttgtgtatttatcagcataattttcattaccaaaatgtacagctattatttgccatggaaaaggttagtctcatttagaaaaatcgaaagtgcacagcacttaaagggaatatatgaggttttttttttaaaaaaaaaaaaacttttatttattatttgtagtatattgtctgaaatgtgtcggcagttttttttcttttaatgtgtcaaatcttgaaatattaaatgtatacattttgtgctatgttttgggaacaaatctgtttgatttatatagttttatattgaattttttttgccctgattgtttagggtgataggtcttaagcagcatatatctatatatctgtatgtgggtatatagagatatatgtgtgtgtgtatgtatatgtacatatacatatatatgagtgtataattctaaatttctaaaaactcattatgaatgttcatcaatttgactattataggccagctttccatttagtcaataaaagcgtacatttttagttacttaccttgaacatattcgtgtgaaaaagaatacatcatttctcacagtcttaagttgatatttatagaaatgaatacctttgtgaacctagacttagaacaaatcctgcctttgaaaaaaaatgttttgcttcttacaaaatcatttgtgttaataacaaaaactttattttcggagtgttctttgtataacttttccaagcttttacattaacgagcaggcctctgtcttaaaagggactcagtatattaatttctgcattttttaaatcaaatgaaaaacgtcaaattggaccaattgtcttggtttcttgattcatttatttgagaaaaaaacaatacaaagaaatgcattcatatcaaaattggaatagaaaggaaaacctatttttaagatatcaacctattttcacatcataaaacatctattacataaaataaaggtccaggcatagtggctcttgcctgtaatcccagcactttgggaggccgaggcaggtggatcactcaaggtcacaagtttgagaccagtctggccaacatggtgaaaccccatctctactaaaagtacaaatattagccgactatgtggcgggcacctgtaatcccacctactcgggaggctgaggcaggagaattgcttgaatccgggaagcagaggttgtagtgagccaagatcgtgccactgcactctatcctgggtaacagcgagactctgtcttaaaaataataacaataataataataataaagacttacttaaccaatattattgattaccagacttttatgaaagccaaagactgcttgctagtaggaaaaaatttcaaataataaccaaagctgaaaaatggtctgtcataaattatttccccggtaatttttgaaaggaaaaatgtataacaagtactatttacatatctgcatttaaaaaagcaattcttagaatacttcctttacattattctcctattttagacattttgtgaaagagaacaaattgtccagtggcctcctgtcagatcaacaattattatactccttaattccatgcaaatttaaatgaatgctataaaattttaaatctgtagcctgggtgtacgtttcactcaagttctcctactgaggactcttgactaacagcatactggcagtttcaccttaacctgctcgttaaataatgtgttggtgtgagatatcaggaatgtctcatgatatcacgtttaccatttacaccatctgcaaccatatgctattaataaaatggaaaaaaacaaaatggtcattttgcatatacttcactctgacctagtttagtccatgatactataattgtgagagcatatccagatgctgtgttctctatgtaaaacagtattgtccattcagaaatgtgtgacccttcatttatggatattgactatatgtaatgcagtgctatcccaatattttcaataaaggactttatgcattcag

SEQ ID NO: 293 - DNA, 2552 bp, Homo sapiens
gcgaggatgagcccagggctccacggtccctacctagaccccacgcgattcctcacctgagaccccgtcccacacagccccagctggggcaaacagccccctccccacttcccatctgtaatttgcagggagatcgacgacgtgatcagcgcagacctgcagtctctccaggtggggactgttcctggaggggcggcatggggcggggatcttggccagcgctaaacttccgccatgcggcagggcccctacctgcccctggagctggggttggagcagctgtttcaggagctggctggagaggtgaggagggggattggactgagggggtatcccgctgcggcctccccttggggaccccccttcccccaccccagcatctcaggtgtctcattttgcttgctttttcctccctccgggcttaaatctcctgaccttttcttgaaatgctcacggctcctccctgcctcagggccttgggctcagtccataccctctcccaggaccaccctctccctcctgacacctccagccaggctcaggtctcatctaaggtgcccagccctggaagctctccctgaccacccccctgccccaggccggtctgctggccccccaccagcaaccacagcccagtgcttcccccgtcacagccctggccctgtggggacaggtctgtctcccccactcctggagctagggctctgaggctctgtcagcccctgccgtgtccctagcacagggcttggcccagagcagctggatgagtaaatggcctcacaagccctctttcctggactaggaggaagaactcaatgcctctcagctccaggccttactaagcattgccctggagcctggtgagttggctgggataggggcaggaggaggggtcttagccaggggtcctgcaaccagagccggtgccaccctatgtctatgaacccaccgcgctgctgggagttgggctcaggaagccagggctcagcctggcagcatctccctgcaggggatcttgtgtgggccccgtgacctgggccacggctgctcgcaagctccccttccgctgaaaggcaaggctgccttgagcacagactgggcaccccctgcctggatttgaatcccagctctgctaggcgcagcagtcactggctccctgtgcctcggcttctataatatgggactgacaacatcacctgcttaagggagtcacatccacccagcccttaaagtggtggccagaatgcaggaagtgctgtggtttgactttgtttttcctgtagccagggcccatacctccacccccagagagatcgggctcaggacctgtgagcagctgctgcagtgtttcggggtacatggggggcagtgcctgggtgagggagggagtggggaaggggacgttggggtctctcctccccttctggagagattgaccttaaccagatgcccccgacccccaacacagcatgggcaaagcctggccttacaccacttccagcagctctggggctacctcctggagtggcaggtgaggtgggagactgggcctcttcccagaaagagagaaacctttactaacagagacataggcaccctgtgggctatcaggtccccagggaacgagggggtactggactaggctgacttggagagatctggctgggatatccctgcccccacccagcctcagcttgtcctctgggtcattgctcttattcccattttacagattgggaaacagaagtcccaagtggctaggctgcttgctgggggtccacaccagaagaaggggagttgggatgggcaccaggctgtcttgcctgggaggccccattggcagccctcttcagggcatggagggcagccctgactcatccttcctgcccaggccatattcaacaagttcgatgaggacacctctggaaccatgaactcctacgagctgaggctggcactgaatgcagcaggtgtggacagggtcctggggtggtcgtggggacaggacctgttctctcccatcccattgtctccaagtccccctgctcagctgtggccgtctgcactgtggccatccacaggcccacaccttagcttgttgccagtccctggcaggggttgggtgaccctgaaagaggccaaataaggaaggagaagggcaaggggcgtgtgtggggtggggaggacatgaaagggggatgtgcctggtaggggttctgggggagggagaggcccctccaggaaggggaagattaggagctggtatctgagagggtctggcccccagggcagcatggtagaatgttctggattctggtgcaccggggttggaatcctcactctactgactccaggaggggccctgggcacttgacttcatctctttgagcctccattttcctctctaaaatggccagggcctggtgtggtggctcacacctatggtcccagctactcaggaggctgaggcttgaggatggcttgagcccgggaggctgaggctgcagtgagccgtgattgtgcctgggtgacagagcaagagcctgcctctc

SEQ ID NO: 294 - DNA, 2805 bp, Homo sapiens
cagtagttctttttatcgtatagattttattaatgtagcagtttattcattttcctgtgggtagatacctatcctctttgcagtttggactattgtgattaaaactgctgtgaagattctttgtggaaagctttttatggagagatatatagagagagatggtttcactctgtcacccaggctggagtgcagtggtgagatcaaggctcactgcagcctccaactccttggctcaaatgatcctcccaacccagcttccctagttgctgggaccacgggcgcatgccaccatgcctggctaattttttttttttttttacggttggggtctcactgtgttgtccaggctgatcttgaactcctagccttaagcaagcctcctgtcttggcctctcaacatgctgggattataggcatcagccactgctcccagccaacatatattttaatttctctttgacaaatacctaggagtgaaattgcttgatcatgggatggtttttactttttaagaaactaccaaacagtttcccaatgattatgccattttgtatttccatcagctatatgtgaaggcctagttgttccagacccttaggacttttaggggcatctggctttctcattctaggcattctagtgaatgtgtagaggtatcttataactttaatttgcatctccctgatgactaatgatgtagagcaattttcatgtgtttattggccattcatttatattttctttgaagtgtttgttcaagtcttcagcccttttttattggatcgtttgaatttttattgaattgcagggcttctatatatcttgggcatattcctttttcagatatatgtattttgaatattttcttcacgtctgtgacttgcctatgtatttttcagtagtatctttgggttaacagtagttttaaatgtttatgaagttcaattttattagtattttactttatgtttcatgctttctgtgtgctctaagaaatctttgctaacccaaaggtcatggaagtatccctttgtttgcttcctgaagctttatagttttagcttttatgtttaagtccataatctaccttgaatttttttagtaaataaattaattctcattcatttaattagaattcattttaattagatttaagttgcttttggttttggagacttttgaaaagaaaactgaattaggtccatttcactgtccgttgattccttttcctgaaagttgtgtgatgctggcagatcatctcgaagctctgcaataacatctgtcttgattttccattctgcagctttgttttgaacatgttttctagttgaagatttgggtaaagaatatactgctgttcaaatcaaaaccacaatgagataccatctcacaccagttaaaatggcgatcattaaaaagtcaggaaacaggtgctagagaggatgtggagaaataggaacacttttacactgttggtgggactgtaactagttcaaccattgtggaagtcagtgtggcaattcctcagggttcttgaactagagataccatttgacccagccatcccattactgggtatatacccaaaggattataaataatgttgctataaagacacatgcacacgtatgtttattgcagcactattcacaatagcaaagacttggaaccaacccaaatgtccaacaatgatagactggattaagaaaatgtggcacatatacaccatggaatactatgcagccataaaaatgatgagttcatgtcctttgtagggacatggatgaagctggaaaccatcattctgagcaaactgttgcaaggacaaaaaaccaaacactacatgttctcactcataggtgggaattgaacaatgagaacacatggacacaggaaggggaacatcacacatcaaggcctgttgtggggtggggggaggggggagggatagcattaggagatatacctaatgttaaatgacgagttaatgggtgcagcacaccaacatggcacatgtatacatatgtaactaacctgcacattatgcacatgtaccctaaaacttaaagtatattaaaaaaaaaaaagaatatactgctgttcttgccatttccaaagtggtctttggaaaagccatgtctgtccctttattatttttggtcccaaaaggaggattcaaaattgctgtctcaactgacttggacattccattagataatgagcacacatcacgttgaaccatgccaacatatgttaattcagactcttccacatgcctattaaatattcctagtgcacctgcatctatgtcaaatccaacatacaacctggctcctaacattgcagttccaagactaagcactccacagccacatcctagatctgcagccactttattttctacctcatcacatgtgttatggattgtatagagcatacgtgcttcactgtgtagttcttttctttccgtgtggatatccagtaccatttgttgaaaagacttccctttctttattgaattgctttggaatcttcaatgaaagaccatttaacccagcactttgggaggccgaggtgggcaggtcacaaggtcaggagatcgagaccatcctggctaacacggtgaaaccccgtctctactgaaaatacaaaaaaattagccagtcatggtggcgggcgcctgtggttccagctactcaggaggctgaggcaggagaatggcgtgaacccgggaggcagagcttgcagtgagccgagatcacgccactgcactccagcctgggtgccagagcaagactccatctc

SEQ ID NO: 295 - DNA, 3082 bp, Homo sapiens
agcagcagcccgggcggtgggcagccaggagcccccggcccggcccggcccggcccgccgagggccccagcgcaggagccgcgcccggacccaggcgatgccctcctagctagccgtcacgggatggagggcttcatggactcagggacacagacggacgccgtggtggtgctgtccttggctcaggccgccgtgcttggcctggtctccgaaaatgagctctttggagctaccataagcgccgaggccttctacccggacctggggcccgagctttcaggggcagccatgggagagcccgagccaccaggccccgacgtctaccagctggcctgcaacgggagggccttggaggagccggcggaggaggaggtgctggaggtggaggcagcctgtgagaagcacacccggcggaagacgcggccacctgtgcggttggtgcccaaggtcaagttcgagaaggtggaggaggaggaacaggaggtctatgaggtttctgtgccaggtgacgacaaggacgcagggccagcagaagcccccgccgaggcggccagtggcggctgcgacgccctggtgcagagcagcgccgtcaagatgatcgacctcagcgccttcagccgcaagccccggacgctccggcatctgccccgaaccccgaggccggagctgaacgtggccccatatgaccctcacttcccggccccggcccgggatggcttccccgagcccagcatggcgctgcctgggccagaggccttgcccacagagtgtgggttcgagccaccccacctggcccccctgagtgaccccgaggcccccagcatggagtccccggagcctgtcaagccggaacagggcttcgtgtggcaggaggccagtgagttcgaggctgacacggcgggttcgaccgtggaacgccacaagaaggcccagctggatcggctggacatcaacgtgcagattgacgactcctatctggtggaggcgggcgaccgccagaagcgctggcagtgccgcatgtgcgagaagtcctacacgtccaagtacaacctggtgacgcacatcctgggccacaacggcatcaagccacactcgtgcccacactgcagcaagctcttcaagcagcccagccacctgcagacgcacctgctgacgcaccagggcacccggccccacaagtgccaggtatgccacaaggccttcacgcagaccagccacctcaagcgccacatgctgctgcactcggaggtcaagccctacagctgccacttctgcggccgcggcttcgcctaccccagcgagctcaaggcccacgaagtgaagcatgagagtggccgctgccatgtctgcgtcgagtgcggcctggacttctccaccctgacccagctcaagcgccacctggcctcccaccagggccccaccctctaccagtgcctcgagtgtgacaagtccttccactaccgcagccagttgcagaaccacatgctcaagcaccagaacgtgcgacccttcgtgtgcactgaatgcggcatggagttcagccagattcaccacctcaagcagcactccctcacccacaagggcgtgaaggagttcaagtgcgaggtgtgtggccgggagttcaccctacaggcgaacatgaagcggcacatgctgatccacaccagcgtccggccctaccagtgccacatctgcttcaagacctttgtacagaagcagactctcaagacccacatgattgtacactcgcccgtgaagccattcaaatgcaaggtgtgcgggaagtccttcaaccgcatgtacaacctgctgggccacatgcacctgcacgccggcagcaagcccttcaagtgcccctactgctccagcaagtttaatctcaagggcaacctgagccggcacatgaaggtcaagcatggcgtcatagacatcggcctggacagccaagaccccatgatggagctgacaggcactgacccttcagagctcgacggccagcaggagatggaggacttcgaggagaacgcctacagctatgcgagcgtggacagcagcgccgaggccagtgtcctcactgaacaggccatgaaagagatggcctactacaatgtgctatagcgcaagctgggccacccctaacgggggccgggggcgagggcatgggggtgagacccatgggctgcaggctgcacctcctgcagccgagaaacaagctactgccccactgttctgagccctccctccccgagtcatttgcaccactagggacctttagaccaaatggagactgtactactggccccggctgtgagccagcacaggcccaggcatcccagcaagggaaggagagcacgcgaggcccagatctgggtctccctggcctgcttccgtggggagtgggagaagtggggccactggggacaggtcacaagggcaccggccctcggggtctctccaggcccagcagagctcttcaggggtcctgacactggaagaagagaccacttgagccatgtctttttcacggccaactcctgcctctaaggatgtctgagctcccctctggccagtactgcccacctctaccttgtccaggcccccttccccgccctgtcgacggaccgccaggcagggcactctgccttctacctcccggggtctcccatgcgctcctcaagccaggtgtgcacgtggccctggccctggcctgcaggacagctggggggcacccagcccccagaagacccctgtcctacatccctttctggaagtgagtgtccctacagtggattgcaacacatgtcgtccacttcgaccctagctggagtgcctcaccagggggccccactaggaacaaagccaggacaggccccgcgtcaggcacacactaacaaaaccagaagcatggggcagggcagggcggagtgagggcatcacaggggaccaagaagggctgtccttgggggaggcccaggaccacctgtcggggagggggaccgcagtcatttctcattcctcagtgtccaccttgcgacggggatagccacgagtcagcagcttcccggaaagagcaacgtatttt

SEQ ID NO: 296 - DNA, 3011 bp, Homo sapiens
aaaccttggcttcagcccggccgccgccaggcgttggcatcgccggggagagccttccggactccgggcggcggctggctgggggcgcgttccgaggcgccctcaggcagggcgcgggggcagagcctcgcctgggttctggaggctgcggggccatcgctccagatgcgaaagccatggagttgagctgcagcgaagcacctctttacgggcagatgatgatctatgcgaagttcgacaaaaatgtgtatcttcctgaagatgctgagttttactttacttatgacggatctcatcagcgacatgtcatgattgcagagcgcatcgaggataacgttctccagtccagcgtcccaggccatgggcttcaggagacggtgacggtatctgtgtgcctctgctcggaaggttactctccggtgaccatgggctctggctcagtgacctacgtggacaacatggcttgcaggctggctcgtctgctggtgacgcaggccaatcgcctcacagcctgcagccaccagaccctgctgaccccatttgccttgacggcaggagcactgcctgccttggatgaggagctcgtgctggctctgacccatctggaattgcctctagagtggactgtgttgggaagttcttcacttgaagtatcttctcacagagaatctcttctacacctggctatgagatggggcctggctaaactttcccagttcttcttgtgtctcccggggggagtccaggccttggctttacccaacgaagagggtgccacaccattagacttagctttacgtgaaggacactccaagctggtggaagacgtcacaaattttcagggcagatggtccccaagcttctcccgagtgcagctcagtgaagaagcctccttgcattacattcactcatcggaaacgctgaccctgaccctgaaccacacagccgagcatttgttggaggcagatattaaactcttccggaaatacttttgggatagagcctttcttgtcaaggcctttgagccagaagccaggccagaggaaagaacagctatgccctccagcggtgcagaaactgaagaagagattaagaattcagtgtccagcagatcagcagctgaaaaggaagatataaagcgtgtcaaaagcctggtggttcaacacaatgaacatgaagaccagcacagcctagatttggatcgctccttcgatatcctaaaaaaatccaagccgccctcgacattgcttgctgcaggccggctttcagacatgctgaatggaggtgatgaagtctacgctaactgtatggtgattgatcaggttggtgatttggatatcagctatattaatatagagggaatcactgccactaccagccctgaatccagaggttgcactctgtggcctcagagcagcaaacacacccttcctacagaaaccagtcccagtgtgtacccacttagtgaaaatgtcgaagggacagcacacactgaagcccagcagtccttcatgtcaccatcaagttcgtgtgcttccaacttgaatctttcttttggttggcatggatttgaaaaggaacaaagtcatctaaagaaaagaagttctagccttgatgccttggacgccgacagtgaaggggaagggcattctgagccatcccacatctgttacactccagggtctcagagctcctcaagaactgggattcctagtggggatgaattggactcttttgagactaacactgaaccggattttaatatctccagggctgaatcccttcctctatcaagtaatctacagtcgaaggaatcactgctttctggagttcgctcacgttcttattcttgctcatcacccaaaatttctttaggaaaaactcgtttggtgcgtgaattaacagtatgcagttcaagtgaagagcaaagagcttacagcttatcggagccaccaagagaaaacagaattcaggaagaagaatgggataaatacatcatacctgccaaatcagagtctgaaaaatataaagtgagtcgaactttcagtttcctcatgaataggatgactagccctcggaataaatcaaagacaaaaagcaaggatgccaaagataaagagaagctgaatcgacatcagtttgccccaggaacattctctggggttctgcagtgtttggtttgtgataaaacactcctggggaaagagtcactgcagtgttctaactgtaatgcaaatgtgcacaaaggttgtaaagatgctgcgcctgcatgcaccaagaaattccaagagaaatataacaagaacaaaccacagaccatccttggaaattcttcatttagagacatcccacagcctggtctctccttgcacccttcttcctccgtgcctgttggattgccgactggaaggagggagactgtgggacaggtccatccattgtccagaagtgttccaggcaccaccttggaaagcttcaggaggtcagccacatccttggagtctgagagtgaccataacagctgcagaagcaggtctcattctgatgagctgctacagtccatgggctcttctccctctacagagtctttcataatggaagatgttgtggattcttctctgtggagtgacctcagcagtgatgcccaggagtttgaagcagaatcttggagtcttgtggtggatccctcattttgtaataggcaggagaaggatgtcatcaaaagacaggatgtcatttttgagctaatgcaaacagagatgcatcacatccagaccctgttcatcatgtctgagatcttcaggaaaggcatgaaagaggagctgcagctggaccacagcaccgtggataaaattttcccctgtttagatgagttgcttgaaatccacaggcatttcttctacagtatgaaggaacgaaggcaggaatcctgtgctggcagcgacaggaattttgtgatcgaccgaattggagatattttggtacaacagttttcagaagaaaatgcaagt

SEQ ID NO: 297 - DNA, 2259 bp, Homo sapiens
cctttcagctttgctgtctgcagatggcttgagtgctaatcagctcaatggaccctctgccttatcacaagggcagacggccagtgcgacagccttctgtatcccgagctcttgcccagtgtcccggaagaatcggatcacacgcaggcttgaaggatgaatgcaaggtccacagcgtccaattcatggagttctcggaagtggagaaccaggatgactactacagcacagaagctggctgcatccacacccaggaccagcaaggggtgcatgtcatgtatgaggaagccttgagtgatctcaaggaactagaggcagagttgctgcttgtggctagccattacattgagaaagaaaggggtcacaaagtgggcagccagccaaagagtggccaggagtggggatgggcccatgcagatgtggacagatttgctgtgctgtatgacacgtggacttgggaagcagctcttctggaaaacaagcgccagcttcttgacagttactttgaagcctaccagcacacgttggaccctgaggagaggtttaccttagcacaagtgatgacggacatcgtgcaccgacgcccgaggtttgatctcagccacccctatttcattaaggcctaccaagaggaatgcacctgcctgaggcttcacctgcagttagtgaggggcatcctcaaccagcagatagaacgtcagcgggagtatgtccagaggctttggcgagaggatcatctggacaatagcaatacatttggacttccccttaatatagtttgcaaacaacttatttccatcaacaatagctgcccagcttcaaaaaatgtttatctgctggagttccacccttccctcagcctggcagcacttatccccaaagccctagagcatctcttccaagaggcctgccatgcctgcagacccacatcagccagtggccttgcctccctggagcgacatgtcctgcagctggccctggacctgtggctcaccccagccacgcctgaggcctggtacagtacacagctccagaaagatctgttttcagctaaagttatgggagatccctttctcgtgggggagataggcctgctggcattcaagtctgcagcagacgaaggacagaaacaaggccaagactctcacgtgctgctcttggagatgttttccaaacttctggaactcttgaccctccgccaccggctgatagaaatgagcctggagagtgcacacttagctcggctctataaagaattggcatgggagatgggttttgaagagttccatctgtatctgaggcctgttcactttgaatttgcatcacacggggacagggcagaccagccacctcctgtgtttataacctctctgctggaggacagtggtcgggtagacagatattctcctactgctcttgtcttagccatctctgaggtggatgataaccaaattggcaaatttagtttttacacaaaggaagccattcttaagcttttgctgcattcaggagtggaaaatatgcaggtgactcttgcatgccaagctgctcagaaaaatgctttgatggcggctgtccagcaggtgtacttctattgcacccctcaagggagctgtcctgctaatgtcaaggtcagcctgcatgacagagaagccagaggcatctcatcacctccaccagctaatgtcaggctgcccctttcttccttccttttttcccttctccctttctccctttctttctcccctgccccctactttctctttcctatctctttatcttccttactttccttttttcttcctttccttgtttcctgtttgtgaatcaatgtatgaccaaatccttattggatttcttaattttcagttatacttttttctgtatttcttattttttggttattgagacataattcatgtgatataaaacataccacaggctgggcatggtggctcacacctgtaatcactgcactccaacctggcaacagagtgagactccttctcaaaacaaacaaacaaacaccatattatagtatataattcagtggtttttagtatattcacaagattgtgcaaccatcatcactacctaattccaaaacatttttatcactcactctcaaaagaaacgttgtacccattagcagttacttactttttctccctcccctcagtccctagcaaccactaatctactttctgtttctatagatttgcttattctggacattgtatataaatggaatcatacaac

SEQ ID NO: 298 - DNA, 2449 bp, Homo sapiens
catcttctctaagtactccctcaaaagtagcaacaaaaactgtaagtgacatacaaataagtgtaaaaatcaaaacaccatttgggaactgtagtcattgaagacgttttagattaaacaacaaatttatacccaaatacctaatcatgttgagttgcttaatagtttctctcaataaaaattggccagtactcccaaaatgaaaaggaatctgagggaatcatgtagttcaatcagaaccaaaaccatttctgcttatatggaaaaaggaaagtgtgtgattaggttgctccacaatttttcacctaaaatgaagaccaacatagaaaactcatttcatatagaatttatatttttagcaaaagggtttttatactgttaaaagtcataaatacttcctatgggctcttcccacttaaaattgctgttgtgatatttttgtttatacatagtcactttcatcaaaggtttttaaaaaatattttcttgtgtttggcttattattctttattattttctaagagctaagtgcctcaggagtaattttactattactttatgggcaagagttcagaatgcatactgtatataataccaatattttatttcaacttagtgctattatacttttaagaatgaaggtgagggtagaattcctctgaactatcaagggaattaatttattcgtacctcactggtttgacaaaggaattaaattaccttaacaataaaaccagagtacaaaatgaaatttaggaccagagaaaatgcaaattaaactgaaagtttaagacagggagaaagttagaatgcaaatgcatagaacataatatgttctacccagatattatattaaaatggctaattttattgactttcctggtagaaaaacaaaggaggtaagctatctatgtagtgatatctcagctagtgcatgtggaaatgtgtgtgggcagtttgggtggtcacaatgactgaatgcctagctggcattaatgtctggaagccagggattccaaatggctatcctggacaggggactgggttgagggggccaatggggaggcactcccatatgcaaagaattgttctgcccaaaatgccataacaccctgctgagaaaggctgagtgaaatgtttgtccttaaggaaaaagaaaaaaataacactggttctaggagaagcaaagcttttcctagcactcactttgaaggaaatttgtcacttggtgttttttggggaccgcagaacgatatagtgaagagtcagttgtcttataatatccctagaataaatctaataacagactttgaaaggctatcctttctagcatttttcagtgtaatccataggcccagtgccagactacaactcgtgaaagcattctttcatgacccaaatatgctttttatactcatcttctcatttgatccaggaatataccatctctcaaccaacactttaaacagcatttctacagtttgactgccttgtatgtgccatctgaaaaagacaggcggaattatgttgggttttccagaaacttgctttgttaggataaagagtatatcagaatcttttaaacaggtagctaattttttattaggtttttttttaaactgtgcccttttttaaaaccatgtccttctccatacaaacaaattttaatgtgaaaggtcagataatttggcaaaccgctgtagtggatgttaatgaaataactggatatactggtcattagcttatctaaatatttatcagagaagaaatttacaagcatataatttctgcaacaattgatctgagaagcaacctgtttcttaagcaaagttataaaaacgaaaatgctggaaacacagttggcctgtgagctctttcagtcgaaatatttttgaggtggacaacacaatctcattagaaaccttgtctcttcacagtgattttcagagggaggggcatctcttgctaggaaacaaattggaatacctactccctgggggttataatatacccttcgaggccatctatctccctcatcacacatacaccaacttaatataaacccttttcagagaagataaaggaattagctgtttaatgactacattgtggtgaagttttaaagccactaaatgggaggtccattcccatggcaccattgctagcagcccaaacacagtctgcagaaacactcatttcagtggctgacttcagtcagtaattgatacagcaaaatttcattctaacatttcaaagctgtctcacagaatttctgagaaaaaagtgttcccaatcactgatttcatcatatcgcgtcaatattacttcagcacctttaatgaggaaatcattgaaacacactcatcatctttggctagagagatttatgttactcagaggttttgcagctggtgtggcagtgggtggcaatagtgaatttgcagttttg

SEQ ID NO: 299 - DNA, 3344 bp, Homo sapiens
gtgcttcggatggcggcgggaggttgatggcgagtggtgctgaagggacagctccagcagtggctgatttgggggagaaacaaaatctgcagatggaatccgagcagggcgacttcaccttcaagtggtgagctctcctgacctgcggccagtctccactccattcacggccagccgatctgcccgctcccggaggggtcgggcagtgccggctggacccgccccgagctccatggtttgcccaaccctgcgcgatggtgactctgggcgcggaggttggcgactggcaaatccgcagattacagaatgaaggcggggagcgcggccggcggccggcgggggctttctcccccaccccagcgcccagggaagcggctcaaccacctgaatccggaaaacgccaacaagtagtttctcgtcggagaagggcggctcacctgggcgccaagactcagtcccgctgcccagagaacctcgtccactcggaaaccaaagcagaaccacttttctctcggtctcgttaagtcatgtctgagtcacagagatgggcaagatcgagaacaacgagagggtgatcctcaatgtcgggggcacccggcacgaaacctaccgcagcaccctcaagaccctgcctggaacacgcctggcccttcttgcctcctccgagcccccaggcgactgcttgaccacggcgggcgacaagctgcagccgtcgccgcctccactgtcgccgccgccgagagcgcccccgctgtcccccgggccaggcggctgcttcgagggcggcgcgggcaactgcagttcccgcggcggcagggccagcgaccatcccggtggcggccgcgagttcttcttcgaccggcacccgggcgtcttcgcctatgtgctcaattactaccgcaccggcaagctgcactgccccgcagacgtgtgcgggccgctcttcgaggaggagctggccttctggggcatcgacgagaccgacgtggagccctgctgctggatgacctaccggcagcaccgcgacgccgaggaggcgctggacatcttcgagacccccgacctcattggcggcgaccccggcgacgacgaggacctggcggccaagaggctgggcatcgaggacgcggcggggctcgggggccccgacggcaaatctggccgctggaggaggctgcagccccgcatgtgggccctcttcgaagacccctactcgtccagagccgccaggtttattgcttttgcttctttattcttcatcctggtttcaattacaactttttgcctggaaacacatgaagctttcaatattgttaaaaacaagacagaaccagtcatcaatggcacaagtgttgttctacagtatgaaattgaaacggatcctgccttgacgtatgtagaaggagtgtgtgtggtgtggtttacttttgaatttttagtccgtattgttttttcacccaataaacttgaattcatcaaaaatctcttgaatatcattgactttgtggccatcctacctttctacttagaggtgggactcagtgggctgtcatccaaagctgctaaagatgtgcttggcttcctcagggtggtaaggtttgtgaggatcctgagaattttcaagctcacccgccattttgtaggtctgagggtgcttggacatactcttcgagctagtactaatgaatttttgctgctgataattttcctggctctaggagttttgatatttgctaccatgatctactatgccgagagagtgggagctcaacctaacgacccttcagctagtgagcacacacagttcaaaaacattcccattgggttctggtgggctgtagtgaccatgactaccctgggttatggggatatgtacccccaaacatggtcaggcatgctggtgggagccctgtgtgctctggctggagtgctgacaatagccatgccagtgcctgtcattgtcaataattttggaatgtactactccttggcaatggcaaagcagaaacttccaaggaaaagaaagaagcacatccctcctgctcctcaggcaagctcacctactttttgcaagacagaattaaatatggcctgcaatagtacacagagtgacacatgtctgggcaaagacaatcgacttctggaacataacagatcagataactgcaaagaggttgtcattactggttacacgcaagccgaggccagatctcttacttaatgacttggggaaggcacaaaacatgagagaaagtgttgtacagaatttatcatggattattgactgctgagaaagggacagtggaatttagccataccaaggactatactggaaacagacttctgctgctgaatgtgccctgatgtgaccaggttgcacttggaagagatcctcgcgtcttcatgaggcacttaaagcttataaaagaactgcggctggaactcatctggtgctccccatgagagtgctctgcttgtagactggccagtgtccatgaaacaactgtaaataccaacatgtgtgcatgggtcaacagtcttggccatttctcatcaaaagaagccaaattcatgatcaacatctctgaagtttcaagtaaggcccacacttctttgaattactcttcatgggcccacattaggttgtgctgtgaattacttaaggcagtgatactgatgtagtatagttttgtcttaatttcccttatttctacttctttggttgaatctatgaacttgattgtataattttcttataaattactgatgtaatcagcttgtcaattatgttgtgaaattgttagtattcatttatcaaaaatgacctatgtttagtcacatatttgtttagttctgggaaattgttatagcttaaatggaactcaccaacattattcatagtttaagtcttttatcattattacctcaattataaatattacaaaaacataattctggcaatgagagtatttttttattcaatgatcaaggagcaatgtcagtatatagtagaatatcaattaaattatatcctaaaatgtatattttgcataaaagagatattctttaatcaattacttttttgtgagttttgtggcaaatgaagcttgtacgtgtctttaaaactgttgtagatgaaactgtataagatttttacatcttgcttaatcaatattttcagagtctattagttcccctgggattctgaatataacatatagcctattataaatccctgtatcgtggaccttttgtgaacatttcaaggcgcatgcacaaccttgatgataaccagtggaaatgtaactaactgaaatgaagaataaaaggcaaatgagctgggg

SEQ ID NO: 300 - DNA, 1912 bp, Homo sapiens
ctgcggtgtagctttgctgtctcctgtgtcaatgtcaggaggacaggctgagctcctgggaccagaacccctcagattccaggaggagcagagaaagcacagatggcctggagagtcccaggggtgaggccagcaagtactttcttcccccaggtgctcagagcatcctctgagttgccaaacagactcccagaggggtcaactgtgggccctaaaccagacagcagctgggaagcaggctctcaggggaactggggtctcaccagctcaggagcaggccaggactcctcagcacagaagctgggaatcttgagtgtccagatcagcctgaaaatctggacttgggaaaagccatctggctggggccacctgcatgccgctgtgactggggcatcctgctgctctcctctctcacaaggtggtgccatctgccttgtcactgctcctcaggacaagcctgactgctctccctgcacctctggccattgagaatccggctgctccatcgtggtggaaaatcttccatgctcagagggacaccttccgacactggggttctggagagcctggtgccacgagacaaggagccatgtgacaagagggggaggggtaggagtgggacacacaagtgtggtttgggacaaaatagggcctgaggctcacgtgttataaaaccccctttgctctgcctgtctccttgaattgtggccagtttcacatgggaagcaacgtcgagggacagagagactgcaggtgaggcctcagggctctgcattcccatccccaaaagtcaccagcgtgtggccttgtgggtgtcactcccctctgtggagtcaactttgtgcagtgacatgcagaggctggactgctgccacctcatgcccctcctggcatgatggtcgcatgaggctgagtgatttgcaggtctatggggaagtgtcccgcctcagagatgtggaggagaagccaggcagagcgctgttcattccatttctttctttttttaatctaaaggagggaaagagctttattaactcaaacaaagggatgccatacaacttcccaacgatactgtgcagtgatggtattagcttccacctgttcttccattctgggggcagggtgtgaggactggctgctctgggagacgctctgagctgagagagaagaaatagctatgctaatagctgccccttactgagtgctcactctgtgtccggggctacaccgagtgcttgcagcgggttctcaggcgcacttagaacagcactgtgagaaaggcacttttgctgccccttgtgtacagatgaggacaaagagggacagagaggtttagaaccttgacctatatcacacagccagtgagcagacgaccggaatttgaatcctgcaatctctctgcagagcctgcgcatttaataccacacacagttctggcctgcagtgaatttggttgttcttcctgcctggggtggtcagtttccaagcctttccagatggacttctgcagcccaaagctgcgtgctccccgtgcaggcccttgtcagagcagagaaagatggctgaagttgttgtccatctagatttttatcttcaaaacattgctgaaatcaatctctcttctaccgtctccgatttcctttgtccttatgggtggtctacaactttactatcattttagtggatgcaagaggagtggagataaacacgtgttcagcctgctgtgaatctctgcagtggctatgttgtttcttaaacagatgtaatgaggcatctattccctgtgtgccatgtgccccttgagtaggggacatctgttttgtgttgtctgtgtctccagcattagaatggaacctggcacacaatagaggctcaattagtatttgttgaataaatgaacattaagaaacag

SEQ ID NO: 301 - DNA, 2243 bp, Homo sapiens
taatcttgcagcacctcagttttcccatttctaaagtgtgctgctaccttccatgcagggcgttgaggggcttccctacgttattacgcacaaagtcctcctcacagtgcctggtgtgtggtcagcatttatatgcctggcaccaggccgggggctatggaggcaaatcagctgggccctgccctcacagagttgacatcacttagtacgtaaccacattgggatacatgttttgaaggagaggacagtgtgtctggccagtgagcaacagtgggccatacgtctccagggaacccccgtggggtgtgggaggagggaagcaggtctgtcctgggggaatgtgtgggaccacctctgccctgcttggcagtaggtggatttcaggaccatgggcctgtgctgtttacagaaccttgtccaggtgcccagctgtgggagggcagcatggagaggaggaagagggggcccctagtagcaagcttcagaaacttgccacttcaggctagagagctcgcaccctcccacggcagcagggtagccatttctccctgactggggtgtccaccatggtgctctgcagccacctctcacttcattaagagtccacagatctaggagcagaggactggtctggagctgggcaagggcaggcagcaaatggggagtttttgctgtgtgacctgaggtcacttgcctgccttctctggactgcactgtagggcctggagacctgttcccctgttccaatttccccacctcagtgaaggcacaaccaacagctgctccccgggcatttccaagaccctccaggcccccagttctgaggactagggtggaggcagtgtttctccccagcatcaagtgaccagagaagtgaagtgaccccactgccgccacacagagccacacagtgcgatgtctggagctcctgcctcctgcaaggtggagggtggggcttggccaggagtgaccagactacagagtgaggggtgtgcttgtgggggtgaagggttggggtgagaactgagcccgagtcgaactcatcctcctctgccctgatgcactgtgcaacttgggggagtcactgtccctctctgggcctcgctttccccatcttcgataggacttggctctgcctggccactcctcctccaatgggggaattcctgggcttgcctctgtcttggctccagctcaggtgtcagtctcagccctgtcccagccaggaacaatgggccaggcagggccagtcaccccctgtccctgggggctccacccacggccctggactattttcagcccttgcagatggagtcagaagaggattttccactcccagtacaatgactgccctggaccattgtccagcagtgacgcgggggacctgcctgccccaaaatatctcctgcccctagtttccaagcctctttgccctgctcctcacctcctggccctgctccttacctccccaccctgatgtcatttcctggggctcttaactcctgaaggccattgtgaaacatcacgtgagactcctgggagacacaaccagttggaatgagttttccctcctggcagggaccccagggattgtttggctgcttagtgggactggtggcccagagagggctgtgccttacccagtcacacagcagtcagtgtgaagcttaggtgtaagcccagggctctttggctgctcccactgcctcagccaacttcattagctccagtctgtggctcctggactggagctacagtggtgagagctcaccactgagcttcctgggatgggcacctgggatagcagcccaagtggtgtgggtggagaggtgcagctcatgctctgaccttggagtgagcccagtgcaggggcctgaccttaaaccctttctccccactgagtcccatttttaccaaatgtggctgttaggaactgaatgtttgtgtcccccgccccacaaatccatatgtcaaaatcccaactgccaaggtgatggtattagaaggtggggcctttgggaagtaaccaggtcctaagggtgcagccctcatgaatgggtttagtgcccttacagaatggaccccagagagctcctcaccctctttccaccatgtgaggatataatgagaagttggcagtctgcaacctggaagaggtccctcaccagatcccaaccatgctggcaccccgatcttagacttccagtcttcagaatggtgagaaataaatgtctcttgtttct

SEQ ID NO: 302 - DNA, 2018 bp, Homo sapiens
attgagatgcaaggtgtatttgttgttttttttttcctttgtatgacacttacagagagtactttagttcaaaaaaatgcttgccttcttctctttgtataatttacaacatggagtaaacatcttttctatgccttagtaccttgtcttgctcctttctaagtttggatcagcttccaatattttatcctttgagctttccatgacacaaaattcctccaagagttcctttaaagtgactttgtattctataatgtcccttcctctgggacatcttcatcctttttgtccccatgaccttccttatttatgctaatacatttgccttccctgagttcctctacactacctatctctcaaatggcagcagggtcaacatcaccatagtctgctattctttgataactccatttatgctctctttgaagttcacttctggcattatcacttttcatttctttgctgcatttttatctttgttggccagttccctcttttcgtgatacattgttgtaaaatctcatgggagttagccacctggagacagggaggcaacagaactacacactttgctgtctgtgcataaattgaagagcagaagctcagtgaccaatcactgatggactttgaaaggagtgacagtaattggccctcaattatgatgcttatcttttatttatgtcgtgatttctagactgaagagttagcaacaaagtttataccatatgcaactactcgtgatcaatataccaaggtactgaaaaagaaccatgtcactgggctactagtgttatttaactgaatcatgcagagtgagggctgcctgtattcttgcctttgttttctagaactgaagcatggagggtcaaataatgcatccaatgttatttagagctggaatttgaatccatgcagttgggtgcagagtctgagctcttaatcaccttgaccattacattaccttgctttttatttcctttggggaaatgtttcctaaaaaatgtaacgcccctctgtgctgctatgtgggaatcagaagtctcagtgcctgatcagacctccttgtccaggaacagacccttggggctgacccctccttgggacccaatgcccttctttctgcactatccaggtaccggggagaccaggatgccactatgtctatattggacatatccatgatgactggctttgctccagacacagatgacctgaagcagctggccaatggtgttgacagatacatctccaagtatgagctggacaaagccttctccgataggaacaccctcatcatctacctggacaaggtctcacactctgaggatgactgtctagctttcaaagttcaccaatactttaatgtagagcttatccagcctggagcagtcaaggtctacgcctattacaacctggaggaaagctgtacccggttctaccatccggaaaaggaggatggaaagctgaacaagctctgccgtgatgaactgtgccgctgtgctgagggtgagttccctggagccgggaacagagaattgcttcatacaaaagtcggatgacaaggtcaccctggaagaacggctggacaaggcctgtgagccaggagtggactatgtgtacaagacccgactggtcaaggttcagctgtccaatgactttgacgagtacatcatggccattgagcagaccatcaagtcaggctcggatgaggtgcaggttggacagcagcgcacgttcatcagccccatcaagtgcagagaagccctgaagctggaggagaagaaacactacctcatgtggggtctctcctctgatttctggggagagaagcccaacctcagctacatcatcgggaaggacacttgggtggagcactggcctgaggaggacgaatgccaagacgaagagaaccagaaacaatgccaggacctcggcgccttcaccgagagcatggttgtctttgggtgccccaactgaccacacccccattcccccactccagataaagcttcagttat

SEQ ID NO: 303 - DNA, 2123 bp, Homo sapiens
gttttcacgaacccacagagacagaaacctgcggcaatggagaaaatgctaatacagacatcttacttcagtgtctggcaaacgagattatacactgaggacgatgtagacgtcagcttccctgacgagggaagctgcagctttccgatgattcctgaagcctacattctattaatttccccgaagagccctattgcctaatggaacattgtgagaatggccagtctggaaagcaggatcagtggagctggcttctggctcactggctttcagctgagccttccaaatggctgggaatgaacatccagttagaagcctcggtttggaacagtggttctcagacttcatggtgtgtgacagtcactggggaacttgtccaaacacagattgacagaccccatcccaaagtttctgattcagcggctctagggagggccctaagaacatgagctcctcttcccaagctcccaggtgacgctgagttgctgccccgggagcccattttgagaactgctgatctagggtgtgctggggtaactctggctgtcagaggggtcaggacacttggtctccttctctttggtctcactgagaatgtgaatgtgaatggccttttgaggccacttgcactgagtcctctacagggcacactggacggcgggggagcgtctggaaggggtctgcacaccggcttgcagcctcagtgatgctcatctagtgcgggtcctgcgtggtccccagaggaacccagtgagaaatccggaggagacggacagagaggaggatgacttccttttgtattacaacgtcatgattataaataatcataatagagtgcccattttaaagtggcctttccctccaagcacacaggagactccctcagattccctaggagaccaaagaaatactgaatctactccacaaaaggtacttggttggctgcttccccaggaacatccctccatcctcacgggtatcccgccatggacctcggggagccctggacaaacatgcatgtgtgcgacgcttgtaacaaacctgcaaggttaccaagggcttcaacgacatttattctcccagcaagcaagtcatgagtgtgtcctgccttatctatggtggaaggaaagtacacagaactaggacgcacgtgtctatcccggtctctggtctcttgtccagcgatagcatcctccgggctgcgtgaactcagcttggggctgtgaagggacagccgtatatcttgtcaccgagggccaccgcaatggggagctgcacctgacacatttacatttcacaaagatatctgccactccgtggacacggaccagcaagaggcttggatgacctaggattctgatgatgtattctccatttcaattctagactgtgtgcaaacttcattctttcttctacgttctttagttatgactattacaggagaaaggaaaaaatcgaaggtgaaggaagcaaagacagaaaggaaggacggtttggtggccagagcgaggtcttcccacgtcactcccgggacgtgtgctgacgcgttgctcctccgtcctgcagaacgccgtgggtcgtggcagcagctgcagctgtttcacaggctgtcctccctgtagactaagcatctactccgcgctatagggcaatgcgagacaaaaaagacccccgggagcttgccatccagctgaggaagcctaattagccacgcttcctgtagcatacagtggtcactttctcctccatggaagtatgtctgggcccacgcaccccactgcttccagagcctccacgcgctgtgtgtcccccgtggcgctttgcttgccaccgagccctgcgtcttgagaactctgaacggtttgttgtagtcaagacactcggagatcctagagacgcgaaaagcaggaggggaacgtgtgacggccactgcgaggctcagggagaatttaattcaaatttggatttttctcactcttacgctttggggcaatactgttaaatggtaaatatatagccattgtatgaacagcaatacacaaaggagttatttggaaatgaaagccttattgaaggcactggaaaaattaaacaaataaatgtttcctttagattgctcattc

SEQ ID NO: 304 - DNA, 2024 bp, Homo sapiens
atagagcccagttcctgtttttttgttcgttttttttttttttttttttttagccgccttcatttggatactggggacttcttttccacttcttcttcttcttctattttattttgagacagagtctcactctgtcacccaggctggagtgcagtggtgcgagctcagctcactgcaacctccacctcccaggttcaagcgattctcctgcctcagcctcctgagtagctgggattacaggcacccaccaccacgctcggctaatttttgtatttttagtggagatggggttttaccatgttggccagagtggttttgaactcctggcctcaagtgatccacctgccttggcctcccaaagtgctgggattacaggcatgagccaccgagctcagcctccacttcttattttgattcttttctgttttgatggtgagaggaaagggtgatttacccaatactgtcacagaaaaatgaaactgtgactggttttcacaatgtatgtagctgatctcatgttctcctattattatgtttctgacagtgataaaatatcactctccctccctggggcattagaggagtcctcacccacccacctcctacacaagtatcttttagggacagtggctcaccattgtggactttttgagtgtccacctgatattacaagttgcattgaccagaacacagattttgctcttctgtgtcaatacccatttcttttctgaaggtcagaagttggttaagggtttgggggaccagctagacactcttcttagtcccatggagctgactggaagttccatgaggggaggaaattgatgtcaaagtgtcattttaaagcttaagctgaaagtttattttttaaattctcattcattcatttagcatatattgattgagcatctacaatgtgccagttgtagaattccatctcagaagagacttgacttgtggatggtggaggggcagtcctgctcggaagcagatgatgtgaaatgttcctttccagtctggttcacgatgtttaacagatttgtcaggtcaccactgtgaccccaagctttgctggcagattgttatatagtatttactgagagccctgctatctggtaaaggcagttaaaaagcctgcaatctcgactcatttccagcatgaacagactggtccttgctgctttacacaataatcaaagctaccttttatggcgtgctcgccactcccaagcactgggcgaagtgctttacccgtcttcccctccgcgatgcctcatgcccactttagcagatagtactgttagcattcccattttacagtggaggaagctgaggctcagagaggttaagcaacttggctgaaggccacaccaccagcgaagtgcctgagccaagatttggactcgagtccatgggacccccacgctcgtgagctgactgctctgctccactgggtcccttcatgaggtcgtcccacagcactgctagttccagggcgagtgccagcacatggccccactgggagccggggcctgacttaggtctactggaaaaagtgtcacctttggggacactcaaggacaggctggttggtttcgttgtggattttatatactcatgccctaaccctgtgttcctggtttctataaggccccggggaaggtgcaaggaatttgcaaatagggcctgtatgacttatttcctaggacacgggaagcttttcttacctcctttctaccctcttctccaacctgaactcccaagtttcttctcctgaaggtctttgcactataagcgccaaggagcccgtgtgcgtggcaggggcggctgggagggtatctggagaaccttagtgaggcctctggcctagccagagaggcaataagcttggggacgttccgttctgggttctgacgttgttggttctgacgtcgttgtgctcttttgtaagaggaatttcataccttggagacgctttgtacatatttgtaatgactttattaaaaaactgattgtgcacttct

SEQ ID NO: 305 - DNA, 1752 bp, Homo sapiens
caaggagttcggcctcatcgacaccaaggagctggagccactgaaagaaatgaccgcccggatgtgccactgagagccccgcgggtctcccggtgcccgaaccgccgctggggcctcggagacttggaggaggacgctctggaaccatcatcccgcttctctccggcctgagcatctcagggagaccaggggccgagccgctgagcaggtgttggtcctcaggagctccaaccccggacggcagatgccttcctcagtctcgagcctcagtctcccgtctgggactaaaacgtgaactctgtaattctatgtgttactagcaaccggaaaagcccactgtgtttttaaaccacttccactttccaggaggctggatggcttccagggtcactccttgccctgggtggctcccaggctcctggaacttctgcctccacctcgctggggagcccccagggctgctgtggccacagccctgcctgggcctgtctctcaagggcacccagcttgctcggcctcctacatgtctcccgttggggaggcaagaggctgaggggcttccgagcccctgagagcggacatctcctcccgcaggcctttactccgcactccccactggcagccgctggtgtctcttcacacagaggcacaacctggacccaggcagcctctttcctccctccccaatctcttccatttttctacagatttttttttttttggtcatactagagacaggggtctcgctgaactcctggcctccagtgatcctccatcctcggcctcccaaagtgctggaatcacaggggtgagccaccgcacccagccctctctcttcctcaatgcactctgcttcttccgttcttccgaaacattcagctgactgtatccagggcttcctggactcctgggaccccacgtcctgcaccccggcttctgactcatttcctaagggcccctttgtgtatcataaagggtttgatttttatagtcacatttacaaccatcttgagatttttattttttttgaacggagtctcccactgtcgcccagactggagtccagtggcacaatctcggctcactgcatcctccacctcctgggttcaagtgattctcctgcttcagcctcccaagtagctgggattacaggtgtgcgccaccacgcccaggaaattattgtagttttagtagagacaagatttcaccatgttggccaggctggtctcaaactcctgacttcaggtgatccgcctaccttggcctccaaaagtgctgggattacaggcatgagctactgcacccggcctaaccaggctggagtgcagtggtgggatctcggctcactgcaagctccgcctcccagattcacgccattctcctgcctcagcctccccagcagctgggactacaggcacccaccgtcacacccggctaatttttttgtattttagtagagacagggtttcaccgtgttagccaggatggtcttgatctcctgaccttgtgatccaccagcctcagcctcccaaagtgctgggattacaggcgtgagccactgtgcccggccaagaatttttttatcgataacatagtgagctctctgcctcttcggaacgatgtccactttgcttatgatcaacccaagcaggactcttctctccctggacgcctctcccctggtctggaatcttccagttctgccagaattggcctttcccagatgctgcaaactacagacgcagacgtcgg

SEQ ID NO: 306 - DNA, 3094 bp, Homo sapiens
gtgcgtgactgcgctgcgcagggcgctaggaggcattgtcgccgtaagtggagccaaaagcggcccggagcgggaccacacgcttcttgccccgcaaagctcaggcccttttgtgagaagcagaccagcctgggggctggcggcaggacacctgtgtctgcatgctgaagaagatgggtgaggccgtggccagagtagcaaggaaggtcaacgagacggtggagagcggctctgacactctggacctggccgagtgcaagctggtctcctttcccattggcatctacaaggtcctgcggaatgtctctggccagatccacctcatcaccctggctaacaacgagcttaagtccctcaccagcaagttcatgaccacattcagtcagctccgagagctccacctggaggggaacttcctacaccgcctccccagcgaggtcagtgccctgcagcacctcaaggccattgacctgtcccggaaccagttccaggacttccctgagcagcttaccgccctgccggcgctggagaccatcaacctggaggagaacgagatcgtagatgtgcccgtggagaagctggccgccatgccagccttgcgcagcatcaacctccgcttcaacccactcaacgccgaggtgcgcgtgatcgccccgccgctcatcaagttcgacatgctcatgtctccggaaggcgcaagagcccccctaccttaggccaccctcctcatgcccacccagcaagggacagaggccacaggcctggaaccctggaagggagggaggcccatgggaggccaagcctgggggctgggggcgggtgggccaagcagcacgtggtgggtggggtgcagctggtctggatagatagcttacagcagtagtgggctctggaatgcccaagggaagaggcaaggtggggcctgcagcctggactcggcactcacagctgctgtgcaaactcaggcagatctcctgccctctctgagccttgtcacttgaaaaaaacaggaccctttccctcctttgggctccctggaggtttttaagcagtacgtgcctccaagttacctccagatcagcaggcacaggtgggcattgccaggtattttctgagcccctgcgggtttgaggccttgtttttagtgctgagagccagttgctgccctgagaagagaagacaacctccatctatttattgcttcctgagaactgacctggatgcggccctctgcagggcccagtcttcagtcctgtggtccctggattggtgggaacctgaactaggagtcctgggagagctgtggtgggaatatgggctggcactgctgcagggcaagaacattcatgtaggagcccgaggaccagcaggctgggaatggggagcaagtcacgtcagctctgtcattccccacagttaacaaattggcggggtgggaagtcctgagtgctccgtccctctagcatcactcctgagctgcgggagaggtggcccagagaacagcagagtcagttacacctgcagctcttgtctaaagtgattagatggccaccctcaccactgtccagtccagcagcagcctggctgccttgtcatggcctcctgggggcagaaggcgatgtggaccacgggatttgtagccagccagctcccaggccaacgcccaaagccctgatgacctggttcttctgaggccctcaacctggcatcttagggtatggtcaggcaacagggtgaccagctgtcctggtttcccaggacatggaactttcaatgctaaaactgggacagtacccagcaagtggggatggttggtcccctaccaggagagggcctggggctcttgcttcccgagaacgcctgtggcttgaagaaccttgactgcttggtcctcaggtatctacctcccaccttctcctcatctgtggagcaagccaactcagtgccccagaccccacctgatctgcatctttgtttgcatctccagagacacctgaggccccagagcttgaggcaaagccaggccgtccaaatcctgtgtgccgtggacgagtggccactttactactcctaaggctaagatgttgagagctcagaccactgctcagagcagtaatccctgctcagaatgctcccagttccctcgtccctgcccaggtctcttgtctcttgggaaggaactgataggtcgggccattgttgggccatcactgagcgctcagtatctcaagagactctgttcattctgctcgtatcccaaggcctggttggtcaaactctgggcaaagggttttcaggatgaggaggtcaagacaggatgtccagagctaccgagttcatctgtgggtgttgggggcaagtgggggctgaagtcctgtgcaggctgcgctggccccacctgccttgtgccctggagtggggtttctccttgttgaagaagaggcatccttctctgatgtgcacaaacacaatgtatgaccagagccttgcaactcaaagtgtggtctgtggaccagcagcggcagtgacacctgggagcttgttaggaatgcagagtctaggcctcaccctatacctcccgactcagaccctgcattttagcaagacccccagctgattcctataagcactttagagtttgagaagcaaggacctaggctggggatgtcctccgagcagagggttaagtttctctcagttctctccctgccacttccagggatctgagcctgtgttcagcctcctccctaacccaccctgggagacacttggcctgttagattgttccagagtctgcatggcactcctaaagaagggagtgggacctgcagtcaccaggagatgagggttaggtgtgcccagccctccagacccggcctttctggttaacccctgcatgccaagctgcctgctgccccaggtcctcacctcaggcctttgaaggggcagcttctggaagttgttttctcctctgcttggagagtttgcccttgtctgtcttggaaagtgtgggcagccacagatgcccccaaatcagagctcacagtgagtgagcccctaagcttcagtctgcaataaagaatgcattggtttc

SEQ ID NO: 307 - DNA, 2112 bp, Homo sapiens
atcgcagcgtcggatgttcagagcagcagaagccggcgtcgtcgaatgttgtgttgcctgccaccatgagctacacaggctttgtccagggatctgaaaccactttgcagtcgacatactcggataccagcgctcagcccacctgtgattatggatatggaacttggaactctgggacaaatagaggctacgagggctatggctatggctatggctatggccaggataacaccaccaactatggaattaaccagcgcttagatatggtgccgcatttggagacagacatgatgcaaggaggcgtgtacggctcaggtggagaaaggtatgactcttatgagtcctgcgactcgagggccgtcctgagtgagcgcgacctgtaccggtcaggctatgactacagcgagcttgaccctgagatggaaatggcctatgagggccaatacgatgcctaccgcgaccagttccgcatgcgtggcaacgacaccttcggtcccagggcacagggctgggcccgggatgcccggagcggccggccaatggcctcaggctatgggcgcatgtgggaagaccccatgggggcccggggccagtgcatgtctggtgcctctcggctgccctccctcttctcccagaacatcatccccgagtacggcatattccagggcatgcgaggtgggggcgccttcccgggcggctcccgctttggtttcgggtttggcaatggcatgaagcagatgaggcggacctggaagacctggaccacagccgacttccgaaccaagaagaagaagagaaagcagggcggcagtcctgatgagccagatagcaaagccacccgcacggactgctcggacaacagcgactcagacaatgatgagggcaccgagggggaagccacagagggccttgaaggcaccgaggctgtggagaagggctccagagtggacggagaggatgaggagggaaaagaggatgggagagaagaaggcaaagaggatccagagaagggggccctaaccacccaggatgaaaatggccagaccaagcgcaagttgcaggcaggcaagaagagtcaggacaagcagaaaaagcggcagcgagaccgcatggtggaaagggctcccgcactggcgcttgcctcctccgcctcagactcttgctcttgctggaccttcctcagcctcgccggcgcccggcccctgggctctccagacaaagctgaccccgtggcccagataaggacgtccggcagaggatccagtctgtgtgttctctgtgcaaataccggaccttctatgaggacgagatggccagccatcttgacagcaagttccacaaggaacactttaagtacgtaggcaccaagctccctaagcagacggctgactttctgcaggagtacgtcactaacaagaccaagaagacagaggagctccgaaaaaccgtggaggaccttgatggcctcatccagcaaatctacagagaccaggatctgacccaggaaattgccatggagcattttgtgaagaaggtggaggcagcccattgtgcagcctgcgacctcttcattcccatgcagtttgggatcatccagaagcatctgaagaccatggatcacaaccggaaccgcaggctcatgatggagcagtccaagaagtcctccctcatggtggcccgcagtattctcaacaacaagctcatcagcaagaagctggagcgctacctgaagggcgagaaccctttcaccgacagccccgaggaggagaaggagcaggaggaggctgagggcggtgccctggacgagggggcgcagggcgaagcggcagggatctcggagggcgcagagggcgtgccggcgcagcctcccgtgcccccagagccagcccccggggccgtgtcgccgccaccgccgccgcccccagaggaggaggaggagggcgccgtgcccttgctgggaggggcgctgcaacgccagatccgcggcatcccgggcctcgacgtggaggacgacgaggagggcggcgggggcgccccgtgacccgagctcggggcgggcggagcccgcgtggccgaagctggaaaccaaacctaataaagttttcccatccc

SEQ ID NO: 308 - DNA, 3370 bp, Homo sapiens
atgcgcagtcgcgcccctccctctccgcccccaccccctgtcggcgtctgggcctcgtccccttctctctgtctcccttgcctcccccatcacgtcccctgacaccgacaccccattgctcccacagtctccccagtctccactttggtccccagcgctgtctgcccgaggatttgcctgaaggctgcccccaactctgcacccgccccccgagggccaccgaggaccatgactaagacagatcctgccccgatggctccgccaccccgaggagaggaggaagaagaggaggaggaggatgaacccgtccccgaggcccccagccccacccaggagcgccggcagaagcctgttgtgcacccctcggcacctgcccccctccctaaggactacgctttcaccttcttcgatcccaatgacccggcgtgccaggagatcctgtttgaccctcagaccaccatccccgagctgtttgccattgtgcgccagtgggtgccccaagtccagcacaagatagacgtcatcggcaatgagattctgcgccgaggctgccatgtgaacgatcgtgacgggctgaccgacatgacactgctccactatgcgtgcaaagctggggcccacggagtcggggaccccgcggcagccgtgcgcctctcgcagcagctgctggcgctgggcgcagatgtgacgctgcgcagccgctggaccaacatgaacgcgcttcactacgcggcctattttgatgtgcccgacctcgtgcgtgtgctgctgaagggtgcgaggccgcgagtggtgaactccacgtgcagtgacttcaaccacggctcagccctgcacatcgctgcttccagcctgtgcctgggcgccgccaaatgtttgctggagcacggcgccaaccctgcgctgaggaatcgaaaaggacaggtgccggcggaggtggtcccagatcctatggacatgtccctggacaaggcagaggcggcactggtggccaaggagctgcggacgcttctggaagaggcagtgccactatcttgcgccctccccaaggtcacgctacccaactatgacaacgtcccaggcaatctcatgcttagcgcactgggcttgcgcctgggagaccgcgtgctgctggatggccagaagacgggcacactgcggttctgtgggaccacggagtttgccagcggccagtgggtgggcgtggagctggacgaacctgagggcaagaacgatggcagcgttgggggcgttcggtacttcatctgccctcccaagcagggtctctttgcctccgtgtccaagatctccaaggcagtggacgcacccccctcctctgtcacctccacaccccggaccccccggatggacttctcccgtgtcaccggcaaaggccgcagggaacacaaaggcaagaagaagaccccatcatccccatctctgggcagcttgcagcagcgtgacggggccaaggctgaggttggagaccaggtccttgtcgcgggccagaagcaggggatcgtgcgcttctacgggaagacagactttgccccaggttactggtatggcattgagctggaccagcccacaggcaagcatgatggctctgtcttcggtgtccggtacttcacttgccccccgaggcatggggtcttcgcaccagcatcccgtattcagaggattggcggatccactgattcccccggggacagcgttggagccaaaaaagtgcatcaagtgacaatgacgcagcccaaacgcaccttcaccacagtccggaccccaaaggacattgcatcagagaactccatttccaggttgctgttctgctgctggttcccctggatgctgagggcggagatgcagtcttagaggccctggacacctgacaaagagacagagtccccactagcatctcctgacacccgaggagccctgagtcaccctgagatagagattcccagtaacacatccagagtagagacccctgttagccagccctcgatcattgaggccccattattaacagatactcccataataacccccaaatacagaccccatgtcacccagaaagagattccctgagtagcaccttcaggctagtccctatccccaacccctcagagcagattcccagattaacagatttccatatcaccccaaatgatggtgaccctctccacataatgcattacaacagaacattcttgaatcacccaaccctggatcagaaacctccccattaacaaacactgccccttaagtcctcttgaaataaacataggtcacacccccaaagcaaaagagtaacagacattcatgtcattgttccccatttaacatcagtcctctcaagatgtcgtgaccccatggtcaccctgaagcccttagattccaacccctcaatcagagacttccttcattaacaaagacccttgttcttatccctcaagaagaaacccaccataaccagcccactgtcacccctaatttacagacaccaaaacagtcctggaagtgctaattacaggaccccccaagtcttcctaccctctgcaccctcaagaaacccccagtgccttgtatgaagcccaccccacatggcccacagctcctgtgctggccagactcccagaaaattctctattttttaagtaacgacttccccctttgggggaccccaaaatttggaggccccattctaggactctggggatcccaaaccctagagtacacacgtcccaaactcccctgtgccctcaagtcctacagcccctagaagaccccaatgccgtaactcctaggacccccaaatcatggaatcccaaatccccagggaatcccaaatttgaaaatccaatcccaagtccccaggaaacccaatcatgaggtccttgtgcctggtatggaggagactgcagtcaggatatgcattccaggctcccagacacctcaagccctattcacaggcaccaggaaaccccacacaggaattcccatccctggaaactggagaatttcaatgccccgagtccatgggtttcaagacaccaaattccaagagccccagccctaagggaaccccaaatcctaaagcctccatctctaataaatggaaggccccaaggccctgaggggatctcaaatcctggaaccccgatttcaatctacgttctagtcactggcctcaaaggaccccacagcacctgggccagaccaacagctcgagggagaacctgaaggcccagggggtccagggcggacctggggccccgaccaccaaggacagctcacgactgccccttcactgcatgtccccaaactcagcatgactcctgtcctcttcaataaagacgtttctatggcc

SEQ ID NO: 309 - DNA, 2313 bp, Homo sapiens
aggctgccagccaggctgggaaagcggtggtagctggttgggttgctggggctcggttgttgtagtcgcgatgttcttctccgaggccagagccaggtcgcggacgtgggaagccagtccctcggaacacaggaagtgggtggaagtatttaaagcatgtgatgaagatcacaaaggatatctcagcagagaggactttaaaactgctgttgtaatgctgtttgggtacaagccctccaagatagaagtggattctgtgatgtcttcaataaatccaaatacttctggtatattactcgaggggtttttaaatattgtcaggaaaaagaaggaagctcaacgatatcggaacgaagtaagacacatcttcacagcctttgacacctactatcgtggatttttaactttggaagatttcaaaaaagcatttaggcaggtggctcccaaattaccggaaaggactgttcttgaggtattcagggaagtagatcgagattcagatggtcacgtcagctttagagactttgaatatgccctgaactatggacagaaggaagcctaactattgtgaactacttttggtaactctggggagatcaatagattgtaatgtcagcagactctactctactaatgatgtcatgctacagacttgtgattaaacatttaaaaatttttaatttttgtgggtacatagtaggtgcatatgtatacatacacacacatatatgggttacgggagatattttggcacaggcatgcaataagtaattgactaaatttttaatcataatttttggatgctgatgatagacttgcatctcagaatcctagagatggttgctgccgggggtctccttctgtgtggccagcagccctgagtcaggccgccattgctagagctggggctagggatggcactggtggtcctcctcctcctcactcttcttgccccctaccctctccacactgcaggccacggtgctctactcactcacttcattgtcctcaccatcccaccctgaatctcatcatctcctaatatctgcagaggggcagacttttcctgccaatggtgccagtttccttcatttgctcaacattggttgaacaaataatagcacctacacatacagaatacttactatgttccaagcaatcagccaggccttgggaagcataggcttaagacttctctaagataggctcgtgcctacaatcccagcactttgggaggccaaagcaggaggatcacttgagcctaggaattggagactagcctgggcaacataccgagaccccatccctaccaaaaaattaataataaaaaattatctggatttagtggtgtgtacctgtagtcccagctacttgggaggctgaggtggaaggatcatttgagcccaggggtttgaagcttcagtgagccatgattgcactgtcgcactccagcctggatgatagagcaagaccctgtctctaaaaaaacactttcaattaaaaaaaaacatataaagacttctctaagataatgtccctgagtccaaatcatcactgtaaagtggtcccagggcactgtctgtgcaagacaaagaaatcggcttgggctaacacgagcaagccctctcgggctatatacagaggaagaacagggtgatgagggtactgggggcaagagacatgtttgcagaaccctttaggatggtctaggcttgggagtctcactgcggagaagcaagccttgagctgctcagctgccctctgctccataccccctggtttctagcagtcacgtcctgcacccagacacttagccatgtgtgttcacgttccccatgccttgcctgtcctgctgggctccagtaactgctatactggagcaagaacagcaatgctggacactcagcatttagtgaaggtaattccaaaatactggtatcagtactcttatttataagtgtacggaatgcataacatgaacattagtcaaagaacttttaatataattcactttttaagtgttaaaatttaaaggtcaagtaaaattgtaaatttgtaatatggaaacattaagcgtcattatcatacaaattattagcagataaccttaataaaaataaacgtttgcgggttttttttgagacagagtctcgctttgtcacctaagctggagtgcagtgcgcgatctcggctcactgcaacttccgcctcctgggatcaggagaatagcatggacctgggaggcggagcttgcagtgagctgaaatggtgccactgcactccagtctgggcaacagagcgagactccctctc

SEQ ID NO: 310 - DNA, 2716 bp, Homo sapiens
attaccacacctactacagttgcctgagaattataacaccatttttcagtactaccacagaaaaacctgtagtgtctgcaccaaggttcctaaagatcctgctgtttgccttgtgtgtggtacttttgtatgcctgaaaggactttgctgcaagcaacaaagttactgtgaatgtgtactgcactctcagaactgtggtgcaggaacaggtattttccttttgatcaatgcatcggtaattatcatcattcgaggtcaccgcttctgcctctggggttccgtgtatttggatgctcatggagaggaagaccgggatcttaggcgaggcaaacctctctacatttgtaaggaaagatacaaagttcttgagcaacagtggatttctcatacttttgatcacatcaataaaagatggggtccacattacaatgggctgtgactctccacctcagcattgcatcgtatcatcattttcgctacgaatttatttttcaacaataagctttaacttaatttgggggattaacacttttgctgagggagaaaaagaaaacatacattatgaagcctttccaaaattaggtgcttggtaatcacgttaatggtataattttttttttttaatatctggagaacattaataacaagttaaattattctttagtggtcattttttaagtgcacaattaataagaagcacaacttgttcacaaactcattcagaaatgattctcccaacaatgcatatcagctattcattgatacttagagtgggtgtgatttatttgacattttactgcttctttctgtctgtgtgttttaatttgcatctgccaagcataatgcatcttttttcctctgccattcttgtgttgattggagaatttttctgtatgtaattagaaaaaaatgtaaaacatgatttatgtgaaatactgtatagtaaaagttggtctaatagtagaactttaaaattttttcttattgtgaggaatctgttaaaagtttaaagctttgctgaaaactgaattcattctcaggaatttcataaatcttctccccaggtaaataattgaaatagctgtaaaataagtagatagctgctgttaatataatacagtacattttggggggcatatgtgtggttggggggtccttaaaaatcaaaatttgccatttcagttggatgaattactagaggtaataacaaatcttactataaaatcaagaggtttaagaacatacactgggcagatgttgattccgtgcatgcccaccttttattaccaaacaaggttttgtttatatgattgtattagaaatgctcagacttccccagaaatgaaccataaattttggaacttcctttcagctcaagaggttcagctatattgtatttgtgcagtgtaatcactactatttctgctcggtttcctaaaaggaaaaaaaaggcgcagtggtgatgaccctcatgaatgagccacgcttctgcattcttcttagaaactgctgtgaaaaacaatttatgtttgcagggtttaaaaatcagtaaaaatgggaatgattgagctaaaacccactctatgagaaggaagattactgaaaagcatgtgacatattgctacaaagattttttttcctaaatgattcagtaattgaatgattatttaatatatagtgctatcaagcaatccctggtactttggacttccatggcttgttatataaaattacatttttacatgtaaaaataaactaaacaaatctaatgataaaatataatgtcagatccatgttctaaaaaatttttgtaatgacatgacattacaagagtataaaaatggacattaaatcatggccttgcattaaaatatggaaagcagagcagtacatattcaaatgtattcagaaagtcaaaagattacctatcgttctacaataaaatacatggaaatagcttgctatttttatatacatttccaaaatattaagataactttctgtaagagtcaatgattctgttcgactaaatagctgtcctttccaacacattgctacttttttaaatactgtatcataagttcagcctgtcatactttttgcattgatcgttatgaataccagaccatttgtaagtgtggttgaagagcaaaatgctaattgacatctctagtaaatactgttacaggattcatgaacttgaataattctacagtttgaaactctgatgctatatatacatggtataatgtattcagactttgattactacttatttaaaatggaatgttttatggttgtgcatatggatgtgaagtgaaaatattagccttaactttaaaatttgggtgtttgatagtgtttattttgatattggtgaattagtcaccagtaaattttaaaaaagcacttggttgaaaattgtacttgaatacatacatgcatgctgctaaactagaactttaatttttccccataacttttataagtcccattcataaacccacttttaaaaataacaggtccaagttagagtgatgtgtgtatattattcaaaaaaatgtactggtgtgatatcttgtatgaatgatcatttaaatacagtacattactgtagaagctaaattgatctttataattaagcagaaattacaaaactaggaataatcaacattgtaagatatgttaataaaaacctgctgtcatttggtttgtg

SEQ ID NO: 311 - DNA, 2750 bp, Homo sapiens
ttttattctggttgagatgaaaagtcaatggaggattttcatcaaaagagtgacataatatggcttatatttaaatataactactttacctgctatattaagaatggactgaagttgtcaacaggaaaaaacaggaagaccaattacaggaggctttttgcatcaatacaggtcctggccatgccatcggcaacctgctcgtcttgtccgtgaggccttcccagctggccgggctcaccctgcagctcctgcacctgtgcctgcccggggaattgtgggccgtttcccactcctcttcaaccgtcagcgacatcttgggccttcttttccagtcaggtgggacggcgcccctatgaggctgtgtcttatccctcggaacacgggcaccccacagagggtcctgcgtcctgtggtctggagccccccctcaaggaagaaacccgtgctgtctcctcacaactccataatgtttggacacctcagccccgtaaggatcccttgtctcagaggcaagtttaaccttcaacttccttcattagatgatcaggtgatcccagccaggctcccgaagacggaggtgagcgcagaagagcccaaagaagcaacagaggtgaaagaccaggtagagacccaggggcaggaggacaataaaaggggcccctgtagcaatggggaagcagcctccacctctaggcccctggagactcagggaaacctcacttcttcctggtacaatcccaggcccttggagggaaatgtccacctcaagagcttgacagaaaagaatcagactgacaaggcccaggtgcatgcagtgagtttctactccaagggccatggagtcgccagttcacacagccctgctggaggcatccttccctttgggaagcctgacccacttccaacagtgctccctgccccagttccgggctgctccctgtggccagagaaggcggccttgaaggtgctgggtgaagaccacctgcccagctctccaggcttgctgatggtgggggaggacatgcagcccaaggatcctgcagctcttggatcaagtaggtcttctccacccagagctgccggccacaggtcccacaaaagaaaactgtcggggccaccgctgcagctgcaaccgacccctcccctgcaactgaggtgtgatagagacgagcggcccccaccggcaaagcttccatgtctatctcctgaggcactgttggtgggtcaggcttcccaaagagaaggacgcctccagcatggcaacatgcgtaagaacatgagagtgttaagtagaatatcaaaattcaggagactaagacagttgcttaggaggagaaagaagacacggcagggcaggcgtggtggctcatgcctgtaatccagcactttgggaggcccaggcgggcggatcaggagatcaagagattgagacctgaggagcatctctgcctgcaccatctgggaagtgaggagcgcctctgccctgctgctccaccatctgggaagtgaggagcgcctgtgcccggccaccgcaccatctgggcagtgaggagcgcctctgcccggcccccgccctgtctgggaagcgacaagagcctctgcccagcagcctcacagtctgggaagtgaggagcgcctctgcccaggccctgccccgtctgggcagtgaggagtgcctccgccaggccgccgccctgtctgggaagtgaggagcgcctctgcccagccaccgtcccgtctgcgaagcgaggagtgcctctgcccggcccccctacactctgggaagcgaggagtgcctctgcccggcccccctacactctgggaagtgaggagcgcctctgctcggccaccgccccgtccgggaagtgaggcgcgcctctgcccagccgcccactatctgggaattgaggaggagcgccgcctctgcctggcctccaccccatctgggaagtgaggagcacctctgcccagctgcctcacagtatgggaagtgagaagcgcctctgcccagccgccgccccatctgggaaacaaggagcgcctctgccccgccgccgtcctgtctgcgaagtaaggagtgcccctgcccggcctcctcaccgtgtgggaaatgaggagcgcctctgccccgccgccgccccgtctgcgaagcgaggagtgcctctgcccagcctcctcaccgtctgggaaatgaggagcgcctctgccctgccgccgtcccgtctgcgaagcgaggagtgcctctgcccggcctcctcaccgtctgggaaatgaggagtgcccctgccttgccgccgtcccgtctgcgaagcgaggagtgcctctgcccggcctcctcaccgtctgggaaatgaggagcgcctctgccctgctgccgtcctgtctgtgaagtgaggagtgcctctgcctggcctcctcaccgtctgggaaatgaggagcgcctctgcccggccaccgtcccatctgggaagtgaggagcgcccctgcccagccgccgccctgtctggaaagtgaggagcacctctgcccagccccctcaccatttgtaagggaggagtgcctctgcccagcccctgcaccgtctgggaagtgaggagtgcccccacccggccccctcaccatctgggaagtgaggagggtctctgcctggctgctgtgcaaccttccaagtgtgaagtgacagccttgtgtgtgatctttctgccctccccaggtttgcattttcgacattaaagtttactttttaattt

SEQ ID NO: 312 - DNA, 2144 bp, Homo sapiens
atttttgactttctcctttgtaattaatctctatctgggtttctccctttctctgtgccatttggtttccttaattagttccctgtgccagcccatagtcagagccataattggctctggggaagatccaagttattttctgagtaagatattaggcttccatatgatccagagatgcaaagaaatccctagagagtgtaggagttgtctaaatccatgtgtcagatgtagccaacgaattatgtcagaagcagagagaaaaggcctgaaaagcagctctctcccactcctcaggcccttgtctccaaccttacatgaggctttttgaacatctcctcctggcccagctggggtgagagcaagtcctcgaaggcactgcctttgagccttgctcagcccatctgaactatcccaactctagaattgactgctttcgaattgtgtgaccttgggaatgttatctggcttcaaccacaatgccctacccccagctcctctcccaaatgatcctagatacagggctgcttccccccgaccctaccccacctcgggacacaggctcatggcctcatggcacttcaccaccagaagtggtgctcagagttcctatttccacatctaaccccctaattcctgggaaagtctgaggcctggtccccccagtgctttccctggctggcctctccacattttcatctgatggtggagtgagatcaggaaaaataggacaggagctttgccttgggggagaagagagttaagtgtggaaaggggtgagttataggaggttaagcagtccaagatttctctctctgtgtaggaggccatttcctgatgtgaggggtctgaacccaattatgatgggacagggttgggcattgacttcccatctcttctctctgtttttctcccactatctgtagcccaaaactcttatggaggactttgatctttagtataggctattggtcagggccataggaactaaccccgatcctcactccaccaggatctaccacatcccctacacacaaacacatgctgtggggagggagttttcccctgggtcaagttgaggatccttagatcaccttgtgctcctgtggactggtgtgtgcgtgtgtgtgtgtgtgtgtgtgtgtgtgtgtgtgtgtgtgtatgttgggaaacttagctttcagagaatgtctatgggctctcattttctctctcacacaaaaatactcgggacttctccaagtccctgaggagcctgaccactgaagctgatcatgagatgactgtatgctgacacacccccttcaggggcctggccttgacttagggctgcactgtatcctcagcaacggccttgcaggagccccttttggactgctttccctattcagcccagagttggggtggtgggagaagaggggttggagtgaatccatctctattcaaattccagctgggattactctaggagtcttcctggcttgttttgggctcaaacttagctacattgtttattggctcccaaagtcgggattgaagagtgaaaagatgcaggcaatgaatccttctgcacactcctccccaacctttccagcgcttttctacttaggaggccagtggaagggaggagaggccatgccctagcccacaggggacaaggttcattgttcttccaggcttggttcactctgcttttgattcagaagctctttccctacccagcaagactacactttcttgccttctttctattttttctttttgtgcgtataaatggtatgttgtgatatattctcagtgcttgtgcccaccttggaactctgttcttgctcttcattccgcatgtgatactctggtccaaggtcttggccaggtgccttctgctcaaatatcgtctcagaggtgcttcccttgaaaactcggtgctgtttccatagttactctatttgatcactctaagtttggttgtcttcatagcacttgtcaccctctggaactattctattcatttatttacttgtttaatgcttggctcttttcccctcctaacgtaaactccatgattgccaacacctgtttacttactacagttccccctccccccacattcctaacactagtaagaaccaataaacacttgttgacgg

SEQ ID NO: 313 - DNA, 1864 bp, Homo sapiens
catccggccaggcgcggtggctcacgcctgtaatcccagcactttgggaggccgaggagggcagatcacgaggtcaggacatcaagaccatcctggctaacatggtgaaaccccatctctactaaaaatacaaaaaattagccggtcgtggtggtgggcacctgtagtcccagctactaggaaggctggggcaggagaatggcgtgaacctgggaggctgagcttgcagtgagctgagagggcgccactgcactccagcctgggtgacagagtgagactgggcgacagagtgaaactccgtctcaaaaaaaaaaaaattcactcattcaagattttttgagcagcacaagtcactgttttaggcacttgtgatagaccctaacatctctaccctcatagaacttatattgtaatggagaaaggcaggcaacagacattgtaaataaatcatatagtatcttaaaattgcatacaaataccatgggaaagggataaggtgggactggggttgcaatttttagcagggtggtcatgtgagaaaggaatctctttgagaaggttagatgagaggggaaccatgctccgtaagacataaaaacagctttagggtcagaagacgctttatacagatgatctcacaaggctggggcagagaaagatgtagtgattcctaatcacccagccttgaatccacatctgcctcaggtcagattgagtgcagattcccaacccaacaggccttctgttgcctgccccattctggtctttctgcctttggcttttgcttttcttagtggccctaaccatggtctcttcccagcaggtgaacagctcggagaagctgcagctgcaggagtgcttgtgggctgactccctggggcctctcaaagacgatgtgctactgttggagacacgaggcccccaggacaacagatccctctgtgccttggaacccagtggctgtacttcactacccagcaaagcctccacgagggcagctcgccttggagagtacttactacaagacctgcagtcaggccagtgtctgcagctatgggacgatgacttgggagcgctatgggcctgccccatggacaaatacatccacaagcgctgggccctcgtgtggctggcctgcctactctttgccgctgcgctttccctcatcctccttctcaaaaaggatcacgcgaaagcggccgccaggggccgcgcggctctgctcctctactcagccgatgactcgggtttcgagcgcctggtgggcgccctggcgtcggccctgtgccagctgccgctgcgcgtggccgtagacctgtggagccgtcgtgaactgagcgcgcaggggcccgtggcttggtttcacgcgcagcggcgccagaccctgcaggagggcggcgtggtggtcttgctcttctctcccggtgcggtggcgctgtgcagcgagtggctacaggatggggtgtccgggcccggggcgcacggcccgcacgacgccttccgcgcctcgctcagctgcgtgctgcccgacttcttgcagggccgggcgcccggcagctacgtgggggcctgcttcgacaggctgctccacccggacgccgtacccgcccttttccgcaccgtgcccgtcttcacactgccctcccaactgccagacttcctgggggccctgcagcagcctcgcgccccgcgttccgggcggctccaagagagagcggagcaagtgtcccgggcccttcagccagccctggatagctacttccatcccccggggactcccgcgccgggacgcggggtgggaccaggggcgggacctggggcgggggacgggacttaaataaaggcagacgctgtttttctaccc

SEQ ID NO: 314 - DNA, 2736 bp, Homo sapiens
gttcagggcctgacggttgctagggtgacagggacacaacatggcggcgggatctctaacgctctccttcgagggaccaccacggagatcctagtgcgggaccccgcctcagggaagtggaaagcagggggacaaccttcctgcttctttcttttccgtccagtgtcggcaaggggttgtcaccggcttccgcatccaagatgaagaactataaagcaattggcaaaataggagagggaacgttttctgaagttatgaagatgcaaagcctgagagatggaaactactatgcatgtaaacaaatgaagcagcgctttgaaagggagaagatacccattatcagaaaaaaaaattatgcactatatgtaccagttatgtaagtccctggatcatattcacagaaatggaatatttcacagagatgtaaaaccagaaaatatactaataaagcaggatgtcctgaaattaggggactttggctcctgccggagtgtctattccaagcagccgtacacggaatacatctccacccgctggtaccgggccccggagtgtctcctcactgatgggttctacacgtacaagatggacctgtggagcgccggctgtgtgttctacgagatcgtcagtctgcagcccctctttcctggagtaaatgaactggaccaaatctcaaaaatccacgatgtcatcggcacacccgctcagaagatcctcaccaagttcaaacagtaagtattgtgttctgagagtggatgtggacccactcccctgctaggacctgcagcagggcaagcccctccctgtgcctccctcaaacccctctcaggagctcctttggctgactacaggggttcaagttcacttgagggccagtgagtggctgctcagacagagcccatcactttaagaggtctcaaaggtgagctcttccttgagcatcacagaaagatttgtcacaggctttctgagggctggggagtcaggctgtgttccctgagtaatttaaacaggacttagaagcctttgggtggaaacgttccccaagcacagagcataggtggtgagggctttctgcagccctccacagccctgctggcgggaccgacgcctggaagaggtgttcccggactcttagggtcattctggtgaagctgaggctgggagttgggacttcccagggagggcctgtgggctgaggggcaagtagcacccagcggcccccacatcccagggagggagaaggtggcaaccattttggactcttctttttttgttaaattttatttcattcttctcatgtgggaaggtgatattaatcttttataggaaaggtagttttcttacatttttagcataacagatccccccctttataatagactatttttaaatagatttttttaagagcagttttaggtttccatagagccctgtccccatgtgcacacagcctcccctgtcgtcagcacctgcctcgagtggtgtgtttattatggtcgatgaaccgtggatatctcattactacacagagcccatcatttacatcaggggtccctcttggtggtgcacgttctgtgggctgggacaggtgtagactctgcagtcataaaccattccccaccacacagggcccttagttgtgacagtggaccaccggtgcgctcagtgacagcatgaccatttattatcattgggtttttaatacaggtcgagagctatgaattttgattttccttttaaaaagggatcaggaatacctctactaacaaccaatttgtccccacaatgcctctccctcctgcacgcaatggtggcctatgatcccgatgagagaatcgccgcccaccaggccctgcagcacccctacttccaagaacagaggaaaacagagaagcgggctctgggcagccacagaaaagctggctttccggagcaccctgtggcaccggaaccactcagtaacagctgccagatttccaaggagggcagaaagcagaaacagtccctaaagcaagaggaggactgtcccaagagacgaggaccggcctatgtcatggaactgcccaaactaaagctttcgggagtggtcagactgtcgtcttactccagccccacgctgcagtccgtgcttggatctggaacaaatggaagagtgccggtgctgagacccttgaagtgcatccctgcgagcaagaagatccgcagaaggaccttaagcctgccccgcagcagtgtcgcctgcccaccatagtgcggaaaggcggaagataactgagcagcaccgtcgtctcgacttcggaggcaacaccaagcccgaccgggccaggcctgggtgatctgctgctgagacgccacggagggctggggatgcgcctgcgtccgtttcgcgctggccggggctctgggtgctgccctgcgccctgccgcacccgcggcccgcgcagctgcctaggatgttctgggctaatatacttgtaaaaccaccgcattctagggttttctttcattttcgttaagaatttggggcaggaaatactttgtaactttgtatatgaatcaaaacaaacgagcaggcatttctgtgatgtgttgggcgtggttggaaggtgggttctgcgtgtcccttcccagcgctgctggtcagtcgtggagcgccatcatgtcttaccagtgacgctgctgacacccctgacttttattaaagaataagctgtcgttacagtattgcatttt

SEQ ID NO: 315 - DNA, 2408 bp, Homo sapiens
agaacacacagtgggcctcaggagcaccggaatcagcgcgaaaacgcagaatgcaaaccgtactttgcaccattatttgcaacttgacagtgaccgccgccgtcactgcatgtttaagggaacccggagctgtttccaacccaggtctgacgtccttcacagtgctttgtgtgaactggcagggggagaaacgacggctggggaacgaacggggttattcgtcccatcaatggcctcagaagcatccttatcacctgcttccagagctcccgacccaaatttcctcctcaagaccgacgcggccgcgacgctgcaaaagctcgtcccggcctcacctggctcgcggccggcggtcccccttgaaggcggcgcagcaggatcggggtctgcccgcctggggcgtttggcttttgtcccgcgccgaggtccggcccaggagtgcgcttgggagctcccggcgcggcctcggggacaaaggcccgcggagccgacgtgcagcagagttcacccaggcccgtccgaccagaaaacgaagaacgcccggaggcgggaggccggaggcaggctgctggctggagaaccgacggcaacgacggcgcaaagccggcgcggaaagggcaggcgcaggacccaccctgacgccgcctctcccagccggctctcctgaccccccaagccccgcagctacggcggccccacagcctgagcaaaggcctcacctcagccgcggacaatggcggctgcttccccggcgtcgaccggagcgcgccgcggggtctgctgggagctgtagttccaggcgggcacttccggcgtcgggcagcggcgccgccatgacaggttcctgggccgcgccgcctcgccctgcctgggcggggttgggacctttctggcacctgcgtcgaagccggcggcaggatggactttgttgtcccggtcccagaccaccctcctccaccgtcgcctcccactgcaaaaaggcctggataaggaacctaattcgagctacccttctctgtgaagctcgacggctgagaacgtcagggctcgttcccaagtctctttccagaggccaggctttatgggagcatgggttaccagcgacgcaccctgtgaggatgcagtgtccaaggcaccatcttgaactcatcatcgccaaatatgtgagcaccttgatgttggacttcccaacctccagaccgtaaggcagtacgtttctttgtaaattacgcagtctcagctattctgttacagcagcacaaatggactaagacaacccccgagataggaaggggtaaggtaaatgcaatgagagttggggttttcgatcttagtccagtaaaggagctggaactgttctgtataaacaaagggcaaggtaattgctacatagattcttttcttattattgctgattcttatcctaaaataaaggacattgccactacacatcctctagaatgaccaaaaataaaaatacagcatcaaatgggacgacatggtgccaactggaattcttataccctgctgatgggagtataatgtggtacagtcactttggaaaaaagtttgacaatttcttataaaattatacataaacctgtactatgacctagagattctactcctgtttgttcaaaagaaaggcaaacatctgtccactaaaagatatgtacaagaatgctcacagtggcattatttatgacggtccaaaccaggagataatccaaatgtctgtaaccaagagaatggataaagaaattttgatacgtcaatttaatggattactacttagcaataaaaataattagccacgctgggcgcggtggcttatgcctgtaatcccagcactttgggaggctgaggcaggtggatcacctgaggttgggagttcaagaccagcctgaccaacatggagaacccccgtctctactaaaatacaaaattagccggggtggtggcgcatgcctgtaatcccagctactcgggaggctgaggcaggagaatcacttgaacccgggaggtggaggttgcattgagccgagattgcgccattgcactccagcatgggcaaaaagagcaaaactccgtctcaaaaaaataaataaataataattagccacatatccacacaacaatattgcattatcacaggtatagtgataaatactgtatgattccatttatatgaagttcaagaacaggcaagtaatccatgatgaaagaagtacttacctctgggggtggcagcattgactaaagaggtacaagggagtcttctggggcctggaaatgttctatatcttgatctgggtggtggttacacaggtatacgcgtgttaagaaatcatcaggctgtatacttagtgtactgtaatggcattacactgtctttcaattaaaatgtg

SEQ ID NO: 316 - DNA, 2416 bp, Homo sapiens
ctatgttttaaatcgacaagtaaaagatgtatatatttatggatatatgttttcaattatttgggtatatacctaggagtgacatttctaggtcacatggtaactctatgtttaacattctgaaaaactgccaaactgttttccaacgtggctgcagcattttatatacccaccagaagcgtatgagagttctcatttctgcacatccttaccaacatttgttattgtctctttttaattttagccatcgtggtgaagtgatatctcattataattttaatttgcatttctctgatggctaccgatgttgagcatcctttcatatgctttctggccatttagcttctttagagaaactattcaaatcttttggccatttttcaattgggttatttgtccttttattgttaaggtgtaagtgttgttatattttctggatagtagacccttattggatataggatttgcaaatgttttatgccattctgtgcattatcttttcattttcttgctggtgtcctttgcagtactaaaatttttacttttgatgaagtccagtttatctatttttttctttttcttttgtgcttttgctgtcacatataaaaaactattggctaatttgaggtcacaaaaatttacttccatgttttcttctaaaagttttatagttttagctcttacgtctacaacctattttgagttagtttttgtatatgatgtgaggaaggggtccagctttattcttctgcgtgtggatatacagttgtccagcgtccgtttgttgaacaggctattctttccccatcaagctgttttggtaccctcatcattccctgtattctttaccttagtgatcttctatgctttatcttagggatgctgttactatctcttagtggggaaatctgcattctgcagagagttatctcctccctttgctaggtcttttctaggctaaactagaaagtttgcttatatggtcctggagatggagggatgagatgcttgatttctcatgccttctgtcctgtctggccaatatttctgtggatgcctttttctctccaacctcactgttactgccctgttctgggtcacatcttttctagcctggctggcttagtgcctcttagtccatctgttccctctcctctcctcattcccaacccaaactcagctcaaactgagagaagacctattgaacattacttttcaaagtatctgctaactagttggatgaaacatggtattttattacatatctaaaactggttataattaatgttggccattgttaccatatgtgtctggtgggtcctttttctttctttttaaaaattagcagactgcttatcttttatctacttattagaaggcagcattgtatattctggcttaaatctcctctttggaattctgctgattccaaaataaaggccgactacttagcagagaatagacagtcctcttagctctggtttatgcctggctctctagcatcatttcctatatattagcaggcaagatagagatggaaagggagtgggagggggcctgggccagacatgctaatttcagagagtggctcgggtcctggaaaggaaggtggaatacttgggggtcttggattcagtaaccacacatagtgaagaagggagtctcagtgggtcctgagtcctgtgtgtggggcctatatcatgaggctgtggaggggagggctgcttccatggtacttagggcttggtcaaggcacagtggatgtggaacccggcttgtaggacctcacaggaaaacccaagactgactgggagtgacacagttcttgacctgcttcagggtgggccacgggcttcccagtctgcacttagtggacacagctggacaaggtgaagcagtgggtatagagagaggctgactgcatcagcgtcccaggaccctctgccacatcagctttctttaggagccctagaagagcccaccctttctgatctccaaaaatgtgctttatattccacttccttaaatcttcatgttactagtcagagaagttttaacttctatttatttatttttattgcggtaaaaaataacatgagattgggtcgtgcgtggtggctcatgcccaccgcgttatcccaaaggtgggattacgcctgtaatcccagcactttgggaggcagaggcaggcggatcacgaggtcaagagatagagaccatcctggccaacatggtgaaaccccgtctctactaaaaatacaaaaaaattagctgggcatggtggcatgcacctgtagtcccagctactcgggaggctgaggcaggagaatcacttgaactcaggtggcggaggttgcagtgagccgaggttatgccactgcactccagcctggtgacagagcgagactccatctcc

SEQ ID NO: 317 - DNA, 2331 bp, Homo sapiens
aacacagagccctggagaggtggggagctgctgaagggcgggagaagttgcggcgtggcgataggtctgggtgttctgggaggacccctaaaagggagcagctctgccaggtcagagcttgaggtagcatgtgtgccgcttccaggaggccaggatggagacagcagttcgaggaatgcccttggaatgccctcctaggccggagcggctcaatgcctacgagcgcgaagtgatggtgaacatgctgaactcactgtcgcggaaccagcagctgccgcggatcacgccccgatgcgggtgcgtggacccgctgcccggccgcctgcccttccatggttacgaaagtgcttgctcgggccgccactactgtctgcgcgggatggactactacgccagcggggcgccctgcaccgaccgccgcctgcggccttggtgccgggagcaaccgactgtaaggttcgcagggctccgcccgcctcagccgggctccaccccacacaagccccgccccagaaccccgcccccttccagcccggccagcttccgtgcaggcccccagcctgctctagccccgcgctgcacgctctcgaggccctgccgtgtcccgccctcgggctccaaggcctgaactaacaactgaggcgggagaaccagcacgaaggttactccaagtccccgacccctgtccctctcaaactgggctcaaggtcaacctggcctctctatatgctctggaggtcccgtcagagggtttttgaggaagaaaccccgcacatcagtcgcatcctcttcccccatctccttggccctgccccctttcctggactcctggccctagagacgcaggttctagcctgtggagtgccctgcgttctcagaaaaatgtcctctcttgctggtcccccgtcaccgtcggtagtgggtgcggtcattcctgggggctacgtgagccgggaaatggtgaccactttaccagaatggctctggcctcctcggatcccgcaccacctgcggaggtaggcaccctcgcgtgttactgctaagaaaactgaggcccgagcgcacagctggagcccagactgcagctcggcattcgtcctgcacgcggcggcagccaagcctgggagaactttgtccgcggtagcccagagagctgtgcagtgggggtccatagtgatcccccgcccctctccaggccgagagagcctgattcattgtgcaagactgagtcttatccctctcaagggcataggggagtgggaaagtgtctgagcctctaggaagctcagaaatgatgcctcgtcctactgctggagaaattgctgtccagtggcggggatccggtggttccaggtcctcaacgcccggagcccgaccttccccagggtccagcgctctttcctcaacggcagaaatgaggccttgccgggagggagtcttccaaggggggttcccgaatcggtgctgcagtgggggttttgaagggtgaggaagaaggagaggaggatttccgagccttgggacggacacctgaagcgccgcccaggggcttggtctaaatcgggggatgagagtcaaaaggcccaacccctccatgctcgcggcttcctccttctccagatgtgtacctccctacgagcaccggcccggaatgcagtgtgctgttacaactcccccgccgtcatactacccatatccgaaccttaggtaagtctaacgcgcacacactcatttgcacacgcaccctgaaggcttggtgaggcggggctgggggaggatgtctggtagacgggatgagaacgctccgcggtgcactgacaggcacataccacgagggggagctagtggcatggagcagtcaaaggtggtaaggacagaggaccttaagagagggctaggaggccggtattgaagggttacaggttggcagtgggcttacagccaaaggcgttggttcagagcttgaagtaatgagtaagaagtcgatgttaaggaggaaatattgggtatcagcaacttaacagtagaacctaaggtcaggaggtcagtattggaacccaaggtcagtgctatagacaaagtgtagggataaggttagcattgcaaactggagtcagatattcactttgacatatgaggatccaaaacggctgacccatctcttcctgtagatgggacacaagtcacttcaagaagtctggtggtccccagagaaacaactatgttatccatcctgagtttgtgtctgagacctatcccgactatcgttgctggtagagcctgggcttgctgtgccgagggggcagagcaataaataaactcttcaacccc

SEQ ID NO: 318 - DNA, 2255 bp, Homo sapiens
acgtagaccgtctgctgggggcgccggcaccatttggagtacgtgaggaagaaaaatgtctgaaaagcagatgaaggaagcttttgtcagtaacctcaatggaaccaccgtgctggaaatcacccagggattgtgctttcctgcattctgtatcctgtgcagagggttcctgatcattttctcacagtacttgtgttctttttcacctacctggaaaactagattcctcactgactttgttgtcctaatagttcccatggtagccactttgaccatttgggcttcatttatcctccttgagcttctcggtgtaattatctttggggcagggctgttgtatcaaatataccgaaggaggacctgctatgccagactgcctttcctaaaaatccttgaaaaattcttgaacatcagtctagaatcagaatacgatccagccatctcctgtttccgtgtaattaccagtgcgtttactgctattgctattttggctgtggacttcccactttttcccagaagatttgccaaaactgagctctatgggacaggagcaatggattttggagtaggtggctttgtttttgggtctgcaatggtttgtctagaggtcaggaggagaaaatatatggaagggtccaaattgcattactttacaaactcattgtactctgtttggccattagtcttcctaggaatcggacgattagccattataaaatcaataggctatcaggaacatttaacagagtatggagttcactggaactttttctttaccataatagttgtgaaattgataacaccactgctgttgattatttttcccctaaataagtcctggattattgccctcggcattactgtattataccagctagcccttgactttacctcactgaagaggttaatattatatggcactgatggtagtggcacacgggttggtctattaaatgccaaccgcgaaggaataatctctaccctggggtatgtggcaatacacatggctggtgtgcaaacagggttatatatgcataagaaccgatcacatatcaaagacttgataaaagtagcctgttttcttttactggcagctattagcctcttcatatctctttacgtagttcaagtaaatgtagaagcagtatctcgaagaatggcaaatttagccttttgtatttggatagttgcttctagcctgatccttcttagtagtttattactgggtgatataattttgagttttgccaaatttctaattaaaggagctctagtaccatgttcttggaaacttatccagtcacctgttacaaataaaaagcattcagaatctctagtccctgaagccgaaagaatggaacccagtctttgtttaatcacagctctaaacagaaaacagttaatatttttcttgctgtcaaatataacaactggcctgatcaacctgatggtagatacattacacagcagtaccttgtgggccttatttgtggtcaatctctatatgttttccaactgtttaattgtatatgtactatatttgcaagataagactgtacaattttggtgatcagcaggagtaggatatataagtatttgggcaatatttaatgaggaatattaattgtaaagaaattgtgcttttggcaacagtgttaaccatattttattataaaatagtttcagtcatctaaacagcagtgatgcttaattatttttttttttgagacagagtcttgctctgttacccaggctggagtgtagtggtgccatctcagctcactgcaacctccacctcccgggttcaagcaattctcctgcctcagcctcctgagtagctggcactgtaggcatgtaccaccatgcccagctaatttttatatttttagtagagatggggttttgccatattggccaggctggtctcaaactcctgaactcaagtgataacacccaccttggcctcccaaagtgctgggattacaggtgtgagccaccacactgggccaatgcttaatattttaatgtatctcaacaataaaaccaagaagaaacaaagccttttgacttgttagaatgtattaagtagtattttaaagaaactttatagttgtgacattgaaagactgttggggtggggggaggaaaatttttactttccatcttaatgtaaccttatgctattctgtatttttactgtatattgcttttacaataaatataaaatgaaatgtttatgttgacatttcagtgtg

SEQ ID NO: 319 - DNA, 3407 bp, Homo sapiens
gtgcgcaaggagcgggcgcggagccggcgggcgggcggaggatagcgcgggcgcggcacctgcgggcccgagggtctggctgtcgcagcgccgggccgccccgactccgagcggctgctgagatgagtgcagtgtcgcagccccaggctgctcccagcccgctggagaagtcgcccagcacggcgatcctgtgcaacacgtgtgggaatgtgtgcaagggcgaggtgctgcgggtgcaggacaagtacttccacatcaagtgcttcgtctgtaaagcatgtggctgcgacctggccgagggcggcttcttcgtgcggcagggcgagtacatctgcacgctggactaccagaggctctacggcacccgctgcttcagctgcgaccagttcattgagggtgaggtggtgtcggcgctgggcaagacctaccaccccgactgcttcgtgtgtgccgtctgccggctgcccttcccccccggggaccgagtgaccttcaacgggaaggaatgcatgtgccagaagtgttccctgcccgtatcggtgggcagcagcgcgcacctgtcccagggcctccgaagttgtgggggctgcggcacagaaatcaagaatggccaggccctggtagccttggacaagcactggcacttgggctgttttaagtgcaagagctgtgggaagctcctgaatgccgagtacatcagcaaggatgggctgccctactgcgaagctgactatcacgccaagttcggcatccgctgtgacagctgtgagaaatacatcacggggcgcgtgctggaggccggagagaagcactaccacccttcctgcgcgctatgtgtcgggtgcggccagatgtttgcagaaggcgaagagatgtatcttcaaggttcctccatctggcatccggcgtgtcgacaagcagccagaactgaagacagaaacaaggaaaccagaacttcctcagagagcatcatttctgtccctgcttccagcacctcagggtctccgagccgtgtgatttatgccaagcttggtggtgagatcctggactacaggggcttggcagcccttcctaaaagtaaggccatctatgacatcgaccgccccgacatgatctcctactcaccctacatcagccactctgcaggggacaggcagagctacggcgagtcccctcagttgctctcgccaacgccgaccgagggggatcaggatgaccggtcctacaagcagtgccggacctccagcccaagctccactgggtcggttagcctcgggcgctacactccgacctcacggtcaccacagcactacagccgtccagctgccaggcgatcggatggggaggatggaagcttggaccaggataacaggaagaagagcagctggctgatgctcaagggggatgcagacacaaggaccaattctccagacctggacacccagtccttgtcccacagcagcgggaccgacagagaccctctccaaaggatggcaggggacagctttcactcacaatacaagatctatccgtatgactccctcatcgtcacaaaccgaattcgcgtgaaactgcccaaagacgtggaccggacgagactggagagacacttgtcgcccgaggagttccaggaagtgtttgggatgagcatcgaggagtttgaccgcctggccctctggaagaggaatgaccttaagaagaaagcccttttgttctgacggctgccagcctgccccactggtgtgtgccgggcgccgaggccaggggcccctggcgagaaccgcacacacccctcccacacaccttgctctggcttctctgtgtccatggggtgggcgggagggggtcccccagcaggtgcggcccctgcacctgccggcgacactcctgccggtagtttagggccgagacggctagcttcacgccacccttccccgctgtggcttggtgtcagggagaggctgtagagtggctgtgtcgggcatcagatggagcacacaggtggctgcagcccagcccaccttcccagcgttctcgaggtgccctggccccggtgctgggcacgtgggggacagaggtggccgggacgtgagctgtgaggcttgttgatgacgggtgctgacaccatcatcgggggtgggcacacggcccttcggagcctgggcagcctggcctcacaggcagactcgcagacggggcagtgagcgtctgggacagtgccaagagtggggtgtgtgatttttgcaggcgtctgtgatgggtctctttagggacaaatgtcaacaagggacaagacagggcaccttccgccagcgcccctccatgcgctgcgttcctcctccagatcgacccctagatgcctacacaatatctttaaagtaacacagaagtttttattttattaaaaagtatagcctacttaaacgcgagatgacatatatagagtttaattttacggtccctccgcaggggagcggcctccagccttattctccaccgctcggatctgtgtggtttcagtctgttcttggtgtggtcctcatacacagagctccctgtctagtttcttttctttttcttttttctttttctcgtcacacaggtaaccttaaagacagacccctctaaagaacgctttgtaaatacatgtgaggtatagccaccactgttttccttgctgttatttttccaagtcttggggagaaaacatcctcctctgatggccaaagccctggaatcaagggtttccacgtaccctgcctaatacccgacgtagctcttgatgcaccgtccttgtgctgtggctggcggtgtctcagcctgaaacataaaccccacatgccccaggagcgatgtgctccctgaaacagacaaccacacgctgttggggagagaaggatggagataggatggagatgtggctcttctcatctttgaagccagcagggcatcccggagcaggaggctggccgggctccccaagcgaaggcgttggtgtctgtcattaggtgtgtgttagggtgcagcaccggccgtcacaggatgctgataagcgcgctgagaggtggatgaaacaccaaagtctgtttccccgtccgcagtgggtgttgcctctttgtgtgtgtcccgatgttcctgcctgtgagtcggccttactccgtttccttagcgcccatgacacgccaagtcccgtttcgcactcggcttctcacccgcccagctcggctagggagggggagtttttagcacctaatatgcttcctgccattgcgcaatctgagcctgagcaactggaaacccccatttctcattagtgcaatgtcatatctgatcccaggaagcctggaaaataaaagacgatgcattataacttgcggaagtacaaaaaaaaaaaaaaaaaaaaaaag

SEQ ID NO: 320 - DNA, 2428 bp, Homo sapiens
ttttagtagagacagggttttgccatgttggccaggttggtctcaaacccctgacctcaggtgatccacccgccttgccctcccaaagtgctgggattacaggcatgagtcactgctcctggccccagaattctttatgtgagaaggagtttctgtgattttaactgctattgtaatagaaaccagttgattctgaagagtcacctcttttcctggaaatattttggctgtgagttaagaggaacattattttctcccatgctggtgactttggaaaggggttgtcatcagtgcaatgaacttggtctgggacttccttccttccccatggactgggcccctgggtcctctgttgcttctgggaggggccttgggagtacagtttactctaggccaggacattctaagacatgtggaaaccattggtcacacctgccagcaacagagattagtttgtaaatgtctgtttcaggtgtttcacagcatctagtgaatgaccgttgctcccataccagattctggtgacctgatcttaggcttgacagctgtggtggagacttgggttggcagaagcctaccttggtgtgttggaagagtgattgcttagtgcatgaggtgccttttacagcccattttgcagtagttctggctgcagccctgctgctttgaccttgcaggccaaatttcctggctcctccaaaggggatgatgttctttccctccagacacagttagagggaatcctgacagttgcatcaaggctggtccagactctcaccacgctttctcttttgtgctgcttggtcctgactgccttttgaatctcttttagagctctgagctcttcaccctgacctatggtgccctggtcacccagctatgtaaggactatgaaaatgatgaagatgtgaataaacagctggacaaaatgggctttaacattggagtccggctgattgaagatttcttggctcggtcaaatgttgggaggtgccatgactttcgggaaactgcggatgtcattgccaaggtggcgttcaagatgtacttgggcatcactccaagcattactaattggagcccagctggtgatgaattctccctcattttggaaaataaccccttggtggactttgtggaacttcctgataaccactcatcccttatttattccaatctcttgtgtggggtgttgcggggagctttggagatggtgagtgcaactctttatcttctgggacacccgaaatgcaatagggacttgataagtgtttaaatgaatgaaagagagaaaagaaagggctttggctcaccccagcgctttactgcctgagatggtgatgctgctgaggtaggatccaagtcggacatctttacatggtgatactcctccataccaggctggtggaaggtggtgctgtcagtccccaaagcccaggaacatccattctcagataggcttatttggtgacagtctcattcttgggtattctttgctaagtttctccttaagggttggagccattgtcttatgcaacagaatgttggcgctgtcaatcttgtccttgtgggaaaccagccccccttttttggatgctgtggatgagtcagttatgccccatccccactggttccctagaggctgtggccaggcagctaccccttcgttttcccactgtcccccaggtccagatggctgtggaggccaagtttgtccaggacaccctgaaaggagacggtgtgacagaaatccggatgagattcatcaggcggattgaggacaatcttccagctggagaggaataaccatccctacaactcgaggatagccatcaggagcactgttggaatcagcaggcctctgtgctccctctgccctccagaactcagtgactcttgaacatggatgttatatattcttataacctgtttccattctccattcaaataaagagcagactgcgatatagtccatttaccccatgtgtgcacattcaggagcgacagtctctgcccccattcccttgagaggggctggatgtaatcacctttggttggactagaaagagctcaaaccattttacattcctgtttgaatttttccaaagcaaaactcactttgaccccattaagaggcaagcctggcacatctatccctgggcctttagaaagccatttgcctcaaatggctatagggttgtggggtggagggaggaagggctgggagggagtggggaggaattgctagctgtagtgtgacacattgtagtgtttgccaggaaaggagccagtcatgccggaaacactgacttctgggaagccacccaggtctcattcctccctgctgttggaggcaacatctcctctttttacagagggtacatccttttttcttacaaattcttcaataaagacacattcttgagtg

SEQ ID NO: 321 - DNA, 3073 bp, Homo sapiens
gtctctggatctgcttcccacctccatcctcctggtgtctctgtggatctgctccccacctccatcctcctggtgtctctgtggatctgccccccacctccatcctcctggtgtctctgtggatctgcccccgacctccattctcctggtgtctctggatctgctccccacctccatcctcctggtgtctctgtggatctgctccccacctccatcctcctggtgtgtctggatctgctccccacctccatcctggtgtctctatggatctgctccccacctccatcctcctggcgtctctgtggatctgctcccacctccatcctcctggtgtctctgtggatctgccccccacctccatcctcctggtgtctctgtggatctgctcccacctccatcctcctggtgtctctgtggatcgccccccacctccatcctcctggtgtctctgtggatcgccccccacctccatcctcctggtgtctctgtggatctgctccccacctccatcctcctggtgtctctgtggatctgctcccacctccattctcctggtgtctctgtggatctggcgactctggggcctcacagaaggtgaatcctggttctttcgttggctacctggaaagaaaaagacagaagcttatttgccagatgacaagaacaaatcgattgtttgggatgaaaagaaaaaccagtgggtgaatttaaatgagccagaagaggagaagaaagccccgcccccacctccaacctcgatgcccaagactgtgcaagctgccccgcctgccctcccagggcctcctggagcccccgtgaacatgtactctagaagagcagcaggaaccagagctcgctacgttgacgtcctgaacccaagcgggacccagcggagcgagccggctctcgctcctgcggactttgtcgctccactcgcgccactcccaattccttctaacttgttcgtgccaaccccagtgtcttcagtgagaccccagggacgttcgggacggaatgatggcctcctcgctctctcatccccagatgcagaagaaccacagcttccagacgggactggcagggaagggcctgcagcagctaggggcctggccaatccagagcctgccccagagcccaaggttttaagctctgcagcgtcactccctggctctgaactcccctcctccaggcctgagggttcccagggaggagagctttcgcgctgtagttcaatgagttcattatcacgtgaagtgagccagcattttaatcaggctcctggcgacctccctgctgcagggggccctcccagcggggccatgcccttctacaaccctgctcagctggcacaggcctgcgccacctccgggagctcaaggctagggaggattggccagaggaagcacctggtgctgaactaggcttgccctgctgtgaacttgcacttggagccctgacgctgctgttctccccgaagaacccgaccgacctccgcgatctccgtcccgcccccagggagacacagcagtgactcagagctggtcgcacactgtgcctccctcctcaccgcccatcgtaatgaattattttgaaaattaattccaccatcctttcagattctggatggagagactgaatctttgactcagaattgtttgccgaaaagaatgatgtgactttcttagtcatttaggatgatttaaggatatagtattcctggtcatttaagaatgttcattcattgaagccggagctgtctctgccacaggagagccacatggtcggtagtaaccagggcctctccaagcccagctgtgagtcactgcccagtgagtcccgcgcttcctttaaggtgctgggagcaaagagagggtgactgaggcagaccccaacccctgctctgcaccatctgggccctcgccgtgtttgaacctggctgaatgagtggagggcgctgtgttctcaatcagcgcctccgaggagccgtggggttccttcggcattagttcacggtttttgagagaggccctagttactgcagtgattttctttcctgttgcaaagacgcttccagcctcactttactttctgtggcctgatgaggaccatgggtgattttgtgtacccaaagcgctggggactgcccaccgtgtggcccagtcactgggaaggagccccagagagccggctgtctgacatgatggctcagggtggtcatccaggttgaaaactgaccgtgtgatgtttgatttgggcttcatttcgtgtgtaggagcacggttagactcactgttaaggaagctggatgcacttctctaaaaggctgcactttccgtgagcacttttcgtggtacaatccacatgacccactttctcccctgggggacgttggttcagaggttggtagcacttggggagagtatcttaacacagtttcttgacagcagctctggaacttagtatttctgccccgagttttgccacactgagactttgagtagctcctggtggactcaaccctgttcaactcagagacgggcctcctctcactgatgcaaagctttaaggcttctctgactgttctgaaactcttcgtattcttgtcaagtctaaagagactgaagaaaagatttaaatactaataaaaatcagtagataatttctgtaggttctgctggaggaatacaaactgtttggtgttttaaatttaagtgtagaaattgtagaatgaggaattagcacagatccttcctggctttctgtttcacttgatcatttagcccagaccacccaggatgttttccaaaatgttccacaggcgtgtcccgctggatccatttgtccttgtcacttggagaaaggccagtccctgtgacggggcagccctctctgtccctcggtcagctcgtgtgaatcctgggacctcttccggtcggctctgcccgctgttctggggtcgactgccacgacttttgattcaagaagcttcctccaggcgggagcggctatttttcctaaatgagaattgttacattgcaaattgttgaataaaatattttgcgctccttcaagc

SEQ ID NO: 322 - DNA, 2299 bp, Homo sapiens
cttagcccaggggccggcgcctccccgcctcgcgcggactgtctcgtgcgggcagctgcgggcgcacctggaccctcgcaaggcccgggcggcgccgatccccgcgggacgcgctgcgctcggggcctcccgcctccccccctgccccagccgccccccggccgcgcggcgccccgcaccctgcagggacggctgccgcatcgctgggacaaactcggcagcggaggcaaagttatttcccctcccaggcagcgggattccgactggcaagatggtgcccagctctccgcgcgcgctcttccttctgctcctgatcctcgcctgccccgagccgcgggcttcccagaactgtctcagcaaacagcagctcctctcggccatccgccagctgcagcagctgctgaagggccaggagacacgcttcgccgagggcatccgccacatgaagagccggctggccgcgctgcagaactctgtgggcagggtgggcccagatgcccttccagtttcctgcccggctctgaacacccccgcagacggcagaaagtttggaagcaagtacttagtggatcacgaagtccattttacctgcaaccctgggttccggctggtcgggcccagcagcatggtgtgtcttcccaatggcacctggacaggggagcagccccactgtagaggtatcagtgaatgctccagccagccttgtcaaaatggtggtacatgtgtagaaggagtcaaccagtacagatgcatttgtcctccaggaaggactgggaaccgctgtcagcatcaggcccagactgccgcccccgagggcagcgtggccggcgactccgccttcagccgcgcgccgcgctgtgcgcaggtggagcgggctcagcactgcagctgcgaggccggattccacctgagcggcgccgccggcgacagcgtctgccaggacgtgaacgagtgtgagctctacgggcaggaggggcgcccccggctctgcatgcacgcctgcgtgaacaccccgggctcttaccgttgcacctgccccggtggataccgaactctggctgacgggaagagctgtgaggatgtggatgaatgtgtgggcctgcagccggtgtgcccccaggggaccacatgcatcaacaccggtggaagcttccagtgtgtcagccctgagtgccccgagggcagcggcaatgtgagctacgtgaagacgtctccattccagtgtgagcggaacccctgccccatggacagcaggccctgccgccatctgcccaagaccatctccttccattacctctctctgccttccaacctgaagacgcccatcacgctcttccgcatggccacagcctctgcccccggccgagctgggcccaacagcctgcggtttgggatcgtgggtgggaacagccgcggccactttgtgatgcagcgttcagaccggcagactggggatctgatccttgtgcagaacctggaggggcctcagacgctggaggtggacgtcgacatgtcggaatacctggaccgctccttccaggccaaccacgtgtccaaggtcaccatctttgtatccccctatgacttctgagggtacacaggggcactggggtgtggagagctgacctcatttctcttccccgaaggctcagcttcgggcaccgactgcgtggagcctcccgcctgttcccgccctctcaccagtgcacccaggcttctagggcagcgttgcacggcgccccatggaatagcacggaagagcagccacaaaactcaactgctgccatcactctttttttttttctgctttgaggcccttcccttagattatgcactaattctcttaaaactttttcatccaggggatgggtggctttccaaaatgctgtgcaaatggccttgtgagtttgaactagctggggagagaaaaggtggcaatgtgtgtcaggtgactatcagcccttctgcctttttgtagccaggcttgctatgaatgaaacggttctagtcgtgcggggggccctagtcatgcctctgcgcatgtggcataggaagtggagtctcctcccatgacccagcacgttgttcttatctgccttttcctctgtgacatgcctgcctgcctgccttctcatcagagagtcacaggagggccttaaaccccacgcagatccttctagaccaaggacccattgttaaaagcatggattctgcctgagttacttcccttttgagaaatcatatctcaaatacataacctggtaatataactgaaaaaataaaagtgattgctccttcc

SEQ ID NO: 323 - DNA, 3190 bp, Homo sapiens
aaaaaacttcccccaccaccagcggcgagtgggtgacagagcccccgtctccgcgcgtcttcgccgccctgcgccgtgacccgctgtggcactgggccacgagtggaggctgcgcccctccagttctgccttcatagttctctgcctttgcccaaaactgcagaaaatgaacaaatcccagggatcagtttcattcacggatgtgactgtggactttacccaggaggaatgggaacaactggacccctctcagaggatcctatacatggatgtgatgctggagaattatagcaacttgctttcagtgggtaaggacggttttcagaagtgtggaaggctgatgaccagatggagagagaccacagaaacccagacgagcaggcgaggcaatttttaattcttaagaaccaaaccccaattgaggaaagaggcgatctctttggaaaagcacttaatctgaacacagactttgtttctttaagacaagtaccttataaatatgacttatatgaaaaaactttgaaatataattcagacttgcttaatagtaatagaagctatgcaggaaagcagactgatgagtgtaatgaatttggaaaagcacttctctacctgaagcaagagaaaacccacagtggagtagaatattctgaatacaataaaagtggaaaagccctcagccataaagcagccatttttaaacatcagaaaataaaaaacttggttcaacctttcatttgtacttactgtgacaaggctttctcctttaagtcactcctcattagtcataagagaatacatactggagaaaagccatatgaatgcaatgtatgtaagaaaaccttctcccataaggccaacctcatcaaacatcagagaattcacactggggagaaacctttcgagtgtccggaatgtggaaaagctttcacccaccagtcaaacctcattgtacaccagagagcacatatggagaagaagccctatgagtgcagtgaatgtggaaagacatttgcccaaaagtttgaactcaccacacaccagagaattcatacaggagagcgaccctatgagtgtaacgaatgtgcaaaaaccttctttaagaagtcaaaccttatcatacatcagaagattcacacgggggagaaacgctatgagtgcagtgaatgtggaaaatcctttatccagaactcacagctcatcatacacatgagaactcatacaggagagaaaccctatgaatgtactgagtgcggcaaaactttcagccagaggtcaactcttagattacacttgcgaatccacacaggagagaaaccatatgagtgttccgaatgtgggaaggcctttagcaggaagtcccgactcagtgtccatcagagagttcacatcggggagaaaccctgaaactccagccaggtcttactgtggaaaactcctgccagaactcttcaagcgggtgaaaaacctcatgacagtattgagggaacatgggaatttatactgagatgcaatctctcaactcaaaaatgtattaaaaataggatcccatgagaacattatactggaagttacatgtgatacccagctaaagaatacatatcagaatatatccagttgtaaatagccatacccagttgtactacaatgagctttttaaaatcttgaatgaattgagtattctagacagcagcataagaaatatacaaacagtatcctatgaatttagtggttttatgtggatatgccacaaaacacaagtggtatgctttagatctgcacatgtgaatttagcataatcactgggaatttgaaattcttgtcctctgtgataattaggacataacaagattttccatactaaacatcacatgtgtttttcagtatctctgcaatccagtatgcattccaaatgaaatgtgtaacatttaaagtagcatggaacctacgtctttccctactgcttgctggcatatatcagttggtatgaacattgttcttgagctgcctcttaggaaacagaagacagtgttgaagttttccctgcttctggtttgctgaagattttctagactgcttctggtttgctgaagattttctagaagcactatttacacaaatatgcaaatgtgaaataaccgatctataacgtgaaggaggcagacatgagctgtactactcagtatgcaccacagaataagagtttgccgtgtaaagacaatatccccattcgtcatgctcttattttcccgtgggatatttgcatacaaatgcatgtctgttaccaaaatattgtgtaacacagacagaaaccacctgtttttgtctttccttgtttcccttaatatttcatgaattgtctagcaaaaatggtaggatgcttctgtagttcacaaatgttacatttcagagactttggaggaaaaattattttaaataactgtcaactgtttcattgctttttaaatttttcacgtgcataaccccctttagaagtaaatttttacactattttgttgtttaaaggaggcatttctacttccttgagttttgctgttgccaacctaaaacatttccctttggaacatgagttataagttattacttttcctttacatgtttacacttttataaaaatcagatttttcagtggtctctccagatattaacaagaattgttgtgtaactcaaagatttgcttttatagacttgatttcaaattcttaagttcagcctttccctatcaatcacaaatcatgtattggaaattataaatggcaaccaaaaaccggcttttaaaaaatatttttggatatcattgatgtgctgtcacactatatattgagtgactttctgaacaaatttatccagaacatccatagcccaataagcttttgtctaagttgtcatcttacttactcacaaaggaggggaaaacgttattttcatagctgcttttagaaatgtagattgtaacagcctccttggacaacattgtgagtctgttttaacattaatatactcttacaacctaggaatctcctgggaatctatccctaaggagtaaaaagcgccagcacttaagattatatgtttactaatgtatattgtattttttggtaaggaccaaaaaaacaaacaaaaaaaagaccatcagtaagggaatggatgaataaattgtggtaaaaac

SEQ ID NO: 324 - DNA, 2300 bp, Homo sapiens
attgtgttctgactgcgatgtggcgcttgcgatctctcgccgccggcagaggctcctcgaagagcgacacggggctgaccaggcacggtggtcaaagccgcagagggagagcgggagcggtcgtgaggtcgtctggggagaagggcggaggcaaagccgaggagcaggtgtgtggacccttctagcctgaggagtcctgcaggtgtgaagctccacacctgcctccatagcactttgcctgtccctaagagggctcatcggagaagaaagaatggctgtcagccacctgccaaccatggtccaggaatcggtgaccttcaaggatgtggctatactgttcacccaggaggagtgggggcagctgagccccgcccagagggccctgtacagggacgtgatgctggagaactacagcaacctggtctcactgggactcttaggacccaaaccagatacgttttcccagctagaaaaaagggaagtgtggatgccagaggacacccctggaggcttctgtcttgactggatgactatgcctgccagtaagaaatctactgtcaaggcagagattcctgaagaagaattggatcaatggacaataaaggaaagattcagtagcagtagtcactggaagtgtgctagcctgctggagtggcaatgtggaggccaggagatcagtttgcagcgagtggtactcactcaccccaacaccccatcacaggaatatgatgaatccgggagcactatgagctcatctcttcacagtgatcaaagtcagggatttcaacctagcaaaaatgcctttgagtgtagtgagtgtggaaaagtcttctctaagagttcaactcttaataaacatcagaaaattcataatgaaaaaaatgcaaatcagaaaattcatattaaggagaaaagatatgaatgtagagaatgtgggaaagcctttcaccagagtacgcaccttatccatcaccaaagaattcacactggcgagaaaccctatgaatgtaaggaatgtggcaaggccttctcagtgagctcctcacttacgtaccatcagaaaattcatactggagagaagccttttgaatgcaacttatgtggaaaagcttttatccgaaatatacaccttgcccatcatcatagaatacatactggagagaaaccttttaaatgtaacatttgtgaaaaagcctttgtgtgcagggcacaccttaccaaacaccagaatatccacagtggagagaaaccctataaatgcaatgaatgtggaaaagcctttaatcagagtacaagtttccttcagcatcagagaattcacactggagagaaaccctttgaatgtaatgaatgtgggaaggccttcagggtgaactcttcccttactgaacatcagagaattcatactggagagaaaccttataaatgtaatgaatgtgggaaagctttcagggataattcatcctttgcacgacatcggaaaattcacactggagagaaaccttacagatgtggcttgtgtgagaaagcctttcgggaccaatcagcactagcccaacatcagagaattcatactggggaaaaaccttatacatgtaacatatgtgaaaaagccttcagtgaccattcagcccttacccaacataagagaattcatactagggaaaaaccttacaaatgtaaaatctgtgagaaagcctttatccgaagcactcacctgactcaacatcagaggattcacacaggagagaaaccctataaatgtaataaatgtgggaaagcttttaaccagactgcaaacctcattcagcatcagagacatcatattggagagaagtgatatgaatgcagtttgtatggaagacctttgagactgagtagatgaattattgaatgtgagataatccgttctagagaataactatgaaagcttgcatcaagatagtcactttatttactgagggtcaggtttcacagtgtcatggggtttgggcatttaagaatggcaaacactcggctgggcacggtggctcacgtctgtaatctttgggagcactttgggaggccgaggtgggcggatcgcgaggtcaggggatcgggaccatcctggctaacagggtgaagccccatcgctactagaaatgtagaaaattacccgggcatggtggtgggcgcctgtggtcccggctgctcgggaggctgaggcaggagaatggcatgaacccgggaggcggaggttgcagtgagccgagatcgtgccactgcgctccagcctgggcgacagagcaagactcagtctc

SEQ ID NO: 325 - DNA, 2189 bp, Homo sapiens
agtattttcagtgtcgtctttgtgatcaccacacgccttggactacagatgctggcgttggcggttccttatagtacaggcagccacctgtctcccccagtccctaatctcttccccgagctgaatttctcacacccatacatttcgaattcagacatttgtttctgcagatctcggatgctagcacttgacactgtgagcgcacgcgcgggcacacacgcacacagtctcctagggagtgtgaggaacgtcgggttacttccgttgttggggaacttttactgtgcaagtacggttttaaaaacaagcaaacaaattagcatagtaaataattggtcttcaagtagcaaagttacaaaataaacaaatacaaagagaaacccacgttattgcccctagttctgagatatgtctccctctgcggtctccgctagaagcccagcccgctctcgccttcgccccagtctcgtgccttctggagcattatttttcaatccgcgtgtttcccagctggctctgcagccatccgttaaatatgtatttaaaacatgaagaactgaagcgtggtgttatgtcgtccaacggttacaaggatgacccataaccgttcaattagtagaatctgtcgctcggacgacgcagggagcgggggggtggggatcagaaagggctcgggcatttgtagatgcctccttcgggcctaccccgccaacagcagcgaggccatgtgtggtgcgcgctgtggggccaccagtcggggcgcggagttgtgcgcctgccagtgtagctaataaacaccagcaggcgcaacgtgcgcgctccttggttgcagccgctgaggttagtccagccgccggcacgtgtcccggaacccggtttctttttttgttgctgcccactggtgtctgtcctgcgaccgacttgcggcggtgagagcaagcggtctcaggttctttgcgcgctcggtccagtggctggagttgggagtcaggggtgaaagtcgaggggcccgtcttggcatggcgcgagtctagagcttggaaggcaaagtcggaagctctgtgctgctgctggccccttcttcacctggcaggcttccctcaacatcctcccgtcgccggagtagcttgggaggtcggggaggtctgtgtcgcccctgggctcccttggccctggtgccaatcggatgctgagtacctctcggtgtgtctcctatgcctccccaccccgtcccaggaataactagaaattagatcccggtgcccaagcttgccctggtgcgtcctggaggcgtccccaggacttgtccgggtcctgcgcccggcgcccggggtgggcgacctgggcgggtcccaggcactgcggttcccaccagcgcgcgcagctggggccccttcctggggaatggagtgctcatttgcagaggctaatgggccccggctccgggagttcctggttggcccccgcgtcctggtgctgttggcctcctccgtgtttttccctcttctttgtgtttctctcccacaaaagaccgggtgcgtgtcggggccggcctttgttggaccgccgggcggcccgggaggagcccgtgccaaaccggcgggctctcgcggggctccagggcgcagacctcccactgcttcccgggtccctcccgggccttctttctgattctctcccttcccttctccgagttcctgctcacattcaggctgcgtctcggcctggctgccaaacagaacgacgttcttgcgcagagctgaccaggggtggcggcgggaggcaaggctcccggcaccggaaagcaaagcaaagaaaaaggcattgcagccatcgctcctggtcgtgaatgacagcgtttggctaccaaacatgtgctacatgacccctcagaagtcagaactctgcaaacaaatggcgtgtctttctcacaaaacagctcatggagtcgtccagggtcagcacggctggtcagaaccgcggctcccgggactggtccaggacagttcacgccgggtgcggaggacaggccctggcacttggcaggtgcttggtaaatactgccgaatgcacacacgtgcagatgtgcatgcggactgatgtgaaacatggtccgtaaaatacatgtaaatgtgggcaaaggtgtgttatgtgttttttcgctgtatataataaactgtgagagctgt

SEQ ID NO: 326 - DNA, 1859 bp, Homo sapiens
acggtgcactctgggagctgtcactaggcccttcggctcccggtctcggtgtagctgccgtggttgccaggagagctgcgccggcgagaagcggccgagccagcagcaggtaatgactttacatgagtttggaactggtctctagtgggaagttgtgggaggatgaacacagaagagctggagttattgagtgactccaaatacagaaactatgtagcagcaattgacaaagcactaaagaattttgaatactccagtgaatgggcagatttgatatcagcacttggaaaacttaataaggttttacaaaataatgcaaagtaccaagtagtacccaaaaagctgaccataggcaaacgcctagctcaatgtctacatccagcattaccaggtggagttcatcggaaggcgcttgaaacatatgaaattatcttcaaaataattggacctaagcgacttgccaaagatctttttttatatagttctggattatttcctcttcttgcaaatgctgccatgtctgtgaaaccaacattgctcagtttgtatgagatatattatctgcctttgggtaaaacactgaaacctggtctacagggattgcttactggtattcttcctggcttagaagaaggatcagagtactatgagagaacaaatatgttgttggaaaaggttgctgctgctgtggaccagtcagcattctacagtgccctgtggggtagtcttctcaccagtcctgctgtgcgtttacctggaatcacgtatgttcttgcccatttaaacaggaagctttctatggaagatcaactttatataattggcagtgatattgagctaatgaagcagtaagtacttcagtgcaggactcaagtgtacttgtacagagaagcacactggacctcatactcttctgttttccattccacatgagtcaggccactcgaccggatatgatcaggatcttgtcagcagcccttcatgtagtgctaaggagggatatgtctctgaatcgaagactttatgcatggcttcttggttttgataacaacggtgctatcataggacccagaagcacaagacacagtaatcctgaagaacatgccacttactatttcactaccttttcaaaagaattattagtccaggcaatggtgggaatcttacaagtgaatggatttggagaagagaacactctaatgcaggatctaaagccttttcgcattttaatcagtttactggacaaacctgagctaggacctgtaattctaaaagatgtcctgattgaagtgtttagaacattatattctcaatgcaaagcagagttggatcttcaaactgaaccacccttcagcaaggatcatgctcagttaagcaggtggattatcaaaaaattaaatgtgacatgaagacataatatgtattcacttaatataaacttgaagtgtaataacttgggatcctactctatgaagtttgtgttctaataagtaaagctgatttaatactagtaaagctgatttaatactgacatactagttgtattgacagtgcctcactatataaagacaattgttttaattgttacaaaagacaggaggaggaaataggtaataggctaaagggttgccacttgaaataacaaagttctttttccctgatgcaatttcagtaatagtggctattaacagcactagttggttttgttgttgttgtttttcaaactaagaataataatttgattgaaactggtcaaggtaaacctttcttaagaaaatcctgaatagcacagggaagcagacaaaattcttcacaatcaaggctgtgaaaatcaaatcactactcagtttgtatgtgcc

SEQ ID NO: 327 - DNA, 2926 bp, Homo sapiens
acacacttgcttgcacgcacacacttgcttgcacgcacacacttgccttcacaacccgctcgcacacacgtgcacgcacacccttgcacacgcacgtgaacacacacttgcacacacatatgcatgtacacagccttgcacacacacacgcatgcacacagacacccacttgcacacacatacacacacacactcttgcacacacacactgccgcacacggtttcccccattctgtctcctgactctgcccctgccggcctggatgggggacacacccttcgcctcctccaagggtcaaaatcctacctggctttcaagggctggttctaagatcctctgctcctccaaggagcctgtccccatcccccaaccctatgtgcacttgtgctttgtacctctccatgtgccatcacagccaacctggctttgtatccctaaccattcatttattcattcactcgttcaacaaatatcagctgagcccctacacggtgtcaggcaccaggccagacgctcatgatgcatggggcagggttaccagggtgcctaccttcctggagccttaagtccagtgggggaggcactgcagggaaacctccttgaaaacaagacctcggtggtctggactttggggggtctcttccccgccccaacctttcatggaggctgaaacatgacagatgccaaacagccccagccagagagacgggctggcttcctgctcctctgtctcccagttcttttcccccatgaacaggaaccccaggtggatccgcatccctggacccacaggtgagcgaccccggcggcccacccacacgcacctgagggcagggcgaggcaggccggggctgcagcgctccagccaccaggcgactcagcagcagctggtgcatctgcgcgttctgcagcatcatcagttccagcaggtctaggaagcggggttcagcaagcccacgccgggcctccgagtccccctctccctgacacccctgtcccgggggtgaagaatgggttggcgggttgtgctgcggggactcccagaggatgtgcgaggcagaagagggtgagtggtggtgatggtgggggtggggtggggggacccgggagtctcaccttccttcacgcggcctggctgcgggggcgcaggtgggacggcccacgagaggggctgcaggaaggtgacccagggctgggggtgtgcgcggagtcagccaggtggggtggggggaatggatggggacacgtcgcgagccccaacccccccggccagtggcctccctaaccccgcaggggccaggttctctcctccccgccccgcggcctccctgctccctgccacgcctcttcctctcggtttggggctgtctctcctcgtcccccacccctccaggatctggcccctccagggacagctccccactctgccgtctcccaagctaaggcaggatctgctcccgggctcagccctcaccgtcgggactgcgctctgcggtggggagcgaccccagcttccgcccgccccagaggccatggctggcgccggttgccttggcgacgccgaggacgccaagagagaggggcttcctgccaggaaagagtggtttctggagcagaccaaggaaggaaacaccgcccgaattcacggaagaggctgaggactctggctggaaacacgtggccggcttctcgcctctctccttgcggctatttgccctgtttcctggccaaggtagaaagagaacaagccattttgctcatcatcaacaaaccttgaccaaggaagtgtctgcgtgtgcaatgtgccatctgaaccctggaggcataagcagtatggtcacttgtcccagcattgttgggaagtgaaaatgtatccatggaaagagagcagaaagataagactacgccccggggataatgaaaaagagaggacttgaccgctgagggatggagttccaaggaagtcagtccttgatggggccaagcagcaggggaagacgggcgctatcaggctggggacagagcccaagccaagacccaggtgtatgaatggacaggacctgagatgacccggtgggtcaaactgtctgactgtagaagaggagctgggcagagagcagaggtccagggacaggccaaggtttggaatgccaaggtttggaatttaggcttggccctgtgggtaatggagagctatcagtgggtttcaagcaaaagggagataccaagtgctgtggccagccatgtttcaggaagattgttcttgtccacctttgtttatgtcaaccacatttagaagtaacaaatgtctgatagggggtcaggtgcggtggcttgtgcctatagtgccagctactcaggaggctgaggcaggaggatcgctcaagcccagggattcaaggatgctgtgagctacgatcacgtcactgcactccagcctgggaaacagggtgagacccagtttctaaaacaaacgaacaaacaaatgtctgatggggatgcatcctcccaatagaatactattcaaccatggataatgtgggaatagaatacctctgttgatgtgaaaagttgtccaagacagttgagtcaaaaatatcagtaagcatagtaagatcttatttttgttttaaaaatcatatgcataagtccaggcacggtggctcacgcctgtaatcccagcagtttgggaggccaaggcaggcagatcacttgaggtcaggagttcgggaccagcctggccaacatggtgaaaccctgtctctactaaaaatacaaaaattagccgggagtggtggcgggtgcctgcaatcccagacactcaggaggctgaggcaggagaatcgcttgaacctgggaggtggaggttgcagtgagccgagatcatgccactgcacttcagcctgggcaacagagactccatct

SEQ ID NO: 328 - DNA, 2725 bp, Homo sapiens
ttctactaccaggctcatccgaggacggaggctgtcgttatacaacgcgcaagtgtggtctctgtcacagatgtggctgtcgcagagagtgctgcctcctctcccgtttccagcagatgcttgggaaccttcagaagtcttggggattttctcccagcaccgtagccatgccaccacgagtgaatccttaacgtggaccagcacgggcacctcagatgccaggaccggcgtgatcctgcaggacgctggcatcggattcatcctggtgatagaccggcgacgggacaaatggacctccgtgaaggcgtccgtcctgcgcatcgcagcatctttcccggcaaacctgcagctcgtcctcgtgcttcgcccgacgggttttttccaaaggactctctccgacatcgctttcaaattcaatagagatgactttaagatgaaggtgccggtcataatgctgagctccgtaccagacttacacggttacatcgataagtcgcagctgaccgaggacctgggtgggaccctggactactgccactcccggtggctgtgccagcgcacggccatcgaaagtttcgccctcatggtgaagcagacggctcagatgctgcagtccttcgggaccgagctggctgaaacagagctgcccaatgacgtccagtcgacaagctcagtgctgtgtgcgcacacagagaagaaggacaaggcgaaggaggatttgaggctggcactgaaagaggggcacagtgtcctggagagcctcagggagctgcaggctgagggctcagagcccagtgtgaaccaggaccagcttgacaaccaggccaccgtgcagaggctcctggcccagctgaacgaaaccgaggctgccttcgatgagttctgggcaaagcatcagcagaaactggagcagtgtctgctgctccggcactttgagcagggcttccgggaggtcaaagccatcttggacgcagcgtcccagaagatagcaaccttcacagacatcggcaacagcctggcgcatgtggagcacctgctgagggacctggccagcttcgaggagaaatcaggcgtggccgtggagagggcccgggccctgtctctggacggcgagcagctcattgggaacaagcactacgcggtagactccatccgcccaaagtgccaggagctccggcacctctgtgaccagttctctgcggagatcgcaaggaggagggggctgctcagcaagtccctggagctgcaccgccgcctggagacgtccatgaagtggtgtgatgaaaggatttacctgctggcctcacaacctgtggacaagtgccagtcccaggacggcgcggaggctgccctccaggaaatcgagaagtttttggagaccggtgcggaaaataagatccaggagctcaacgcgatttacaaggaatacgaatccatcctcaaccaagatctcatggagcacgtgcgaaaggtcttccagaagcaggcaagcatggaggaggtgttccaccgcaggcaggccagcctgaagaagctggcggccaggcagacgcggcccgtgcagccggtggcccccagacccgagacactggcaaagtcgccctgcccctccccaggcattcggcgaggctctgagaactccagctccgagggcggtgcgctccggagagggccctaccggagggccaagagtgagatgagtgagagccggcagggccgcggctcagcgggggaggaggaggaaagcctggccatcctgcgcaggcacgtgatgagcgagctcctggacacagaacgggcctacgtggaggagctgctgtgcgtcctggagggctacgccgcggagatggataacccactgatggctcacctcctgtcaacaggccttcacaacaagaaggatgttttgtttggaaacatggaggaaatctatcacttccacaacaggatattcctcagggagctggaaaactacactgactgcccagaactggttggaagatgctttctggagaggatggaagatttccagatctatgagaagtactgtcagaacaagccccgctctgagagcctgtggagacagtgctccgactgcccgtttttccaggaatgccagagaaagctggaccacaagctgagcctggactcctacctgctgaagccagtgcagaggatcaccaagtaccagctgctgctcaaggaaatgctgaaatacagcaggaactgcgagggggctgaggacctgcaggaggcgctgagctccatcctgggcatcctgaaggccgtgaacgactccatgcacctcatcgctatcaccggctatgacgggaatctcggcgacctgggcaagctgctgatgcagggctcgttcagcgtctggaccgaccacaagaggggccacaccaaggtgaaggagctggccaggttcaagcccatgcagcggcacctgttcctgcacgagaaggcagtgctcttctgcaagaagagggaggaggacggcgggttgggccccaagaagctggtgcccacccagcctcctgtagagcccactcgtgggtgcaccttcctcagaggagacagtccccacccccctaccctttatgtcatagaatgctgtcactgagccttcctaactatacatacaattctcattttgtaagaaaatggaactgctaagcatggatttgcatttgaaaaaacattcattgttaatgtcagaagc

SEQ ID NO: 329 - DNA, 1822 bp, Homo sapiens
tccgacaagtgcgctgcaccagtggcaccggctgggggcgagccgacctcgagcagccgccgccgccgccgtcgttgctactgccgcagcggagttcagagggcccggaggtgggagacttcccacacggtgactgagatgtcgtccactgcggctttttaccttctctctacgctaggaggatacttggtgacctcattcttgttgcttaaatacccgaccttgctgcaccagagaaagaagcagcgattcctcagtaaacacatctctcaccgcggaggtgctggagaaaatttggagaatacaatggcagcctttcagcatgcggttaaaatcggaactgatacgctagaattggactgccatatcacaaaagatgaacaagttgtagtgtcacatgatgagaatctaaagagagcaactggggtcaatgtaaacatctctgatctcaaatactgtgagctcccaccttaccttggcaaactggatgtctcatttcaaagagcatgccagtgtgaaggaaaagataaccgaattccattactgaaggaagtttttgaggcctttcctaacactcccattaacatcgatatcaaagtcaacaacaatgtgctgattaagaaggtttcagagttggtgaagcggtataatcgagaacacttaacagtgtggggtaatgccaattatgaaattgtagaaaagtgctacaaagagaattcagatattcctatactcttcagtctacaacgtgtcctgctcattcttggccttttcttcactggcctcttgccctttgtgcccattcgagaacagttttttgaaatcccaatgccttctattatactgaagctaaaagaaccacacaccatgtccagaagtcaaaagtttctcatctggctttctgatctcttactaatgaggaaagctttgtttgaccacctaactgctcgaggcattcaagtgtatatttgggtattaaatgaagaacaagaatacaaaagagcttttgatttgggagcaactggggtgatgacagactatccaacaaagcttagggattttttacataacttttcagcatagaaaaagaggtacttagaagtattgaaggaaaaaatgaagacctaagaaaaaaatatttcatgatcatttccctaagccatttccagaatggtaaaaggtttaatcagtttttattacctcatttttaagcctgtatgagaatgtagaaactatatattatatgtatatttattttaaataatattgtatattttatgtttgtaaattgtttagaaagataattggttatgagatgtaagttttaatttcttaatgtgcatttttgtttctagatcttatacagaaatcttgattaataacatacacagaaatgtacatactgcatcgtctgcagagatcttgatcaataacctagaaactaggttatctgggttattgatcaagatttctgtagatgatgcagtgttctatcataagtaattctggaatcaaagactattggatacatttggcattgggctgagtgtggtggctcatgcctgtaatcccagcactttgggaggctgagacgggcggatcatctgaagtcaggagttgaagaccagcctggccaacatggcaaaaccccatctctaccaaaaatacaaaaattaaccatgcgtggtggtacacgtctgtcatcccagcagctcttaaggctgaggcacaagaattgcttgaacccgggaggcagaggctgtagttagccaagatagcaccactgcactccagcctgggagacagggtgagactccgtctc

SEQ ID NO: 330 - DNA, 2336 bp, Homo sapiens
gaataaccggagctctctgcaacgctgaaagaaactggccagcaacctagcttaaaggatcctcacatctgcggcgatgactctgtgcacagaccaaggaaggagaagccgccggagccagtaaagtactcccttggtggtcaaattccggagggctaaatgtgtgtgtgcatgaatgatcacaaataaccctacctgaggtgttgttcatgtggatggtgacaagacctactgctggacagagtgctgcctttggactttccagtgcctcagcatcagcctggggatcacgttctcatcaaagaggggaaagaagggaaactcgagccagcccgggaaggaccctaccttgtgctgctaaccactgagactgctgttcgtaaggttggaaagagatggacacatcacacatgagtcaagcaagcaccattatcctcagaatcatgggccattgttcctggatcaagccctaccaaattaaagctaaggaaagcttagtctatctatcttttcctttcccttccttacccagtgcttatatccattactattcctaccactagcaactctaaccccactttagaacgcttctgtggtttaggagcagaggtcactggaaaggatcctatgggcttctttaaggtgggctttgttctccctcctccacctcctatggctgcccctttcccaaacctacaaaatcaaactatgactcacctcatgccaaatgacaaaagcaaggtcccggtagtagaaataggagacctaaggcaaaccatagccattaaaacagggtataaaaatgtaaatgcctggttaaaattgattaaatattctgtccacacgttaaacaaaggcaatttttatgcttgtgcacatgacaggccagaagcccagattgtcccctttccactagggtggccctctagttgactgggcatggcctgcatggcagatctttcccaggattattcagcctggggtaacaagtcgtgccaagctctctctctgctacatcccgaagttcaacaccctgcgggtcagcccccaagggccatccagcttccatctcccaacactaagttcacttcgtgtctctcaggaccgggaggaaacttagcgttccttggagtcctgaagggatgcagtgagattaagaaatttcaagagcttaccaattagcccttactcatccctgagcagatgtgtagtgatattatgatggacctttactggacactctgccgagtaactgaagtggcacttgctttagtccagttggctatccctttcacgctggcatttcatcaaccagagaaaggaaaaataagatatcataaagcaaaagaagccccttatgggtcttttgactctcacatctatttagacataattacagtcccacagggaataccagatcaatttaaagcctgaaatcaaatagctgcaggatttgagtcaatattttggtgggtgacaataaaatgtaaattggataaactacatctattacaaccaacagccatccattaactacactagagatgctgttaaaggaatagctgagcaattaggggctactagccagatggcttgggaaaaataggatagccttagacatgatattagcagaaaaaggaagaatttgcatcataattaaaaatcaatgttgtaacttcatcccaaacaacaccgcccctaatggaagtataacaaaggcattgcaaggtctgactgctctatcctgagttagccaataactcgggggtaaatgacccctttacaggatggctggaaaagtggttcagtaaatggaaaagaatagtagccccaattcttacttccatcgcagccatcataggtgtgcttattcttgtcgggtgttgtgtcacactaaggaaggagaccgctacaactcctgctgccctcctcccaccaccttgcctagttcacaagacaggaggaaagagagaaagcaaaaagctggaaagaagcaaaagtaagataaatagccagacaaccttggcaccaccacctggccctaggagttaaaaaggtaataataataacatcaaccccagacctaaactacttgtgttatctgtaaattccagacattgtatgaaaaagcattgcaaaactttctgttctgttagctgatgcatgtagcctccagtcacgttccccacgcttgctggatttatcacgaccttttcatgtggacccctttagagttgtaagcctttaaaaaggccgagaattcagtttgcagggagctcagctcttaagatgcaagtctgccgatgctctcagccaagtaaacctcttccttcttt

SEQ ID NO: 331 - DNA, 1796 bp, Homo sapiens
atgcgcggagggggaagcagtggcgaaattggatgctttttgctgagtttctcagagaagtttctggaaagatggagccaaagggacgctggggggtggggagcgccaggaagcaagcgtttgaaagaaagcgaaaaaacccaagcgcaccgcgacacctccaaccttcgagccacggcccaagcagagcccagggccactgagaccctcacgccagagaaaaagcacagggaccgcggcagccgctcctccctctgccactgctcagcccccgagactccccagcacggggagagggcagggggtagccatgagaaacctagagcgctcactggacttttgcgaggtggaaggaaagccgaaacccgccctttggagccgcctgtgcgcacgggccccgtcgagtgggctcagtacgttaggactcagcgtggccgccaaagcattggttgggggcgtctttcactaatttttcctaggttttctctcctatcgggctctgtggtcctttcaccacccatcttcactttggtggcctgacgctaacgctgcgagttggggaaaccgtagtaaccccgggcctgaggggcgtcccgggcggcggtgctccgtttcttccagcggttgcccctttaagaaaaagccccccggagaggggcccgtgtggctgagtaaaggtggcgtgcgcccgcacaaaggcgccgcgttgttggcgggctccggaccctgttgcccctgggcggggcggcgtgggaagaccggggcgcctgggcggggagaacgacgttggcgctagcggggcagggcagggggagggagtcacggcatttagcaggtgcttctccgcgaccgagcgactgccattttgtggtgcggccgccgacatttcgcgcggccgaggggcggggtgtgggcggagcggcgggcgcgcccgggctgtccctcggggcggcgggctaacgcggccgctttgttcttcgcttctcggctcgaggccctagtctcgaccgccgaccgcctcggaaccgggctgcatccgagctgccacgcggcgtgtgaaccttgaagcgcggccggggaatccgcaaggcgccgactctcttcctccttgcaagcccttcgaaagtgagatttctcaccccacccttgcagggtggagagaacacgtttcaaaaaggggatgcctagaactcagccgtgggaagtgcctgtctaaagccttgtgctggtgccagtagcaaacccgtgcgcgtgctcggctttgagcgatcatggagctctgcaaatagctcaactgcagagcgtgccccttagagctcctgtgctgctgggaggcctcataaaggtgccaaaaccaggtgtccccagcggttggcctctttaaaaagaaaaaaaaaaaaaggcggagtgggatgtccttgacgtgctgaaagacggagtagaatgagacgttggttttcattggctggccattaagcacgcactgcgcaactgttttccagatacgggtttatagcccattatttatatcggagccataaacttgaacaatagattggaatatcttatttttgcctgttgagaatatctcccatttaacttcttttgaaagttcagatgagtatataaataatacattgacccagtagaatctattgtgtgcgttccagcgtcatttcaaagagctattgtttttctgatttcaaaagaaatatttaaatgtgagtctttgtgttttaatgttaaccttgtggttcgaaatcaacaaagccaggaaattcaagagaactgctgct

SEQ ID NO: 332 - DNA, 2488 bp, Homo sapiens
atgaaacccaggacagtaaagatctgtctgaagcagcttcacactctgcattacagtctgaattgagtgctgaggcaagaagaatactggcggccaaagccctagcaaatttaaatgaatctgtagaaaaggaggaactaaaaaggaaggtagaaatgtggcagaaagagcttaattcccgagatggagcttgggaaagaatatgtggcgagagggaccctttcatcctatgcagcttgatgtggtcttgggtggagcaactgaaggagcctgtaatcaccaaagaggatgtggacatgttggttgacaggcgagcagatgccgcagaagcactttttttattagagaagggacagcaccagactattctctgcgtgttgcactgcatagtgaacctgcagacaattcccgtggatgtggaggaagctttccttgcccatgccattaaggcattcactaaggttaattttgattctgaaaatggaccaacagtttacaacaccctgaagaaaatatttaagcacacgctggaagaaaaaagaaaaatgacaaaagatggccctaagcctggcctctagctttcactcgtggtgaatatttcagacctaaagatccagatagtatctctgttcatatgtgaataagttgaagattgtggggctactttttctcatagcactttattttgaatgttgttagtttgtgctgagaatggtcgtccgtatttgaaccaattatttattttaaaatatatttaagctacatttttgttttgaaaaattgccataaatttggtgccactttcttttatttatttgactgagttaatattattgtattaacattttaagtatatggtgtttacattcttatttcttttgacattttggaaataatcataacttgtctttccaaaataaccattttcttgatggaactcttcctagagtttttaccaaatagctaactttagtagtaaaacctcattgtgtatccattcccccacagatgaactaagaaagtcaccaagtgtcttaagctgttttatatttgttacgaagaaggctattgctacaatatttttaaaggtttcttttttaactttgaaattttttgtttttccttttctttttataaatgtaacagagggtttcaaagcatattatttttcagagagatttagttttactttaatggagtgactgtgaagtggttgggattttttgcttgtagaaagtagacttgctctttgtcagatttccaaacaaccttgccagccttggctgtcaaaaggaggcaggagcagttctcaacacaccaagccttattcccactcccttgggttgctgctgagccaaatagcatctttacagaggaagtgggatcagaggcaggaagtgtggaaagttgctaagaagcagggcttgcctctgtcctcccggggactccacagggatattcgtgcagggcaggggctctgtgccagccctgctctctcagatgccacagccactctgcagaggtgactcttggagctggaggaagtcaaaactgggccactgtttgtactgatggtgtattagcatgagcagcgtggccctggccccacactcccaaatctgccactccatagacccacttgcctcaaggctttatatttggctgctttcttacaatgagaattaagatttttaaactgaagttgaccatacaggttgcattagccctaactggcttcatgtaagaagggtgactgcctaaactagttccttgtaagctgaaccatcaattatcagttgaagccatacttttatttaaattaatatacgtagataccagaggccaagccacagagaggataatagttcttcccaataaaggtgatattaatcagactaatttcgaactaaagaagttactgcttaaagacggaatttcaggggaagcaagactcatttagaacaaatgaaatttctccagtcctacatttctgaattgacttccagcacatcaaaaatatttcagtcattatcagtctcattaactgaaatgccaaatgctaaatgcagtgttctttcacactgttttaattttcttgggaaattgagtccagtggatgttaatggagtgggttgcccatccctgaaatgtcttattttcaagtgcctggcctgggaaagaaggggaagaaacaattgcattatatccaaagatacactataaaaatagagtttttaccaaaaaaagatgtttgttctcatctcagtaggcctcatttgggcaagtgacccacaggtcttttggcgagtttgctatttgcctgttgaaatacttgtttcaacttagagaacagttatgatgtgaccatagcatggcacaactaaaaatctaagcctgaaacctgaaaaaagagatatgacaagggaaattaatcaggctatacataagtattgtatttatttgaataaaaataaaaagagcaacccat

SEQ ID NO: 333 - DNA, 2576 bp, Homo sapiens
ttctgtttgttttggctgctctgccttgccctgccccacccacctgcccgtggtagtaagctctggggcccaaagaaatatgagaagtgtgggtggaaaaacatggcctgggatgaggggagtagaaagcccccaggatgtgcagtgggccttgcctcagcgctgagccaggaagaagggcagagtcggaagtcaggtctgtgggggtgggagtgggatgatggggaaatcgtgacagcgaggaactgtgttggggatgtagtgcttcctgagtctcagcataacagtattaagagcatggggtcagaggcaagatagatctgagtttaaatcccagctacactgccttcaagagtgtgaagtttaacctcccagagctgcaggttccttatctgtaatgtggaaataaaatggcacgcacctcagagccttgttagataaaagacaaggcagtaggaagtcttgatacggtgcctcgatgggttatcagtagctcatcctcatatttctagttacgtctgtgctggaggatgcctttgtctgctgcttttcctcccaccatctatccttgcagagtttctaagcacaaccctcttcgcccgtggggccccagtcaggtcatccagatgggtctggtggggttggagagggtgtgtgtgttgtgggtgcacacctgcctgctgcttttggaagccgatcgaactccttgcttcccttaacctgctgcttgctcacctggagctgtggcctagcggggctgacggctgtggggccccctcctggatgtgcctttggctgcgctgccctgtcccaactgtgctgcttggctgtgctggcccggctgggccgtggtggtgctgttctaacgcttgcagttgtcttgcagccttttgctcctgtgaggaaagggttgtggcctggccccgcccagggctcgggttaggatgagcccaagctcaacccaagctctcccttaccctggtggcagcccctgctggtagtggcattccctataagagaagcccatgccggcaggacatcaccagctgtcccttggctttggatgggttggggaggaggcctctggagggcaccacctctgcctgcctgtcagtctgagccctgtctggttttcctgaggaacacgtcctggcaatgagagctggtgtgaaatgtgcagctttcccaagcctcgagaggtaaatggagcagcctctctggtacaggctgtcccaagtttttacagttctgggatcatttctcccagaaaagccctgtggagttgagcagtgggaagcatccatcctagggttctgatggtcttttggcaccccagccctagctggattctgctgtcaggctacctgtcacccagggctgggtcctggccactgaatgagggctacgagtgggggtggtgattgagacctgactgagccccttcaggtgagagaagtaaattgggggtggaagcggccttattgggagatgcttgtgagagaggctgctcatacaggggaggggctcacagcattcacgatgtaccaggctcctcacctgttaaaggcaagcgtgttttctgcaacctggttgttgatggaaagggaggcaaaggccaaagaaccataactaatggctgggcttcaggagaaagtggtcattgtctctgcagactgcagagagggagacgggagggaaggtgtgttcgctcttcctgccaagggccctagagacagagaagagggatgtctttgtcataagcgatcacaggggactcctgaggactggggagggctctctgtaacttgggaggttccccagtaggtaaattgatggatttttctcccccacagtgcgaaaacaggagatcattaagattacagaacagctgattgaagccatcaacaatggggactttgaggcctacacgaagatttgtgatccaggcctcacttcctttgagcctgaggcccttggtaacctcgtggaggggatggatttccataagttttactttgagaatcgtgagtgggttcgtgctgctgatatactcctgcctgcccctttacccctttgtctctgtctcctgctcaccttctcatcccagttgcccacttttcccttatttgaccttcgtgctgcactcctactctgtatgcttgtccccttgtgccccgatggttgtagacaggcacctttgaaggccctgctcctgagctccaagtgccattcattctgcagctgctttgtggcagtgccagtcaccacaatcaagctcacttatttcttgccgggcgcggtggcttacgcctgtaatcccaacactttgggaggctgaggctggcggatcacgaggtcaggagatcgaggccatcctggctaacaaggtgaaaccccgtctctactaaaaatacaaaaaattagccgggcgcggtggcgggcgcctgtagtcccagctactcgggaggctgaggcaggagaatgacgtgaaccggggaggcagagcttgcagtgagccgagattgcgccactgcagtccgcagtccggcctgggcgacagagcgagactccgtctc

SEQ ID NO: 334 - DNA, 1591 bp, Homo sapiens
agcatttccggcagccatccccgcggtgctgacatcccggttgttcttctgtgccgggggtcttcctgctgtcatgaaggacgtaccgggcttcctacagcagagccagaactccgggcccgggcagcccgctgtgtggcaccgtctggaggagctctacacgaagaactttatgaaaactttatcagtgaatttgaacacaggtaaaagcctctcatccgtttttcactttgaaaatgagtgcattgatgctcggcggtgctcaaaggctggtggcttttatttcagggtgaaccctttgtccctcgtggaaatcattcttcatgtagttagacagatgactgatcctaatgtggctcttacttttctggaaaagactcgtgagaaggtgaaaagtagtgatgaggcagtgatcctgtgtaaaacagcaattggagctctaaaattaaacatcggggacctacaggttacaaaggaaacaattgaagatgttgaagaaatgctcaacaaccttcctggtgtgacatcggttcacagtcgtttctatgatctctccagtaaatactatcaaacaatcggaaaccacgcgtcctactacaaagatgctctgcggtttttgggctgtgttgacatcaaggatctaccagtgtctgagcagcaggagagagccttcacgctggggctagcaggacttctcggcgagggagtttttaactttggagaactcctcatgcaccctgtgctggagtccctgaggaatactgaccggcagtggctgattgacaccctctatgccttcaacagtggcaacgtagagcggttccagactctgaagactgcctggggccagcagcctgatttagcagctaatgaagcccagctcctgaggaaaattcagttgttgtgcctcatggagatgactttcacacgacctgccaatcacagacaactcacttttgaagaaattgccaaaagtgctaaaatcacagtgaatgaggtggagcttctggtgatgaaggccctttcggtggggctggtgaaaggcagtatagacgaggtggacaaacgagtccacatgacctgggtgcagccccgagtgttggatttgcaacagatcaagggaatgaaggaccgcctggagttctggtgcacggatgtgaagagcatggagatgctggtggagcaccaggcccatgacatcctcacctagggccccctggttccccgtcgtgtctcctttgactcacctgagagaggcgtttgcagccaatgaagctggctgctcagacggtcgacattgaatttgggtgggggttgggatcctgtctgaagtacagactgttcttgctctaaaaacaggactgtccctgatgggagccaggccacagggaggaggcttctttgtgggtctctcctgcagagggtgggggtctcagggtcttaggtgatacgggagagaaagaacgtgccaggcaggaggccccctgaagtctgtgtactccgaggtggatctccatccccatccacctgtacggacatcttttccgttgcggtttgagaatgttcctataataaacccctctgctttgtt

SEQ ID NO: 335 - DNA, 2007 bp, Homo sapiens
attgaatgtgatttaattggcaccatgccagattctttgcatggactgtcttatgtaatcttcacagcagaaaatatgcattattactctcacttttcagatgaggaaactgaggctgggcaagaggaagtcatttgccaaaagtatcgcaggtagtaaatggtcagtgcagacatccaatgtggctttgtgcgtctgattcagtgtctgtgctcataaccactttcttatccctgagctctgggccaagtcttaggaattagatatgtgattgagggaaactatatttatagggggtctactctgtgttctgtgcctgatatcaacacatattatctcactctgcaaggccagtgtcactgtcccccactaacagggaagaaaactagagatcagtgggcctgacataggagcttcctcttccgtcttctgctgcaaatgttccttgagtccctagaaatagagattctgattccaagggtctagcatggttctgatgggcatccagggtcaggagtcacaaccgtagataaagtactttctctctgcaggtactaccccagtggagatgcctttgcttcagggtcagatgacgctacgtgtcgcctctatgacctgcgggcagatagggaggttgccatctattccaaagaaagcatcatatttggagcatccagcgtggacttctccctcagtggtcgcctgctgtttgctggatacaatgattacactatcaacgtctgggatgttctcaaagggtcccgggtctccatcctgtttggacatgaaaaccgcgttagcactctacgagtttcccccgatgggactgctttctgctctggatcatgggatcataccctcagagtctgggcctaatcatcttctgacagtgcactcatgtatacctgagaatttgaaatcttcacatgtaaatagatattacttctagaggagcttagagtttattgcagtgtagcttaggggagcaacccatggctcacaggtcactaagcgtctccaatatgactattaaaactgtcacctctggaaatacactagtgtgagccttcagcactgcgagaataccttcaagtacagtatttttcttttggaacactttttaaaatgtatctgtttttaaggttattctaaattatagtagcctcaactcattctgtcaccagtagaattcagcagttaatatattccatattatttctttgaatcaattcattttcagagcactttaaagtctgatatttctcgatgtgcactgtgatgcctggaaccttcctctggaagtgctgattttatggactgaggactggtgactggtctgtgatagaagcaaattccaattccaaatgtaattagacaaaaatcatttttttagaatgtgtttttattgtaaaagtatctttttcagcttcctgttctattgtcttttttcagatacaacatttttgtctatggtgaactgctgtaaatgacgcagagaaatgcctaaaaaggacaggtggtttgactcatggatgatgatgatgtcactgtgccacttggacagggcgttttctctgaattgaagggaaagccaatggtgtttgtaaacaaatgcttctgagagcaaagaaaagtcttctgtgtgggaacacaagatagtaaacttatttaaaaacctattagtagaattagtggaaacacttaggttaaagtgaatcttgtccatataaattatattcatggccgggcgcggtggctcacgcttgtaatcccagcactttgggaggccgaggcgggcggatcacgaggtcaggagttcgagaccacggtgaaaccctgtctctactaaaaaatacaaaaaattagccgggcgtggtggcgggcgcctgtagtcccagctactcggagaggctgaggcaggagaatggcgtgaacccgggaggtggagcttgcagtgagccgaggtcgagccactgcagcctgggtgacaaagcgagactccgtctc

SEQ ID NO: 336 - DNA, 3105 bp, Homo sapiens
tggaaaaattctaagttgctacaagctgcagcaagtgtgtgtcagtgggaggtgagaaaggcaaacagagggctgaaaactgagccaggaacctgcctagtggataatcaaaactcgactataaataactaatggaacgacgaacgtgtttagtgaagttattttctaaagcagcgtacaggcaaaatgagtgctttcctggagcaaatcctcaagctgttccagaaggatattgccaaatatcagatcataaaggacaggaattctgaagaggataaaatcgtagacagaccattaccaaaggagttggacttggagggagtgctgctggcagatggcccttacttgcaactctcttctggaatctcttttttatgcatgcagctgtctatcccaagctcataccagcttcctggggcaaccaatgagtggtctacacagaagtatactctgtcatttcactccaattcagaagaactctgaagggccatcccaacttcagagcttcccaggaggcgaacagtcagcttcaacaagcagcaggtttgatcaaccattcttctcagagcaagaaacctaccatactggtgtctgcagcagcaccctcaggacagcctgcccacagccagcgtcatcctctgtttccatgatgaggcctggtccactctcctgcggactgtacacagcatcctcgacacagtgcccagggccttcctgaaggagatcatcctcgtggacgacctcagccagcaaggacaactcaagtctgctctcagcgaatatgtggccaggctggagggggtgaagttactcaggagcaacaagaggctgggtgccatcagggcccggatgctgggggccaccagagccaccggggatgtgctcgtcttcatggatgcccactgcgagtgccacccaggctggctggagcccctcctcagcagaatagctggtgacaggagccgagtggtatctccggtgatagatgtgattgactggaagactttccagtattacccctcaaaggacctgcagcgtggggtgttggactggaagctggatttccactgggaacctttgccagagcatgtgaggaaggccctccagtcccccataagccccatcaggagccctgtggtgcccggagaggtggtggccatggacagacattacttccaaaacactggagcgtatgactctcttatgtcgctgcgaggtggtgaaaacctcgaactgtctttcaaggcctggctctgtggtggctctgttgaaatccttccctgctctcgggtaggacacatctaccaaaatcaggattcccattcccccctcgaccaggaggccaccctgaggaacagggttcgcattgctgagacctggctggggtcattcaaagaaaccttctacaagcatagcccagaggccttctccttgagcaaggctgagaagccagactgcatggaacgcttgcagctgcaaaggagactgggttgtcggacattccactggtttctggctaatgtctaccctgagctgtacccatctgaacccaggcccagtttctctggaaagctccacaacactggacttgggctctgtgcagactgccaggcagaaggggacatcctgggctgtcccatggtgttggctccttgcagtgacagccggcagcaacagtacctgcagcacaccagcaggaaggagattcactttggcagcccacagcacctgtgctttgctgtcaggcaggagcaggtgattcttcagaactgcacggaggaaggcctggccatccaccagcagcactgggacttccaggagaatgggatgattgtccacattctttctgggaaatgcatggaagctgtggtgcaagaaaacaataaagatttgtacctgcgtccgtgtgatggaaaagcccgccagcagtggcgttttgaccagatcaatgctgtggatgaacgatgaatgtcaatgtcagaaggaaaagagaattttggccatcaaaatccagctccaagtgaacttaaagagcttatatatttcatgaagctgatccttttgtgtgtgtgctcctggtgttaggagagaaaaaagctctatgaaagaatataggaagtttctccttttcacaccttatttcattgactgctggctgctttaaaaaaaaaaaaggatccattgtaccgttgtcttcatcactgggaaatgattattacatagtccagaagattctttgtttttctccactgagcacttaacaattgctttctctctggcctggacattctctggcagcacctccagggtacataaattcaatggatcaatttatttgtcttcaaatggccttaacttggattgtctgtttggccaaccatgaaaattaaagagtgaagcagatgtaatggcctgacattccaaaaactctgaattgggtttattagcacaaatgttgtgttcatttgttgagccatatctcagaagaaggaaagggagctacagaaaggaggtttaggattgcagagaagatgcaagagcactttggcccaattctccagctcaacccagcagctgaaaagcttcaagagatctaggaaaagacattttcatgttaatgagaatttccaccattgtagagaatttccttcctactgagaatctacctctattccccctgccctagctcttctctaacttggttaaccataaccataaccagattcccttgcaatcgatttctctttagtcgttggtgttagaagtaccagcacaatttgagcattcccattaacaaaggtgttcacagttgagaaactctcctgccgggcgcggtggctcatgcctgtaattccagcactttgggaggcagagttgggaggatcacctgatgtcaggggtttgagaccagcctggtcaacattgcaaaaccttgtctctactaaaaatacaaaaattagctgggcatggtggcgcatacctgtaatcccagctacttgggaggctgaggcaagagaatcgcttgaacccaggaggcagaggttgcagtgagctgagatcatgccattgcactccaacctgggtgacagagtgagactccatctc

SEQ ID NO: 337 - DNA, 3026 bp, Homo sapiens
actcgcgcgttaggaggctcgggtcgttgtggtgcgctgtcttcccgcttgcgtcagggacctgcccgactcagtggccgccatggcatcagatgaaggcaaactttttgttggagggctgagttttgacaccaatgagcagtcgctggagcaggtcttctcaaagtacggacagatctctgaagtctgtagatggacggcagatccgagtagaccaggcaggcaagtcgtcagacaaccgatcccgtgggtaccgtggtggctctgccgggggccggggcttcttccgtgggggccgaggacggggccgtgggttctctagaggaggaggggaccgaggctatggggggaaccggttcgagtccaggagtgggggctacggaggctccagagactactatagcagccggagtcagagtggtggctacagtgaccggagctcgggcgggtcctacagagacagttatgacagttacggtaagtcacactccgagggcgccacgctgctgtggcctgcggtgggagctcggttcaccttggtgccctctccaagcactttaggctggacactcagaccttgtcactgtgcttgcccagaagaggcgcatctgtcctctcagagccatttctatcgcaggacgcaaaagccaaatgagactgaccaaaaaggcaagggagagcgagggcccgctgggcagtcagctaggtgcatgtgtggccgcaggccagcctccctcggctgtggggggtggttgctccccggccgcaggccgcgccctggtctggcctctggggtgaagctgcctcttgttgcttcggtgcctttacactgtgcctgcttcttgtcctcagctacacacaacgagtaaaaacccttcctgctcaagatcgtccttccaatggctgtgtgtttaaagattgtgggagcttcgctgaacgttaatgtgtagtaaatgcacctccttgtattcccactttcgtagtcatttcggttctgatcttgtcaaacccagcctgaccgcttctgacgccgggatggcctcgttactagacttttctttttaaggaagtgctgtttttttttgagggttttcaaaacattttgaaaagcatttacttttttgaccacgagccatgagttttcaaaaaaatcgggggttgtgtgggtttttggtttttgttttagtttttggttgcgttgcctttttttttttagtggggttggccccatgaagtgggtgccccactcacttctctgagatcgaacggactgtgaatccgctctttgtcggaagctgagcaagctgtggcttttttccaactccgtgtgacgtttctgagtgtagtgtggtaggaccccggcgggtgtggcagcaactgccctggagccccagcccctgcgtccatctgtgctgtgcgccccacagtagacgtgcagacgtccctgagaggttcttgaagatgtttatttatattgtccttttttactggaagacgtacgcatactccatcgatgttgtatttgcagtggctgaggaattcttgtacgcagttttctttggctttacgaagccgattaaaagaccgtgtgaaatgaaccttgctctgacaattcccttgcattgcaccacacactccttgctgcgggctcctgcagccagacctgagcagagagagaaggtggagaagcagcgggtctgcaagccttccctggggcctgcagagctagaaagggaggcccagcagactggcgctggtcagggtaggggagccaggcgggggacgggagcgggcagctcaggcctcagggcagccctgggaggcttctggcagtggtggccagagggctggactgtgcgggcagcttagcagggacagtggacgtgcacctgacgctgacctggactgcctcagtctagaagcaggccagagagcagaggcacgtggcatcccagggcgacctcagacggccagccggttagctagttctgctgttgcttcacgagttctgagcattctctgctagcctatggaagctgcagccctcggaggacagaagtgttgtgcgcccaacagaaccctctgagacgcaagctgctcccttggctagctcatatgtggaaatagccctgtaattcgaggtaactccttccgctcgtgtccacatccctcttgttgagagctcactgaaagtcatgtgcccggggaatgttcctgtgactgttttttgtttttccttttttttttaactttgtttttgttttttttcaattaagctggaactaaagtcaggcccagccattacgctccccacgtgcagccaggtgcagcctgggcccagtcatgcctggctcatagatgaaatcccttaagcaggattgaagaccagtgaacgcccccgccttttggattttttgctcaattgaccgtcttttccagacctctttaagtcacactcttaacttagctttctctgatgtctgttgccgccattagtttttttctagagcccacactggcccacatagctccatcccatacgggtagctggctccagctgcgccaaggtgcagacccgccctgggcatgctggcctgtgacggagcctgaggtcacagccccctgactagcctgagaccttcctaggggctgtggctgtttccggggaggccgggaggggcagctgtgagccctgtggaggacgttgggagtaacgctgctttgctttggcaggttgaaggggcccggccaggactcggggaagggtggcctgagagcagcgatgacctctggggtcactgtcccaggagggacttcacctggaacaagagctggaggcagccgcttgcccaggaggcttgtcccctgaggcgcttcgccagtgaggtgcgggctcagggcctcgagtctctcctggagcacgggctgcggtgcgccggcagcttacggggcggccagtccttgcccacaacgatgtggagccctgtgaaagtcggattcgaataaagggccacgtgtgcacccag

SEQ ID NO: 338 - DNA, 2880 bp, Homo sapiens
cctagtcgcggggagtctgagaaagcgcgcctgtttcgcgaccatcacgcacctcccctccgcttgtggccatgtaccgctacctgggcccggggacagcccgccgccgccccgcagccggggctggcattggccgcccggcgccactacagcgaggcggtggccgaccgcgaggacgaccccaacttcttcaagatggtggagggcttcttcgatcgcggcgccagcatcgtggaggacaagctggtggaggacctgaggacccgggagagcgaggagcagaagcggaaccgggtgcgcggcatcctgcggatcatcaagccctgcaaccatgtgctgagtctctccttccccagcacagccagcaccgcacgccctgcaagggaggtatccgttacagcactgatgtgagtgtagatgaagtaaaagctttggcttctctgatgacatacaagtgtgcagtggttgatgtgccgtttgggggtgctaaagctggtgttaagatcaatcccaagaactatactgataatgaattggaaaagatcacaaggaggttcaccatggagctagcaaaaaagggctttattggtcctggcattgatgtgcctgctccagacatgagcacaggtgagcgggagatgtcctggatcgctgatacctatgccagcaccatagggcactatgatattaatgcacacgcctgtgttactggtaaacccatcagccaagggggaatccatggacgcatctctgctactggccgtggtgtcttccatgggattgaaaatttcatcaatgaagcttcttacatgagcattttaggaatgacaccagggtttggagataaaacatttgttgttcagggatttggtaatgtgggcctacactctatgagatatttacatcgttttggtgctaaatgtattgctgttggtgagtctgatgggagtatatggaatccagatggtattgacccaaaggaactggaagacttcaaattgcaacatgggtccattctgggcttccccaaggcaaagccctatgaaggaagcatcttggaggccgactgtgacatactgatcccagctgccagtgagaagcagttgaccaaatccaacgcacccagagtcaaagccaagatcattgctgaaggtgccaatgggccaacaactccagaagctgacaagatcttcctggagagaaacattatggttattccagatctctacttgaatgctggaggagtgacagtatcttactttgagtggctgaagaatctaaatcatgtcagctatggccgtttgaccttcaaatatgaaagggattctaactaccacttgctcatgtctgttcaagagagtttagaaagaaaatttggaaagcatggtggaactattcccattgtacccacggcagagttccaagacaggatatcgggtgcatctgagaaagacatcgtgcactctggcttggcatacacagtggagcgttctgccaggcaaattatgcgcacagccatgaagtataacctgggattggacctgagaacagctgcctatgttaatgccattgagaaagtcttcaaagtgtacaatgaagctggtgtgaccttcacatagatggatcatggctgacttcctcactatcctcttcacatgtaacttctgcagacctatcacaagtttacatgtaaccacagaaatccctttctctcctgactcattaataatggataccattctcaacaagtcaatccaagtcagcccgttaaggagaaagaaattaaggttagcggatcatgtacaagctgagtgtgaaagtagaaatcacctacaccagagagccattttggtattttgcctttaaataaaaagcctcctttatctggctgtgcagccttgctctgtggcttttcccaacacaatcagtgctagtgctggggaggaacagtcaagagcagtcagttgcttgcttattttttctggatgagtctgggacacactgtaactttaacacatttaagaagtaggtgtgtggccttttcagaaggtggcatggtcctcaagtgagttcttagtattttatatcagcaaaataattcaattttgcaggttgcaaacaaatataaaacctgtttctgtttatgaatattattcttttagaatagaataagtacatgctgctgtaataaaattgcctttaatcacttaacaagcctaaccttgactcaaacagtgaatgcctatagaaataataaatgaaaagaactagtatttttatatcataaaacaatgtcatttatagcttatcattcatgtattgtccagcagacattaaaagccctgtggataattaagttatcttcatacctgcaaaatggtggaggctattttcattaaaactgtcagaatttgcttactataattatgatacagtccaaagaatgcagtcactttttatcatgttaactaattgttctcttttgaagatctatggttgactaattaaacaataattcaagtagagtgtcccagaaaaaaaccacttgggctccctgtttggagtctggctggctctgagcattgccaatggcccctactcacctgactttgtatcctctccttttagaggctttgcattctgcacccagcttcactaacagtgggctgaaaacatccttgggttgagtgtttcatttgggagttatttggccagggccttttgaacagtagtgtccccatgaagtgctagataatatatgtgtaagagtcagctttttttttttttttaactctaacacccttcagaaatttctaactactttgtaactgcatggcttaacctggtgataaaagcagttattaaaagtctacgttttcc

SEQ ID NO: 339 - DNA, 2178 bp, Homo sapiens
attttgctttgggttccgtcttctcactgcggaccctggattgaaacgatctccccgcggccgccgccgctacctggtgcccgcaggtgcctgcaggagtcctggggccagctggcctcgatgtacgtcagcacgcgggaacggtacaagtggctgcgcttcagcgaggactgtctgtacctgaacgtgtacgcgccggcgcgcgcgcccggggatccccagctgccagtgatggtctggttcccgggaggcgccttcatcgtgggcgctgcttcttcgtacgagggctctgacttggccgcccgcgagaaagtggtgctggtgtttctgcagcacaggctcggcatcttcggcttcctgaggtggcggggccggtaccctttgggaccgcagctgtggccagagcggcggggactggcacggacgacagccacgcgcgcgggaactgggggctgctggaccagatggcggctctgcgctgggtgcaggagaacatcgcagccttcgggggagacccaggaaatgtgaccctgttcggccagtcggcgggggccatgagcatctcaggactgatgatgtcacccctagcctcgggtctcttccatcgggccatttcccagagtggcaccgcgttattcagacctttcatcactagtaacccactgaaagtggccaagaaggttgcccacctggctggatgcaaccacaacagcacacagatcctggtaaactgcctgagggcactatcagggaccaaggtgatgcgtgtgtccaacaagatgagattcctccaactgaacttccagagagacccggaagagattatctggtccatgagccctgtggtggatggtgtggtgatcccagatgaccctttggtgctcctgacccaggggaaggtttcatctgtgccctaccttctaggtgtcaacaacctggaattcaattggctcttgccttatatcatgaagttcccgctaaaccggcaggcgatgagaaaggaaaccatcactaagatgctctggagtacccgcaccctgttgaatatcaccaaggagcaggtaccacttgtggtggaggagtacctggacaatgtcaatgagcatgactggaagatgctacgaaaccgtatgatggacatagttcaagatgccactttcgtgtatgccacactgcagactgctcactaccaccgagatgccggcctccctgtctacctgtatgaatttgagcaccacgctcgtggaataatcgtcaaaccccgcactgatggggcagaccatggggatgagatgtacttcctctttgggggccccttcgccacaggcctttccatgggtaaggagaaggcacttagcctccagatgatgaaatactgggccaactttgcccgcacaggaaaccccaatgatgggaatctgccctgctggccacgctacaacaaggatgaaaagtacctgcagctggattttaccacaagagtgggcatgaagctcaaggagaagaagatggctttttggatgagtctgtaccagtctcaaagacctgagaagcagaggcaattctaagggtggctatgcaggaaggagccaaagaggggtttgcccccaccatccaggccctggggagactagccatggacatacctggggacaagagttctacccaccccagtttagaactgcaggagctccctgctgcctccaggccaaagctagagcttttgcctgttgtgtgggacctgcactgccctttccagcctgacatcccatgatgcccctctacttcactgttgacatccagttaggccaggccctgtcaacaccacactgtgctcagctctccggcctcaggacaacctctttttttcccttcttcaaatcctcccacccttcaatgtctccttgtgactccttcttatgggaggtcgacccagactgccactgcccctgtcactgcacccagcttggcatttaccatccatcctgctcaaccttgtgcctgtctgttcacattggcctggaggcctagggcaggttgtgacatggagcaaacttttggtagtttgggatcttctctcccacccacacttatctcccccagggccactccaaagtctatacacaggggtggtctcttcaataaagaagtgttgattagacctgaatttctccacct

SEQ ID NO: 340 - DNA, 2775 bp, Homo sapiens
actgcgagctgcggcgccgcacagcttcgtggcgctctgggcacccctgttcctgctgcgctccgccctggccgacttcagcctggacaacgaggtgcactcgagcttcatccaccggcgcctccgcagccaggagcggcgggagatgcagcgcgagatcctctccattttgggcttgccccaccgcccgcgcccgcacctccagggcaagcacaactcggcacccatgttcatgctggacctgtacaacgccatggcggtggaggagggcggcgggcccggcggccagggcttctcctacccctactggatcatcgcgcctgaaggctgcgccgcctactactgtgagggggagtgtgccttccctctgaactcctacatgaacgccaccaaccacgccatcgtgcagacgctggtccacttcatcaacccggaaacggtgcccaagccctgctgtgcgcccacgcagctcaatgccatctccgtcctctacttcgatgacagctccaacgtcatcctgaagaaatacagaaacatggtggtccgggcctgtggctgccactagctcctccgagaattcagaccctttggggccaagtttttctggatcctccattgctcgccttggccaggaaccagcagaccaactgccttttgtgagaccttcccctccctatccccaactttaaaggtgtgagagtattaggaaacatgagcagcatatggcttttgatcagtttttcagtggcagcatccaatgaacaagatcctacaagctgtgcaggcaaaacctagcaggaaaaaaaaacaacgcataaagaaaaatggccgggccaggtcattggctgggaagtctcagccatgcacggactcgtttccagaggtaattatgagcgcccaccagccaggccacccagccgtgggaggaagggggcgtggcaaggggtgggcacattggtgtctgtgcgaaaggaaaattgacccggaagttcctgtaataaatgtcacaataaaacgaatgaatgaaaatggttaggacgttacagatatattttcctaaacaatttatccccatttctcggtttatcctgatgcgtaaacagaagctgtgtcaagtggagggcggggaggtccctctccattccctacagttttcatcctgaggcttgcagaggcccagtgtttaccgaggtttgcccaaatccaagatctagtgggaggggaaagggcaaatgtctgctccgaggagggcggtgtgttgatctttggaggaaaaatatgttctgttgttcagctggatttgccgtggcagaaatgaaactaggtgtgtgaaatacccgcagacatttgggattggcttttcacctcgccccagtggtagtaaatccatgtgaaattgcagaggggacaaggacagcaagtaggatggaacttgcaactcaaccctgttgttaagaagcaccaatgggccgggcacagtagctcccacctgtaatcccagcacttcgggaggctgaggtgggcggatcatttgaggtcaggagttcgagaccagcctggccaacatggtgaaaccccatctctactaaaaatacaaaaattagccgggcatggtggcacgcacctgtaatcccagctactctggaggctgaggcaggagaattgcttgaacccgggaggtggaggttgcagtgagccaagatcgtcccactgcactccagcttgggtgacaaaacaagactccatctcaaaagaaaaaaaaaacagcaccaatgaagcctagttctccacgggagtggggtgagcaggagcactgcacatcgccccagtggaccctctggtctttgtctgcagtggcattccaaggctgggccctggcaagggcacccgtggctgtctcttcatttgcagaccctgatcagaagtctctgcaaacaaatttgctccttgaattaagggggagatggcataataggaggtctgatgggtgcaggatgtgctggacttacattgcaaatagaagccttgttgagggtgacatcctaaccaagtgtcccgatttggaggtggcatttctgacatggctcttggtgtaagcctgccttgccttggctggtgagtcccataaatagtatgcactcagcctccggccacaaacacaaggcctcggggagggctagactgtctgcaaaggttttctgcatctgtaaagaaaacaaggtgatcgaaaactgtggccatgtggaacccggtcttgtgggggactgtgtctccatcttgactcagacagttcctggaaacaccggggctctgtttttattttctttgatgtttttcttctttagtagcttgggctgcagcctccactctctagtcactggggaggagtattttttgttatgtttggtttcatttgctggcagagctggggctttttgtgtgatccctcttggtgtgagttttctgacccaaccagcctctggttagcatcatttgtacatttaaacctgtaaatagttgttacaaagcaaagagattatttatttccatccaaagctcttttgaacaccccccccctttaatccctcgttcaggacgatgagcttgctttccttcaacctgtttgttttcttatttaagactatttattaatggttggaccaatgtactcacggctgttgcgtcgagcagtccttagtgaaaattctgtataaatagacaaaatgaaaagggtttgaccttgcaataaaaggagacgtttggttctggctcttt

SEQ ID NO: 341 - DNA, 1907 bp, Homo sapiens
aaaaaaagtaccgctccagagcaggagcctaggcagccgagagggtgcccgaacctgagtctgagttgcggccacttcaggagctgagaggagcaggatggaactgcaggatccaaagatgaatggagccctcccttcggatgctgtgggctacaggcaagaacgtgagggcttcctgcccagtcgtggtcctgctcctgggagcaagccggtccagttcatggatttcgaggggaagacatcgtttggaatgtcagtgttcaacctcagcaacgccatcatgggcagcggcatcctggggctggcctatgccatggcccacacgggggtcatcttcttcctggccctgctgctgtgcattgcgcttctgtcgtcctactccatccacctcctgctgacctgtgctggtattgcaggcatccgagcctatgagcagctgggacagagggcattcgggcctgcggggaaggtagtggtggccacagtcatctgtctgcacaatgttggggccatgtccagttacctgttcatcatcaaatctgagctccccctggttatcggcaccttcctgtacatggaccccgagggggactggttcttgaagggaaacctcctcatcatcatcgtcagtgtgttaatcatcctgcccctcgccctcatgaaacacttgggctacctggggtacaccagtggtctctctctgacctgcatgctgtttttccttgtttcggtcatctacaagaagttccaacttggctgtgctataggccacaatgaaacagcaatggagagtgaagctctcgtgggactccccagccaaggactcaacagcagctgtgaggcccagatgttcacagttgactcacagatgtcctacacagtgcccattatggcttttgcttttgtctgccaccctgaggtgctgcccatctatacggagctctgccggccctccaagcgcaggatgcaggccgtggccaacgtgtccattggggccatgttctgcatgtatgggctcacagcaacctttggatacctcaccttctacagcagtgtgaaggcggagatgctgcacatgtacagccagaaggacccgctcatcctctgtgtgcgcctggccgtgctgctcgcggtgaccctcactgtgccagtcgtgctgttccctatccgccgggccctgcagcagctgcttttcccaggcaaggccttcagctggccacgacatgtggccatagctctgatcctgcttgttttggtcaatgtccttgtcatctgtgtgccaaccatccgggatatctttggagttatcgggtccacctcagcccccagcctcatcttcatcctccccagcatcttctacctccgcattgtaccctctgaggtggagcctttcttatcctggcccaagatccaggccctgtgctttggagtcctgggagtcctcttcatggccgtcagtctaggctttatgtttgccaactgggccacaggccagagccgcatgtctggacactgatcaagccctgctggcccaggtccctgtgcgcatgcacatggaggggtcagggccgctccctagggtccctcctgcccaacatgtggaggtggctggttcccatgaacgtggttgtcagaggcgggggacagcagaggctgcagactggcccacttccctcctccccagggatgccaagcttggatcatggccctaatcccaaccccaaccccatgggaggaggaggaggaggaagaagaggaggaggaggaggaggaggaggaggaggaggaggaggccaggtcctggtggagcctttgcccagcccagtcctctctgcctcctcctggctgaagctgtttgtcaggattaccctcgggctaaagaggaaaaataaagatgttgagctacc

SEQ ID NO: 342 - DNA, 2560 bp, Homo sapiens
aagatttcttcgtgtcctggccaactttctcatcatctgctgtttgtgtggaagtgggtacctcatttactttgtggttaagcgatctcagcaattctccaaaatgcagaatgtcagctggtatgaaaggaatgaggtagagatcgtgatgtccctgcttggaatgttttgtccccctctgtttgaaaccatcgctgccctggagaattaccacccacgcactggactgaagtggcagctgggacgcatctttgcactcttcctggggaacctctacacatttctcttggccctgatggatgatgtccacctcaagcttgctaatgaagagacaataaagaacatcactcactggactctgtttaactattacaactcttctggttggaacgagagtgtcccccgaccacccctgcaccctgcagatgtgccccggggttcttgctgggagacagctgtgggcattgaattcatgaggctgacggtgtccgacatgctggtaacgtacatcaccatcctgctgggggacttcctacgggcttgttttgtgcggttcatgaactactgctggtgctgggacttggaggctggatttgtaggtcaccacttcatggacattccgcacaaaggaatttcaactatcttctttgatacttatagccagatgcattcttgggcatttcatttctttggaagcttaatgacggtctctgctctgtagagtagtaaagtgtttaatttgtatttcctttaagggtcctatttgccttcataagggaaactgctttttcccagtgtaatgaacaatgtgaccttttattctaggaaatggaggcatttggcctaggggaaagtggaccacacactccagtactgagccgatggttgatagggaattgcatctgagcagcctcaactctcattatgggggctgaaatctgacagtggaggcgaatatttcaggaagtcctggaacacaccaagaacacaataaccattggtcctgtcttctggatgatgctttgagaaacctcctttgacttgtattcccttatagccctcttccccacctacctggtaaatgtgtgtcatttcctctctgtagtgtccttctatgctctggcagaacctctggctcaggcacctgtgctgtacatgtctcttccacaacacctcactggcccagcctgcagtcactggtgtgcatgtaaggtacctacctcttacctgagctcctggtgaaaggctccgtaggatgttgacctatgtatccctcatcctggcctggcccagccttcatatgctgagtttgatattagtggaaatgtgctgggtttgatcttcaaccaaggaatgatctggatgggctccttctatgctccaggcctggtgggcattaatgtgctgcgcctgctgacctccatgtacttccagtgctgggcggtgatgagcagcaacgtaccccatgaacgcgtgttcaaagcctcccgatccaacaacttctacatgggcctcctgctgctggtgctcttcctcagcctcctgccggtggcctacaccatcatgtccctcccaccctcctttgactgcgggccgttcaggtgcagagtctcagttgcccaggagcacctcccctcccgaggcagtctgctcagagggccttggcccagaattccagttctggtttcatgccagcctgtaaaaggccatggaactttgggtgaatcaccgatgccatttaagagggttttctgccaggatggaaatgttaggtcgttctgtgtctgcgctgttcatttcagtagccaccagccacctgtggccgttgagtgcttgaaatgaggaactgagaaaattaatttctcatgtatttttctcatttatttattaatttttaactgatagttgtacatatttgggggtacatgtgatatttggatacatgtatacaatatataatgatcaaatcagggtaactgggatatccatcacatcaaacatttattttttattctttttagacagagtctcactctgtcacccaggctggagtgcagtggtgccatctcagcttactgcaacctctgcctgccaggttcaagcgattctcatgcctccacctcccaagtagctgggactacaggcatgcaccacaatgcccaactaatttttgtatttttagtagagacggggttttgccatgttgcccaggctggccttgaactcctggcctcaaacaatccacttgcctcggcctcccaaagtgttatgattacaggcgtgagccaccgtgcctggcctaaacatttatcttttctttgtgttgggaactttgaaattatacaatgaattattgttaactgtcatctccctgctgtgctatggaacactgggacttcttccctctatctaactgtatatttgtaccagttaaccaaccgtacttcatccccactcctctctatccttcccaacctctgatcacctcattctactctctacctccatgagatccacttttttagctcccacatgtgagtaagaaaatgcaatatttgtc

SEQ ID NO: 343 - DNA, 2224 bp, Homo sapiens
cagatccagtccctgaagctgaaggaaatatatgaccaggtaatggtgtgtacttaacaagcatctaggtaaatacatgtgcataaggcacagaagcacagaatgggaaaagaaagggtgtggaggttcagcacattctgagggtgtatttcaagatgaaaggaaactcatatgcagatggtctcagagttctatcttgagactcactgggggaggagaaagggggaaaggaaaaaaaagtcttaaggtttgaggctaagctgctaacctgcttagttacactcccaccttggcctctcaaagtgctgggattataggcatgaaccactgtgccaacccaacatagtgttttgatatgtgtatattaacacactgtgaaaggattcacaggtaattaaccaggtaattccaggtaattaacctatccatcacctcacactttttttttttttttcttgtggtgaggacacttgtcttagtctcttcaactgctgtaacaagatgtgttagactgggtaatttataaacaacagaaatgtattgctcacagttttggaagctaggaaatccaagatcaaggcacccacaggtctggtgtctggtgagggcctgttcctcatagatggcaccatcttgtgtcctacctagtggaaagagcaaggcagctctcttcaacctgttttataagggcaccaatcccattaatgagggttccaccctcatgacagtcacttcccaaatgcctcgtgatgtgtgtgtgtgtgtctgtgtatgtgtgtgtgtgtgtatctcaggggctccaggcctcaatacaatgggtataacaacaatcccatcttgttgggaggaattaacaatcatgcatcgagccctgggcctcaggcttcaatgtattagttattagagctaatcattatttaatgttttaaacacccccaggaagtagagaacattcctgtcacattctgcagaaaaagaaattgaggcaaggggcaaagccatttgccaaggtcatagatcctgcaagccaatggcaaggcaggatctgaacctggggcttcagatcctggggctttacctgattaaataccaagagagagtgctgagatttttttggtggtggacagtccctgaggcaagccatttttagagcatctgggccacttggggaattgaatctttaccagggcttcccacctcctgttgccccttctctgaaggtgacccccctcccacagtagcaccccaaccactcagaacccccaagccaccttctttgcacatgctgaagctaatattgccctccactccaccccaacatcagggaccctggcccaagcccttccctgggagcccttcctcctctcatgaggcctccttcccagcccctcagaacagcctcctttatgagagtggccaagatcccactgaaaccttccctatcaactttataaaattaatcaggggagaagggaggggcgaaatggaaatcagcccagcttgcagcacacacagcattggtcatgaggtcagctgctctctgacccacttgctcagagttgtttgctgcctgttgctccagagtcacatagaccctgtcacaaggtcatagttccccttcactgctcatagataacaactggaacattataaaacgttaacttttccatttgagatattctttcaggtcctgcgtagcaatgaaactgaggcaggataggtacttaagggagtgaccgtgttctcaggatgcagcgaccatggcacccatacagtcaacacagtgagcctcagcattcgcattgtcattgcgctcattcaagcaaagctgtcttcattagggaatttcccccatagacagcatgagcattttgattttacctgtcctcaaactgacattttgctcattataatagtagaagacagccctacatggagatgtaatatgctaatgagacatgtgacatatgaacaagcatgtacagctactgtgcatgtgcacccagaagaccacccggaacatgcttactagcaacacctcttcccaccaccttatgaataatcatgtaagactcccataaagggagtctccctactgccagtctctgctgtctcacccttatgagcagcctgccttgaaccctctctctcacggtatacagtccattctgcatgtaacttccaaaatattctttttcctttgcaataaattactctatgctgc

SEQ ID NO: 344 - DNA, 2581 bp, Homo sapiens
agaactgcccgtggaaacctggctgggcttctggcttcagagctgggaattgtgggaggagggcccagatcccactggagataccgaaggagatactctttagtattgggatcccagaaaccagtcctatatctggccagagggacactgggttgtggcatctctctagctgctacccagaaggaacagggccccctggggcctataggccttgcccctgaccctgggaacacccagctcaggcctgccccagtggccacaagtcagggaggccgcaaatttttaactagaaacattgatcattaatagggggttagaaagagttcaaactaagtctcactctgggacatagaccaattgtgcttcaggcctcctgcagagatgctgggtccccaagtctggtcttctgtgaggcaggggctaagcaggagcttgtccaggaatgtgggggtctgggcctcaggggaggggaagaaggtggacattgcgggtatctacccccctgtgaccacccccttcactgccactgcagaggtggactatgggaaactggaggagaatctgcacaaactgggcaccttccccttccgaggcttcgtggtccacggctccaatggcgagtttcctttcctgaccagcagtgagcgcctcgaggtggtgagccgtgtgcgccaggccatgcccaagaacaggctcctgctagctggctccggatgcgagtccactcaagccacagtggagatgaccgtcagcatggcccaggtcggggctgacgcggccatggtggtgaccccttgctactatcgtggccgcatgagcagtgcggccctcattcaccactacaccaaggtgtgtgtgaggcctgagaccaagaggaggctctgcccagggagaggagataagggaagctgggaatagggtggtgcttcacatgaacggcagctataggaaacgggtggactgccaccatggatcagctgcacgacattgggaggcttacctgaccactctgtgttactgctttctcccctctaaaattggaggaatgatgtcatctgtctcatagggttgcagtgagcattaaatgagatcaggaacataaaggccttagaactgtgcgtggcatatggaaagcactccataaatatgacccactgtgattgcttacactcggggcacgtagcatgggagggaggcctgtccaggtggccctgtagtgaagcaggctgggacctgtgggtgggcaagtctctggctcttgggacctggggcggctgccctctcctgcttttctctgcgcccccctccccaggttgctgatctctctccaatccctgtggtgctgtacagtgtcccagccaacacagggctggacctgcctgtggatgcagtggtcacgctttcccagcacccgaatattgtgggcatgaaggacagcggtggtgatgtgagtggcagcagctccggggctggggtcctctcctccttttctgggtcctagcacttttgctcctgagggcagctctgagatctgtttccaaccttggcttctgtgtggattctctctgtcgtgcgggctctctgggactttcttgagggcatctctttgagcactgggctttcattccaccacacttacccggccctcatccaggatgaggctctgggcacagctctcacaccacatttgctgttgcaggtgaccaggattgggctgattgttcacaagaccaggaagcaggattttcaggtgttggctggatcggctggctttctgatggccagctatgccttgggtaggccgcccactgctctcaaattgtcatgggtgaccaagagatacccaggtacctgggtcttccgggagagatcgtgagggctggggctgggtctgcagatggtagtttgccagcctgcccactctgaaaactcagaaacctggccacgccgcttacctgtctgaattcgggatgctgtgagtaaccttgttggctgaaggaggatggccgtgtacaatccctggcctgtagtagggatgcctgcagtttgttctgagtcctgagctccatgattagatgacaaacttagctgctctaatcccaccttgtacatcattctctgagggcagaggccctggggccctcctctgtagttcaggagtccattttcctctcccctgtcccagaccagaatgaattgtcagatctacagagttgagccagggatcttcagttgcctgatcagattctgttccaatccaggatccctaggaatgtcacttagatcaactgctcttgtctgtttggggtcagggtccttgggtttggattagatttgagccctggagggaagggagaagaagggaagctgttcccttcagctgaagccccagtgagtagagatttgagggacttttccagcactgcaggggagaatgcttgttcctattccatctggtccctccagactttggctggttgtctaggcctttgtacatctcccctgccatgtcatggcctctacggtgaaggggaagaagaagggatccatttctccctcattcctggaagtggagtagatt

SEQ ID NO: 345 - DNA, 2585 bp, Homo sapiens
agtttcttcccagtctgcacggctcgagacggccgctcatccctgctccccgtgtgtccctcggtcctctctgcagctcccagccctcaactccttaccccagtttgggcaaccagctgccccgctgtttggcccaggcctgggccatgacggatgggtgggcgcccggggccgcgagaagggcggaacgctgtgcccagccggagactacgttgggtggcggcggcagcgccgggagtctgcagtgcgcgagggagaagtgagcgcacagcgcccagcgagcaggtgcctgcggcgcggagagcgcacacgctagccagcccgcagcggccgaaagtgaccactgttcctggaggatttgcattgctggagaagtgcattctaacagtggaattcaggcggcgagagtcggtcaattcaccgtaccatgtggactccccagtgtggagcagaatctgaggactgacttgctaagaatctctgggcaccctggatagaaccttccctttggctctgagcatggtggctcacacctgagatcccagcacttcggaaggccgaggtgggagaattgcttgaggccaggagttcgagaccagcctagttcctggatgcaaaccttgagaaatcaacttggagaacgagctaagtttccgttgtccagagctcaggtgctgggacaggtggcacccagatcttccagccatatgtggagtcgctggtggagtcttatctctctctccagagtgtgtccctgcagtggaggctggcctttcatctcagcaccagggtgcccagggcccagttgatccaggaagtttgttgaatgaatgagtgattggcacattctgggcaggagactgtctggcccagaagaatgcctggtttccctcagggcagggcactcccctgtgcagacaggcgggcatggagcagaaacagccagggtggacgagcttttcagcagcatgaaggcaacagccgatttgttcacagtcgagagtgaaggaatgaatttacgagaacctgcatgaactatgtgatcatagtgttggtggtcagactgtgaggcacaggaagatggatcagagggtcaaaggggcaccatctacagctcatttccccgtcctccaaccaatgggcctgccccagacctgctcccctgtccctggggaggaggaggatattccagactcacggacctgaacctctctgggcatatgtccagtctctgtcctgcagagatgccttgggcctcccatttcaacagcatccttcccctgatgtgggaaagaatttcctaatcgccctcacctctggcttcaggtccatgcaacacaagccctgtttcgggcctcctgtgttcaggctcctgagcacggcttccctttttgaaaccagggaggctggtgttgcctgcagaagcatcttgtgagttgtgggaggggccacatggaaggccagacatgggagtgaagtgtgaagcaccagccttcctgacttccagacccaggtcagcctcccgcctctcctcctgctgaatctttctgatcctgcggtttctcctctctgaaacggggatgctgatggttccataatcaaagtcctgtgctgattcattgcaatgatgactgtttagccccagctgcaggaaaaaaaaccgaacagaacaaaactagaccgggtatggtagctcacgcctgttaagtccagcactttgggaggctgaggcaggaggatcacttgaggccaggagttcgggaccagcccgggcaacatagcaagacccctatctctacaaacaacaacaatagcagcagcaaaatcccactaaaataataaaatgctcactgtaagcagagagtacttctctgccctactgacttgctcctcctactgagcaggccacgtgacttgctccaacgaatggaatgtgtgcagatatgtatgtcacatccagccagaggctttcaatatgattgaacctggactcttgccctcttgccttgcacttggagaagaatgtgctccaggatgcttcagtagaaagtggaaatgctgtctcccgaatttgctgaacgatgatgttctgaggagacctgcacctgagaacaaaagtgactactcttttgtcctaatcttaaatcccatcaccttggctgcaactgctgagtgctggtaatgagtgttgagaggcaatccgaggatggtgattaggtattaagcctgggcaggtattaaccgagaggtgtgtggacctttcgctcagcaccacaagagcagatctctgccagcaagcttatctggccatcagccagggacagagctgcattgtggcaaagtgaaatgtgattttaatgattctgagcacatggtttctgcctccagcatgctagatttgtagactggcattttttttcccttgggtagattccagatgttgtataacttgtgcctttctaagttacagcatggtagatggggacttgtctttgttatgagcatgtacaatgtgggtcgcagttaagcactgtcaaatagcctcctaaaagatgagtttgtgtggaataaagcactgaaaaagg

SEQ ID NO: 346 - DNA, 2582 bp, Homo sapiens
tttgcagtagaagtatatctaattccattagcttaaatttttgcaagcatttctaatctcttacaatacgcggtctctgcaaggtaaggcctcaggtcccctggccctttccctctcacacctgaggtcccacccaccagggcagtaccaactggctggctcccagaggtcagtggattctcccagggggctttgcctatcaacttcctctcccaggcaccatgctttccacacatggtccccctaccaactctggccccattttcagcctttccctgccttgccatgtttggaatttctctccctggcttcacctggagtttaagagtgaattagaaacgcagctgcccatcacctgcagatggctctgcaccctgatggtgaggcagctcgttccttggtgcagcctgggaccctgcctgagccagaggatgtgttttgtttatccacagcccccaaatatctcccaggcctattgcgacgggaccccaaccccaattctgactcccctccctgcttccactatacccagaccagggttggggaggggggtgggcgcagatctgggaatcgagaagcgcaggaaaggaagtgttggaaaccagaactggcaagctcactgtcttctctgcctcctccaggatccacacacatcctcaccccacagaaactgctggacacactgaagaaactgaataaaacagatgaagaaataagcagttaaaaaaataagtcgcccctccaaaacacgcccccatcccacagcgctccgcagcttcccaccaccgcccgcctcagttcctttgcgtctgttgcctccccagccctgcacgccctggctggcactgttgccgctgcattctcgtgttcagtgatgccctcttcttgtttgaaacaaaagaaaataatgcattgtgttttttaaaaagagtatcttatacatgtatcctaaaaagagaagctcatgtgcaattggtgcacagcaggagaaatttctggactgttaggatgaatggacgccttctccccgttatttaagatttgtgaccttgtacataaccctgggtgacgtgcacattgcttgggtatggaacggtagaaatttgggtgtttttaaaaccttgtttggggttgttcctgtccttgttgagaatcatagagatgtctgtgttcttggagtatttcacactgaggactaatctgctatcttcattccagtccctacccctcagtgcctgctctcatccaaataacctgggaggtgacaatcaggatatctcaggaggtccaaggtggaacagacctctttgcctttcccagcgtctcatacccccggtagtgcagctgtgggtggaggctggggtgtctgcacgaagtcaggccagcgtcctcctccacagcctgtcactgccccctccccagcctgtgtccacagtgctgtgatcccgagggaagtcctccagtctaagtcacagtgccctgacaggtgagaagcaaactcccgctggaagcctccatctctttggaaaaacagttagtctggagcctgtggcccaggcccttctgttcccaggcatcatcccaacagctcattttccctagtccgccttcgttcaagggtcaggaatggaccagaacagatgggttctggaggcccctgaacagagggctatggctgtggagaaggttcttggcccgttggactcacacagaccctgtaccctctcggcaagcatcttcagtcagattatcctcagtttcagatacttcataataccttgtgttgtgtggggtcatacatcatcgtgtttgtaagagaagatggtcattttattctctgtataaaacttagctctaaagcagaaactaaagcagcaaatgcaggaaggctgtctcgccatcctcaagactcagcagctctcattctccagtggtgagcacaccatttgtgctgctgctgttgtcgtgaaatataataacagtggaagtcacaaaaatgtcccctgcccagccccctcgccgcccttgacctcctgcaggccatgtgtgtattacttgtctagtgatgtcctctcaaagtgctgtacgcgagctcggcgccacctccgcctccctttcagagcctgctccccgccctctctgctcgctgcattgtggtgttctcttctcaaggctttgaaatctccccttgcactgagattagtcgtcagatctctccccgtctccctcccaacttatacgacctgatttccttaggacggaaccgcaggcacctgcgccgggcgtcttactcccgctgcttgttctgtcccctccctcggaccaaacagtgctcatgcttcaggaccttgtttgtcgaagatgttggtttccctttctctgttatttatataaaaataatttatcaaaaggatattttaaaaaagctagtctgtcttgaaacttgtttaccttaaaattatcagaatctcagtgtttgaaagtactgaagcacaaacatatatcatctctgtaccattctgtactaaagcacttgagtctaataaataaagaaatcagcaccccttcccggtgtccagggg

SEQ ID NO: 347 - DNA, 2458 bp, Homo sapiens
acccttgccggcggatcggaatccccgcccacaccgtggtctttccagcaccgcagacacctgccggctcctcccgagcggagctcagggctgacaaagcgcggtcagagcggccgcttactggggctcgcccgctccttagagcactggcaatgatgtgcggatcctcgctgctgctgctgggaaactgttgagtggctgaatgaccccaggggaccctgggagagctctgaagccctcagccaccaagtggctgggctggcaagggttcattcattcattcaacaaatacgaatgtgcagcggtgctggggtcatgatggctcggtgggcagcgaggggccgggccggctggaggagcacagtgcggattctgtcgccactgggacactgtgaaccaggtgtgagtcggagctgccgcgctgcccaggccatggactgtgaggtcaacaacggttccagcctcagggatgagtgcatcacaaacctactggtgtttggcttcctccaaagctgttctgacagcagcttccgcagagagctggacgcactgggccacgagctgccagtgctggctccccagtgggagggctacgatgagctgcagactgatggcaaccgcagcagccactcccgcttgggaagaatagaggcagattctgaaagtcaagaagacatcatccggaatattgccaggcacctcgcccaggtcggggacagcatggaccgtagcatccctccgggcctggtgaacggcctggccctgcagctcaggaacaccagccggtcggaggaggaccggaacagggacctggccactgccctggagcagctgctgcaggcctaccctagagacatggagaaggagaagaccatgctggtgctggccctgctgctggccaagaaggtggccagtcacacgccgtccttgctccgtgatgtctttcacacaacagtgaattttattaaccagaacctacgcacctacgtgaggagcttagccagaaatgggatggactgaacggacagttccagaagtgtgactggctaaagctcgatgtggtcacagctgtatagctgcctccagtgtagacggagccctggcatgtcaacagcgttcctagagaagacaggctggaagatagctgtgacttctattttaaagacaatgttaaacttataacccactttaaaatatctacattaatatacttgaatgaaaatgtccatttacacgtatttgaatggccttcatatcatccacacatgaatctgcacatctgtaaatctacacacggtgcctttatttccactgtgcaggttcccacttaaaaattaaattggaaagcaggtttcaaggaagtagaaacaaaatacaatttttttggtaaaaaaaaattactgtttattaaagtacaaccatagaggatggtcttacagcaggcagtatcctgtttgaggaaagcaagaatcagagaaggaacataccccttacaaatgaaaaattccactcaaaatagggactatctatcttaatactaaggaaccaacaatcttcctgtttaaaaaaccacatggcacagagattctgaactaaagtgctgcactcaaatgatgggaagtccggccccagtacacaggggcttgactttttcaacttcgtttcctttgttggagtcaaaaagaaccacttgtggttctaaaaggtgtgaaggtgatttaagggcccaggtcagccactgtttgtttacaaaatcaggtaactaactgcatacactttttctctttccatgacatcaagactttgctaaagacatgaagccacgggtgccagaagctactgcgatgccccgggagttagccccctggtaatagctgtaaacttccaatttctagccatacgctcagctcatccatgcctcagaagtgcatctggagagaacaggtttctaagcataaaagatgaaagagcagttggactttttaaaaattcagcaaagtggttccctctcttagggacagtcaaaaccaagtcacttaggtagtaccaaaataaataaggaaaagcttagctttagaaacagtgcaacactggtctgctgttccagtggtaagctatgtcccaggaatcagtttaaaagcacgacagtggatgctgggtccatatcacacacattgctgtgaacaggaaactcctgtgaccacaacatgaggccactggagacgcatatgagtaagggcactgacggactcatgatttcttcttaccagatgctttcctgttctttaagagtttaaaatcatcagaaaggaaaaacaaactctatattgttcagcatgcaatacataccacgctagggctggctcaattgaaagtgggcaaaagcttacaaatactaaaaagaagtgctgccgcgcagtgtggaggccactgtttagaaataaatcttcctaacact

SEQ ID NO: 348 - DNA, 2342 bp, Homo sapiens
gcgcagctgctctacgccctgctggcggcgctgtgcttcgccgtgagccgctcgctgctgctgacgtgcctggtgccggccgcgctgctgggcctgcgctactactacagccgcaaggtgatccgcgcctacctggagtgcgcgctgcacacggacatggcggacatcgagcagtactacatgaagccgcccggctcctgcttctgggtggccgtgctggatggcaacgtggtgggcattgtggctgcacgggcccacgaggaggacaacacggtggagctgctgcggatgtctgtggactcacgtttccgaggcaagggcatcgccaaggcgctgggccggaaggtgctggagttcgccgtggtgcacaactactccgcggtggtgctgggcacgacggccgtcaaggtggccgcccacaagctctacgagtcgctgggcttcagacacatgggcgccagtgaccactacgtgctgccgggcatgaccctctcgctggctgagcgcctcttcttccaggtccgctaccaccgctaccgcctgcagctgcgcgaggagtgaccgccgccgctcgcccgcccgcccccccggccgccctgtccgcctttgcccgcctgcccgccgcccggcgcggcctgctttcagacgctcacttggcgtttgtgttgggtttccccttttcaacatcctgcggttgtctggctggttccggggggtgcggggctgttgttcttcggcgacactttggtgggggtgggttgtttgtcgccatagcccctcgcccttccccacctgcctgggcggcttgccacctgaagagtggcatcttggaccaccgcggctgtccatgacgctgccctgcccgccgccactggggaaggcccagccttgctcaccaagcacagaacctctgcagcagatcccggggccaggctccggccccgcctgcggccccagcgccactgcctgtggaggcccgagctggccacggcgctgctttgctccgcgcatgccgagggtgtggcccggctgagcatgccgcatgcacacagccccgccctgccgccctgcccagactggacccggagacccgggctggtgagcgcccctgtccccagcccccagctggctgtgggagggcctgcccctgcccccacctcctggagggcctggtctgccccgcgccgcccggctctgtccacacctgctttgctctgacgccctccatttctctggctccggcccctcccctgcctgggctgtgctgactggtgtcatcacccaggtgactcccatggcgtccgtggcacagccagggtgggggtccatgggacccctctccccagtgcccactggatcgtgctggcctctcccagatgtccccggggacctcctgcctctggctgacggtccaccctgtgaatcttatcagcccaggctgctgccaacagcgcccagcccacagcttctcccagcctgaaaccaacacattttctaataagttatttagacagaatagcactctgcatgactttaattcttgggacaaaacggtagtttgtaccctaagacacagtttctggcccagtgtgatgggggtgggtggccgggtgggtggagcgttttgctgttggaaacctggagggaaaccctgattggatgtcatttcctgccatggagcacgcctcccagccctggcctgcagggtgggcagggtggggggcaagggagtccgcagcctccgggaggaggggcagggcgctgccttgggctgggtgggaagaggggtggccgcctcggcttccgctggccatgctcctggtctctccttcctgaggtcacaggcaggggctgccctggacggggggcggggggggtggcctggaaggggagacagaggtggagggtggcacaggctgcacattcagcttagaagtggacctggctttggtggcaggagaagaataaacacttgcccagacccctttgtgtgggggaattggggaggggtcgtggcaggcagggtgggccacggaactgggtcccaggcatcaaggccacgtgcagggccatggagggatgcttctcacgaggcgcttcagaagcgagcgaagggacagagaagccctgcgtccaagggccttttgtcctgttagcaattgaggtgtgcagagcactgtacagaccccactcccctgtacattcctccctggaggtgcccggtccccgcttggggatgggagttttgtagactgtacagaaatcggcaccctattttcttgcagctcagattttgttaatctggaatatacagacagacgtaaagtgttttagcaaaatgg

SEQ ID NO: 349 - DNA, 2974 bp, Homo sapiens
agaaggggagctgccgccgccgcggtggcactgcctgatgctcggcccagtgtgccggtgccccgctgggtgacagtggactcccagggcgcagcaggagcaggtgacagactgttggctgaaggtgagggtgtccaccctcgcaggcacacgttccagggagcacggcactcaagcagggccgtcagactgggctctggtgcccagaagctgtgcaggccggagagaagcactaccacccttcctgcgcgctatgtgtcaggtgcggccagatgtttgcagaaggcgaagagatgtatcttcaaggttcctccatctggcatccggcgtgtcgacaagcagccagaactgaagacagaaacaaggaaaccagaacttcctcagagagcatcatttctgtccctgcttccagcacctcagggtctccgagccgtgtgatttatgccaagcttggtggtgagatcctggactacagggacttggcagcccttcctaaaagtaaggccatctatgacatcgaccgccccgacatgatctcctactcaccctacatcagccactctgcaggggacaggcagagctacggcgagtcccctcagttgctctcgccaacgccgaccgagggggatcaggatgaccggtcctacaagcagtgtcggacctccagcccaagctccactgggtcggttagcctcgggcgctacactccgacctcacggtcaccacagcactacagccgtccagacactggcgtaaaagataacatctataggaaaccccctatctacagacagcatgctgccaggcgatcggatggggaggatggaagcttggaccaggataacaggaagcagaagagcagctggctgatgctcaagggggatgcagacacaaggaccaattctccagacctggacacccagtccttgtcccacagcagcgggaccgacagagaccctctccaaaggatggcaggggacagctttcactcacgattcccctattccaaatctgaccctctcccaggacatggaaagaatggcttggaccagcggaatgccaatctggccccctgtggagcagacccggatgccagctggggcatgcgagaatacaagatctatccgtatgactccctcatcgtcacaaaccgaattcgcgtgaaactgcccaaagacgtggaccggacgagactggagagacacttgtcgcccgaggagttccaggaagtgtttgggatgagcatcgaggagtttgaccgcctggccctctggaagaggaatgaccttaagaagaaagcccttttgttctgacggctgccagcctgccccactggtgtgtgccgggcgccgaggccaggggcccctggcgagaaccgcacacacccctcccacacaccttgctctggcttctctgtgtccatggggtgggcgggagggggtcccccagcaggtgcgacccctgcacctgccggcgacactcctgccggtagtttagggccgagacggctagcttcacgccacccttccccgctgtggcttggtgtcagggagaggctgtagagtggctgtgtcgggcatcagatggagcacacaggtggctgcagcccagcccaccttcccagcgttctcgaggtgccctggccccggtgctgggcacgtgggggacagaggtggccgggacgtgagctgtgaggcttgttgatgacgggtgctgacaccatcatcgggggtgggcacacggcccttcggagcctgggcagcctggcctcacaggcagactcgcagatggggcagtgagcgtctgggacagtgccaagagtggggtgtgtgatttttgcaggcgtctgtgatgggtctctttagggacaaatgtcaacaagggacaagacagggcaccttccgccagcgcccctccatgcgctgcgttcctcctccagatcgacccctagatgcctacacaatatctttaaagtaacacagaagtttttattttattaaaaagtatagcctacttaaacgcgagatgacatatatagagtttaattttacggtccctccgcaggggagcggcctccagccttattctccaccgctcggatctgtgtggtttcagtctgttcttggtgtggtcctcatacacagagctccctgtttagtttcttttctttttcttttttctttttctcgtcacacaggtaaccttaaagacagacccctctaaagaacgctttgtaaatacatgtgaggtatagccaccactgttttccttgctgttatttttccaagtcttggggagaaaacatcctcctctgatggccaaagccctggaatcaagggtttccacataccctgcctaatacccgacgtagctcttgatgcaccgtccttgtgctgtggctggcggtgtctcagcctgaaacataaaccccacatgccccaggagcgatgtgctccctgaaacagacaaccacacgctgttggggagagaaggatggagataggatggagataggatggagatgtggctcttctcatctttgaagccagcagggcatcccggagcaggaggctggccgggctccccaagcgaaggcgttggtgtctgtcattaggtgtgtgttagggtgcagcaccggccgtcacaggatgctgataagcgcgctgagaggtggatgaaacaccaaagtctgtttccccgtccgcagtgggtgttgcctctttgtgtgtgtcccgatgttcctgcctgtgagtcggccttactctgtttccttagcgcccatgacaggccaagtcccgtttcgcactcggcttctcacccgcccagctcggctagggagggggagtttttagcacctaatatgcttcctgccattgcgcaatctgagcctgagcaactggaaacccccatttctcattagtgcaatgtcatatctgatcccaggaagcctggaaaataaaagacgatgcattat

SEQ ID NO: 350 - DNA, 2414 bp, Homo sapiens
atgagcagggcctagaaaaaccattccgtgagttcaagctggagatctgtcatgagatttcagaaccccggcttcaaaactatgatgagaatggcagaatccacagcttgcggatagaccgtgtcacctataaagagaagaagaaataccagcccaaacctgctgtggcccacacagcagagagggaacaggtgattaagctgggcaccaccaattacgatgacttcctgagtttcatccatgcagttcaggaccgtctcatggatctgccagtgttgtcaatggacttgagcacagttggcctcaactaccttgaagaggagattacagtggatgtcagagatgaattctctggcattgtgagcaaaggagacaaccagattctccagcaccatgtcttgacacggatccacatcctgagtttcctgtctgggctcgcagagtgccgcctgggcctcaatgacatcctcgtcaaagggaatgaaatagttttgaggcaggacatcatgcccaccaccaccacaaagtggatcaagctccatgagtgccgtttccatgggtgtgtggatgaggatgttttccacaactcacgggtcattctgttcaaccctttggatgcgtgccggtttgagctaatgcggttcaggacagtgtttgctgagaagaccttgcctttcacactcaggacggccacaagtgtcagtggggcagaggtggaggtgcagagctggctgaggatgtcaactggcttctccgccaatcgtgaccccctcactcaggttccctgtgagaatgtgatgatccgttaccctgtgcccagtgagtgggtgaaaaacttccgcagggaaagtgtcctgggggaaaagtctttgaaagccaaagtgaaccggggggcaagttttggctccactagtgtttctggctctgagcctgtcatgagagtaactctgggaactgccaagtacgagcatgccttcaactccattgtgtggaggataaaccgactgccggacaaaaactcagcttccggtcacccacactgtttcttttgccaccttgaactcggctctgaccgggaagtgccttccagatttgccaatcacgtgaatgtcgagttcagcatgcccacaacttctgcctccaaagccagcgtgatatctatcgctgtagaagacaagactgacgtcaggaagtgggtcaattattctgcacactacagctaccagacaacagaaacagacaaccttccaaatcctctatattgcagttgccttccacacacagatttaaaaagaggatcaaagagggtggtgaagatcaggtggaatgcttctttggaagttccactggcatcatctatcagaacaatggtgtgagcatgaagaggcacagacaggtctccaaaatagatgttaggatttgggtgctacctgacacagaagtaggtctaaccctccaagtactggggatgataggataatcaatgaggtatatatatatttgtcattttgtataaaatattgtgaaaattgaaggaggacactcagtaaacatcctgggactatttgtaagttatggcaaaaccagatgagagaaaagggacagtcccctctgtatcctcgttgtctcttagtaacatcaaattgtagttaaaaaaattttaaactatgtacaagctacaaaatagcatctctttcatggtatgtttgagtgtgtaactttagtttcttttctggttgtatttgtggtagtcagatgtgttggattgattccaactggacagagtaaggaattccagcatcctcttcctgcttgctcgtgttaccccacagatcaaaccctcaattctagttggggatgctgtctagccccacaccatgactgaagccttaagcactgttgcgcctccatgtgctttggatcagcaaccccagtggtattctaccagagcattgtgggaaagcagatgtatagtcaggtcccaacagcaaattgttgggtgtgagagttctaaagtataggggtgagggaagagaaggatatgaactcctctgaccttaagccagcattcatttaacttttatgtctacttaacaagagaacctggagaaaactaccgtattcaagagattaatcaaaatcagtgttttagccaggcgatgacagagaagcaccattcctcaccctccattcttgtaatgtctgtaataaatttcagtgcgtcaggatggatgaacccaagatccagtgaatgattcagctgttccaagccttacattttccatcattcatcatccattctcattcagtgtaacctcttgcactattgtggttaattttatgtaaaaccagtttatgtttttttttttttaatatgtgcctatgtaataaagtctacacactggctatctctg

SEQ ID NO: 351 - DNA, 2652 bp, Homo sapiens
agttcgggagacatggcgggcgttaaaggtacatcgcggtccccggctcgcttgtcgtgtggtggggttgccacctccgttccggtcaagcctggggctgcgccttccgcgcgccgttggggaacggcctcaccacccttcccgcctctccggttcgggaggcgatcgaccgctcccttcgtcccttggggtgtgggtggagcggcgtttcgggggagccttggccctttttgcaaggccgctggccttcctgctctccagtggcggcaccagacccctccccagcctgagccctcggcgagagcggcgccctccacctctcctgagtttttaaacaaggtttccacttcttgacgccaccctaacgcctttcttctggttttctgcccctccgcagtttcctatttgccacaaaggaccctttgtctccagcgttcttagcattgggaaacttaatcctctttttcctaatgatttttccaactgggcagagttgaccgcgggcgggtgtcaatggaaagcacccagaaagacggtgtttctcgcagtcgtggagagtagattacgtgtaattttaatactgctttcttcggtgttttctctgtttgtggacagagaagaaaccagtgtgtgtgtagtatgtgttttttgcatggggcagttggtaaaaacaccgcgtcccttatctgtatggcttcagagcaatgcgagacggaaaaggttttttgcaaggcttcctgtattttggtaggaaaacattccatttctaatctgtcgaatagagtagcatgacttgtttttatattggcttttatatcatccttgaaatttgcacccaaagatatccccagttaacatctgctataaacatgtagatagtatatatacgagtacgcctctgttcactatgaatttatccgagtatgtgagctgttagcagcagacattttatcgttatttctggctgacttttatacttaatatcagtttagtaaacatggtttacttggagagtgtcgactgtgttatatatccatttgaagccaatgccgaaaacagatgaaaagtagtgtctcagtactacacatgatcagaaactaccaaatcatgatcacgtttatgtgtgaatgtgttagaaaattgtgatgtagtgaaaaaaaaggaagtctgaaatggaaacggactaagggaaggaagcattttacagattgttcaacttttattgaggaactactgtatgccagagacttaggatacaaagataaatgagaagttattggtgggtgacagagctggaaataattatattactatgtcagtgtttatgttgggctcagatgcggtgggagaacagatggtgggttggattttgtcctccaaaaagatgtgttcaagctctaattccctggtacctgtgaatgtgatcttatttggaagtagtatctttgcagatataatcaaattaaaatgataactggtttaaggtgggccctaatccaatgactggtgtccttataagaagaggggaatttagacatagagacatacagggagaataccatgggaagacggagacagaaattggagtgatgcagctacaaagtcaggagcaccaaagattgttggcaaccatgctggcaaccactgagtgttaggaagaggcaaggaagggtgcttccctacagccttcagagggagtgtggtggcgctgctgacaccttgatttcagaagtccagcctccagaactgtcagaagataaatttctgttgttctcagccatccagtttgtggtactttgtaacggcagccctaggaagctgatgcaggtgggattgattcccctgctccagagaaaggactgttttcacagaagaggcgatgcttgaactgaatctgaagggatcaatgtggcttcccttggcaaggcatggagtgaaggtggagtatatcccaagtggggaggacagcacgtgacatagcgcagggcttatgaaacaacatgccttcttctcttcaggtacttaagctacattagtaagaccagaacttagtggtgagggttgaagctggctggacaggcagttaggagtgagtcaggcgatggtgagcctccgtgccagaacaacttgtaggctgtggaagcaaccgcaaagggatggcagcggtgatatatatagttgaaagatcactgtctgctgtgtagaggatggattggaagagtcacagaggcaggaataagaggttaagggcctgcaccagggctgtagcagagagtttaagaagtctgggagattgagtcaccttgacctactgattcattggaaggtggaatgcaatcatggtgtcagtcctctaagataggacctttaaagtgtagggatagtggtttggttttacacgtgttacacatgttgaatttgaggttcttgttggcggtcaaggcagagaagtccagactggaggtggaagtacaggcctagttctttaggacctactctgggctggagcatcagttgcggccgggcccttgtggtagtaggagctttgggttgaacataagttttcagcaggagtgcgtggagtgaaaagagagatggggttggatttttggtcaactccaactttaagagattcagaggatgtgattcctg

SEQ ID NO: 352 - DNA, 2600 bp, Homo sapiens
atggaagtacaggcattgggtaagcatagccattccaagtggaagaaattggccagaacaaagggactacaggggcggtcaagtcttaaagctccaaaatgatctcctttgactccatttctcacatccaggtcatgctgatgcaagaggtgggctcccatggccttaggcagctccgcctctgcagctttgcagggtatagccctcctcctggctgctttcaccagctggcattgagtgtctgtgccttttccaggtgcatggtgcaagctgttagtggatttatgattctgggatctggaggacagtggcccacttctcacagctccactacgtggtgtcccagtagggactctgtgtggggctcactccacattttccttctgcactgccctagcagaggttctccatgaggagaacttcattctgggcatccaggcatttctatacatcctctgaaatttaggtggtggtttccaagcctcaatttttgacttccatgcacccacaggctcaacaccatgtggaagctgccaaggcttggggcttccactgtctgaagcaacagcccaagctgtaccttggcttcatttaaatcatcctgggagcaactgggaggcagagcaccaagttcctagactgcacatagcagagggaccctgggccaggcccacaaaaccatttttttcctccaaaacctaggggcctgtgatggcaggggctgctgcaaaggtctctgacgtgccctggagacatattccccactgtcttggtgacattcagctcctcattacttatgcaattttctgcagccagcttgaatttctcctcaggaaatgggattttcttttctatcacattttcagtctgtaaatttttcaaacttttatactgtttcccttttaaaactgaatgccagccaggtgcactggctcatgcttgtaatctcagcactttgggagtctgagacaggcagatcacctgaggtcacgaatttgagaccaacctggccaacatggtaaagccccaactctactaaaaatataaaaattagtgaggcatggtggcacatgcctgtaatctcaactgcttgggaggctgaagcggaagaattgcttgaacccaggaggcggaggttgcagtgagctgagatcatgccactgcactcctgcctgggtgacaaagtgagactctgtctcaaaaacaaaacaaaacagaacagaacactgaatgcctttaacaacacccaagtcacctgttgaatgctttgctgcttagaaatttcttcctccaaatatcctaaatcacctctctcaacttcaaagttctacacatctctagggcaagggcaaaatgctacccatctctttgctaaaacataacaagagtcacctttgccccagttcccaacaagttattcatttccatctgagaccacctcagcctggattttattgtccatatcattatcagcattttggtcaaaaccattcaacaagtctctaggaagttccaaactttcccacattttcctgtcttcttctgagccctccaaactattccaacccctgcctgttacccagttccaaagtcacttccacattttcaggtatcttttcagcagcactccactcctgatactaatttactatattagtcagttttcacactgctgataaagacatacctgaggctgggcaatttacaaaagaaagaggtttatcagacttacagttccacgtggctggggaggcctcacaatcatggtggaaggtgaaaggcacatctcacatggcagcagagaagagaagagaacttgtgaaggaaaactcccgcttataaaaccatcagatctcatgagacttactcactgtcatgagaacagcatgggaaagacctgcccccatggttcaattacctcccaccaagtccctctcacaatatgtgggaattcaaaatgagatttgtgtggggacatggccaaacaatatcaaatggttttgatttttatgttgaggcacattctcaagctagtatcatttcaagaagaacctgttatttgttgattttggaaattttaaaaatcagatttaatttacactgaaaagtggttgaccttaacgtttctcagataacctgaaatgttcatgtggcattcattcattcattaatccatccacttatttgacaataaaatatgatttaggtgacctctgaagagctgtctaaaaagaattacctggtagagttaatctggatgtttaggacactatgatcaaactgaagaaaaaggcacccatttctctaatcctttctttgggaagctgatttcactttaaactgaaagtgagaaaggaaaaggaagaagaaaagaaacagagggtaaaagaagagaaagaggaagggaaagaaagagattaatgtatattttctcctaagaaaggctcttttgtgtgtgtcggtgtgtgtgtgcatgtgtgtttcctgttgcctggatctatcataaaaagcaatgtcttctctggaatggggcttcagtttccacatttacaattagtacatattacaattagtgatatgaataaaggctgttatcctac

SEQ ID NO: 353 - DNA, 3628 bp, Homo sapiens
tagtgaattcccttccttttgaaggctgaatgctattccattgtctatatagagggtgttttgtttatccactcatctgctgaaggacacttgggttgctttcatgttttagctattgggaataatgctgctatgaacatgaatgtacacaattttatgcttttctttctttctttttttttttttttttgagatggagtctctcgttgtgtcacccaggctgcagtgcagtggtgtgatctgagatcactgcaacctctgccttctgggttcaggcaattctcctgcctcagcctcccaggtagctggagttacaggcacccgccaccacacctggctgatttttgtatttttagtggagatggggtttcctcttggccaggctggtctcaagctcccgatctcaagtgatctgctctcctcggcctcccaaagtgctgggattacaggcatgaaccaatgtgcccggcccacaattttattcttaatggaatttctccctctgctttgcttttaggcccagacccatggaaagtggcctgtcaagtggtacgctccggaatgcatcaactactacaagttctccagcaaaagcgatgtctggagctttggagtgttgatgtgggaagcattctcctatgggcagaagccatatcgagtgagccagtcctgcttcattttctcactgtggggccattagaacagataagcaccagattgtctttacaacaacctgaaaatcctaatctgagtctctcattatcttttaccagtaagcagttaatgtgccctcagtctattccaaactgagaatgaaatatctgatgctcactgaagagtgtgtttttcccattgtgtgtcaacacatgtaaatatacacaaaatataacccagatcattactcattagagttgaaatagaaataatgactatttacagtatcttaattacattttttagatcttttaattaaaacatatataccaaaaagggcacaactcttagcatgcagtacagtggttttccacaaatgaaacatacccatgaaatcagcccccagatgaagaacagaaccccagaagcctgtttcctctgcacacacagccttccccaggggtgacccaactgactccaacatcacagattaagtgctcctgtttttatacttcgtataattgaaatcatacaatgtgtactccttcatgtcttggagtggctgttttgttttgtttgactaacacctttaaaaaaaaaaaagcttatgcatatcttgcatgttgtaggggatgaaaggaagtgaagtcaccgctatgttagagaaaggagagcggatggggtgccctgcagggtgtccaagagagatgtacgatctcatgaatctgtgctggacatacgagtgagtacctgacactgactgtgatgtattcagatgctctggaaacaggtgaaatggttgggcgtctaaaaaaaaggataaagttcaccttttcatgaatcaggaatgtgcccgctttctaaacaaacaacggtgggggctggtcttgctttagagaccttgctttctggcccatgcacttacatgtagtagagcctaaagagcaagtttagatggggactctaacccgagtgtccaaatttaaatgtcgataatggtggagagatggggcaagggcagtcaaagtaaaaaagtgtttgtaagagtttggggctggatgccatttttggcatagaggatggcagaagcactcggtaggggatggtatactttcctgactccctgattaccatgagcagtgaggggtgacctcggactctggccagctcacagatacattggctaaggttgcacttccctagaatctacctcatccttgaagtggtggcctcagtccaccctgactgccgtcatacgtctcgcttagtggatcccaggtgctgttatgcttttaaagtacacctggcattattcttaggtgatgttcagggcagctcagcaaggaaggaaaatgcattgccactgaaaattaggagtacagttttgccaggctcagcagcctgcttgtgcgtgcatagcacggtgaccccaagccgccatctccagctccctggtactgaactgtgcacacagagcccacacagctgagaatcgatgtggtttgtgatcaggaggacatcacaaatcctggccatggatttgatgctttgcggaatcaggtttgccttcagatacagctgacattgccagagcctctgaaagatgagggctattccaaatgctgcagatgccacctgggattccgagacctcccctccccaccctgggagtatcactctaccacaattgtgagtgacagggaaataatctcattctgtatctagaaaccacccagggggcagccacaaaggcagcaggcaaactgtgggtatatgcttccctgcccctgctgctgccgtggctcaggagaggagcctggcctgggccccggagcatcttctccaaccccaagtgttagtgcaacagggagagctaagtgtcagcaagagggaagtgctactcatggatctaagaggatgtttattcctaagtcttggcttaattctcccagtgcctaaactagaatcgtaagaaccattggcaggtaggcactggcagcactggaccctggggagggcagcccttgggcacgtggcagcctatgaccctttactgaaagtgttctttggtccagcctgcagctccctttgcaaggcttcccttcttgtagaagggtgaggagggtagagtttaaaacattgtgatacaaatgcaaaaactttgaattaaaaatgaactcgcagtgggggagtttttgcatttaacgttgatgctgatctatgtacttctgtcgattcttctttgtggtgtgtgtttaacagtgaggagtgaaaggtgggtgggaagagagcagggtgcgcagccaggggcaccacctcccacttggctcccaggtgggtgcagtgaggctgctgaataccctttgggctcgtggtgtattcttgtgactcaaggaatcaggataggggctgctgggccgacctctgtcctccacggacgcacgtaacagtgggcagttatttccagagtggtccgccaggggcagaccggggagggaaagcagtctacgtgatattcactggatgttcaccagaattacagcaaagtagagcagtagaacagtctccttaagagagtattctttctaaacgtattttcccgcctggagatttaagatggaacctgagtgaggttcacaggcaggcaatgtctttccccttggttcccaccccagtccgctctgcaggggtgcatttcagtgagttctgcaggcttggaggagtcagctccagggcacaagccccagtcaaaaggaaatcatgacaatggcccatgccccatattagaaatcacagctctttatcagactttgatttatttcccaacaaagctatatttctgaaggttacagtgtttctagtagtgacctcaaacagggttgggggaggtggggagatgttctgaaacttttgaagcagctgtgtttgtctggggtaatacctgagctcgttgcctcacgccaaggaaaccacc

SEQ ID NO: 354 - DNA, 2752 bp, Homo sapiens
ttttcctaaggatgtctgtgagtctggggtgccatgtggtttggaagactacaggccaatggccagaaccaggggctctgagctgagtgtcactgcatgtggggaccacaggacattgcaggcagccaccttcaggcgaggggatggacatatcactggactcctgacaaggtcttggcgggctcaccactggcagctggggctgagttttgggccaacatttctgctagcccagatccccggtcacactttacacagtcacttcttataaacactttcattggtgataccatgcttggggtaaagttcacgtttcccccatctcagcaccaaaggaagagagtgtgcataaaaagtgggtgtttcctgaggatctcattggaccacctttgtaggcagagcttcctgtgtgtatggctataatccagcatttcccaaatcatgaaatggaccaactttgtgttccagattattgctcttaataaaaccaaagaacgaatgcgaccttaccaaagcaaccaagaagacgaagatccagacatcaagaagattaaaaaggttcagagcttcatgcgaggatggttgtgcagaaggaaatggaagaccatcgtgcaggattacatttgttctcctcatgctgaaagtatgaggaagagaaaccagattgtgttcaccatggtggaggcagagtcagagtacgttcaccagctctacatcctggtcaatggctttctccggcccctgcgtatggccgccagctccaagaagccccccatcagccacgacgacgtcagcagtatttttcttaacagtgaaacaatcatgtttcttcatgaaatatttcatcaaggactaaaggcaaggatagcaaactggcccactttaattttagctgatctgtttgatattttgctccccatgctgaacatttatcaagaatttgtgcgtaatcaccagtacagcctgcaagttctcgccaattgtaagcaaaacagagattttgacaaactcttaaaacagtatgaagccaatccagcctgtgaggggaggatgctggagacattcttgacctatcccatgtttcagatccccagatatatcatcacactccatgagctccttgctcacacaccccatgagcatgtggaaaggaaaagcctggagtttgccaaatcaaagctagaggaactatccagagtaatgcacgatgaagtcagcgacactgaaaacataaggaaaaaccttgccatcgaaagaatgatcgtggagggctgtgacatcttgctggacaccagccaaacgttcatccgccaagggaccatgaaaaacagcaacacaatcatagtaaagcacgagtggggcaggcagttacattctgactggacgctcctcctcagcggcccggacattctctgcagctccaaggaggaccggtcggcctggcccacggccgtggcagtgccaagtgctgacgatacccaggccaaggcccaggagaaacttgcgttgctcaaagccctttcacataagactggggaccatgtccgaagtgaaaacagctgtctgttgttcccatttttcatcagcacttccggatccgccccacacgatataatttgattcaactggtaactcccgttgccagatgaaatgtctctgatggacacttgccacgctttggtaatgcagaagctgtcgtgtttgcgaagtgtgctttgggggcatcactcgataaattaagcttttgaagagttgaagatatttgtgccggaaactgtggagaagcaacagcctgacagtgcctatttctcctcggctgttatttcaaaatgcaagacgtaaaccacatcccaagttatttttttagtgcttaggtcctctgggggaggggagaatgccccaggcaattgatttgagacaatatattgcacacatttataattttgaatttggtgaggagtggaatataaatttggaactcaaattaatcgttaatgtagtttctgtttataatgtgccaatacatttgaagatatttgtgttgccattgcctaccataatgtactgcttaaaatctctttttacctcatcaagaacaagacaatgttttgtgcacattaatttttgcacagactactttaaaagtttaatgcatgccattctattttccattatttatttacaaggagaaaccacacatatgttaaagtttgggagtgtattttaggaaatgattccttttctcatttttggctttagatattcttttttctttaaataagggtggaatataatgctgacaacatcaggcccttgtaatgcctcctctattcctctgcacagactgtgtccccacattggcttcctgcctgccagcctctgtgcctttccttgtgctgtccccagcctgggggctgggaatgtccttatccatttcttttgtgcctgttgaagttctgcttgtcccaccaggctcagatcagatacctcgaaggagccttttataatttcctcttcttcctcctcccctctcctccagttagaatggatttaccttccacttgtttccaaggcactttactcctggtgcgtgtatttcatcctcttgcttgtatacctctctctcctggttactgtaaactctgaagggcagcacttaaggaattctctctgccttaccttgtctagtatgatgctttctgttacagatacctggaaaatgggcgttgaattaaattatttactgaattgc

SEQ ID NO: 355 - DNA, 2594 bp, Homo sapiens
tgactcgatgtcctcggagagcacctgggacgcatggaacgagaggctgctggagattgagaaggaggcttcccggaggtaccacgccaagagcaagagagaggaggcgacagacaggagctcagaagcagggagcagggtgcgggaggatgatgaggacagcgtgggctctgaggccagttccttctacaacttctgcagcaggaacaaggacaagctcactgccctggaaagatggaagatcaagagaatccaatttggatttcacaagaaagacttgggagcgggagacagcagcggcgagcccggtgcagaggaggcagtaggggagaagaacccctccgacgtcagcctgacagcctaccaggcctggaagctgaaacaccagaagaaggtgggcagtgagaacaaggaggaggtggtggagctcagcaagggggaggactcggccttggctaagaagagacaacggaggctggagctgctggagagaagccggcagacgctggaggagagccagtctatggcaagctgggaggcggacagctccacggccagcgggagcattcccctgtctgcgttctggtctgcagacccctcagtcagcgctgatggggacacgacgtcagtactgagcacccagagccaccgctcccacctgtctcaggctgcaagcaacatagcggggtgttcaacctccaaccccaccacacccctgcctaacctgccagtggggcctggagacaccatttccattgccagtatccagaactggattgccaatgtagtcagtgagacccttgctcagaagcaaaatgaaatgctgctgttgtcccgctcaccgtctgttgcaagcatgaaggcagtaccagcggctagctgcctgggggatgaccaagtctccatgcttagtggacacagcagctcctccttgggtggctgcctgttgcctcagagccaggcaagacccagctctgacatgcagtctgtgctgtcctgcaacaccacactgagctcacccgcggaaagttgcagaagcaaagtgagggggaccagcaagcccatcttcagcctctttgctgacaatgtggacctaaaggaacttggccggaaggagaaggagatgcagatggagcttagggagaagatgtctgagtacaaaatggaaaagctggcctcagacaacaaacgcagctccctcttcaagaagaagaaggtcaaggaagatgaggatgatggtgtgggtgatggggatgaggacactgacagtgccatagggagcttccgatattcttcccgcagtaattcccagaaacctgaaacagacacatgctcctccctggctgtctgtgatcactatgcaagtggcagcagagttggcaaagagatggatagcagtattaataagtggctcagtggcctcaggacggaggaaaaacctcctttccaaagtgactggtctggaagttccagagggaagtacaccagatcgtccctgctcagggagacagagtctaaatcctccagttacaagttttccaaatcccagtcagaggaacaggacacctcctcctaccacgaggcaaatggcaactctgtaagaagcacttcacggttctcatcttcctccaccagggagggcagagagatgcacaagttctccaggtccacgtacaacgagacctcaagttcccgagaggagagcccagagccctacttcttccgccggaccccagagtcctcagaaagggaagagtccccagaaccacagcgcccaaattgggccaggtccagggactgggaagatgtggaagagtcatccaagtcagacttctctgaatttggagccaagaggaagttcacccagagctttatgaggtctgaagaagagggagagaaagagaggacagaaaacagagaagaagggaggtttgcatctggacggcggtcccagtatcggagaagcaatgacagggaggaagaggaagaaatggacgatgaagccatcattgctgcttggagacgccggcaagaagaaaccaggaccaagctgcagaaaaggagggaggactgagctggggaaaatctgagaacactgaaagaaaccactcacgttagcatagggctcagggcacacgttgccaccactcatcgcaggatgaggatacagagaggatcttccagaggggcagagccaaaatgagaggtaccaagcataagggcagcagaggtggagtagggaggaggcaaggagggggagaaccatcaatacgaatacgaggtccgaatgcggaccaacggataccattttctgttgctcagcaccctctaagctttggtgtttcacttaatgtattcgacagtgttcatcacaggctagagaggtgagcttggaaaagcactgtagtttgtcagagactccagtttacatccagaaaggccatgaacataggacacgcttctgtctgtagaggcttcatatgagacccagaaagtctatcctatggcaagtctgacctctcctggcaatgctcagttctgattttttttttttaatgttttgagtctccattaaaaatggtatgttggcaaat

SEQ ID NO: 356 - DNA, 2652 bp, Homo sapiens
acaattcttctatatctgctggtcaatcaaaggcccagatttcattgcagaagatcaaacctgtgttcgactttcttgtaaataaattttccactgtatatactccaaacagaaacattgcagttgatgaatcactgatgctgttcaaggggccattagctatgaagcagtacctcccgacaaaacgagtacgatttggtctgaagctatatgtactttgtgaaagtcagtctggttatgtgtggaatgcgcttgttcacacagggcctggcatgaatttgaaagattcagcggatggcctgaaatcatcacgcattgttcttaccttggtcaatgaccttcttggccaagggtattgtgtcttcctcgataactttaatatatctcccatgcttttcagagaattacatcaaaataggactgatgcagttgggacagctcgtttgaacagaaaacagattccaaatgatctgaaaaaaaggattgcaaaggggacgactgtagccagattctgtggtgaacttatggcactgaaatggtgtgacggcaaggaggtgacaatgttgtcaacattccacaatgatactgtgattgaagtaaacaatagaaatggaaagaaaactaaaaggccacgtgtcattgtggattataacgagaatatgggagcagtggactcggctgatcaaatgcttacttcttatccatctgagcgcaaaagacacaaggtttggtataagaaattctttcaccatcttctacacattacagtgctgaactcctacatcctgttcaagaaggataatcctgagcacacgatgagccatataaacttcagactggcattgattgaaagaatgctggaaaagcatcacaagccagggcagcaacatcttcgaggtcgtccttgctccgatgatgtcacacctcttcgtctgtctggaagacatttccccaagagcataccagcaacgtccgggaaacagaatccaactggtcgctgcaaaatttgctgctcccaatacgacaaggatggcaagaagatccggaaagaaacgcgctatttttgtgccgaatgtgatgttccgctttgtgttgttccgtgctttgaaatttaccacacgaaaaaaaattattaaataccgatcatcatacacatctgttccattaggattagagacaagttctgtttagaaataactccaagattgggaggccgacctgggtggatcacctgagatcaggctggtcttgacctcccgacctcaggtgatccgcctatctgggcctcacaaagtcctgggattataggcatgagccactgcgcctagcaccaagaacagtttttatattttattttcacattgaaaatcagtcagatttgcttcagcctcaaagagggtgtttatgtaaaactaaatgagtgcaggcagcgagctacacttttttttttcctaaatggaaaatgggaaggagatactgtctctgaacaaaaatagctggaaaaacacataactgttaactaagggttgcctctagtgaaaaggattggaagacaatttatctgatgctacactattcttcctgttgtgattgttttactgtgaacataacaaggttgtattggggaggagggcaggggttgattgctgccaatgttgattgctgaggccttagccaagatttcaggcatcatttgctccagtcctttcattttctttatggtggaaagtgaagtgacttgcccaagatctttgttggccctaaacatcgctgtctctgctacagattcctattgagagcaatgcatgttttagccttgtgcactcttagagtcagcatcatgggaaagagtaacagcaattgaaaaaagagattcaagagccaagtactcagccctggcaggggatggggacatgatgcccagagccacccctatactccagtctccctggcatcagctactgcagtactggggtacttgccttcatcttttttctgaagatagttacttcttcatatttgatcatcggaaggagcagcattgctcagaaacacacacacacacacacacttgactttcttgtctgccaaataaatttcttatttgctagggaactggtaatctaggctcaagaagtgtgtggagaaggtttattttcattctttttactttaaaatatgccttagtttttgaatagataagacattcaagtgtcagaaagtaaaagtcagttcaggactgagaaaggaaagatcagtgctgattttaatcagactgtaatgtaccaactagatacagacagggccagtggcaaggccatcagaaaacttcttcccaaggccacaccacacctgcaaaatgcctaacaaccttcttcttttcagtgattaccactttcttaccaatgacttcgctttgttcctcgtgcctctgaacagactgctgagatacccaatcaagagccaatccttgcttccctagactctcctcaatcattcaacagaagcccaaatcttgtaaaagttcctttctgggccgggcacagtggctcacgcctgtaatcccagcactttggaaggccgagatgggtgaatcacaaggtcaggagtttgagactggcctggccaacatggtgaaaccctgtctctact

SEQ ID NO: 357 - DNA, 2785 bp, Homo sapiens
attagggaaaggaaaagaatgtcacaggctatgggagtaatgaggcactggttgggatgagtaaaaagaactctgcagagtgtagggacagcaggcacaggagcagccgccacccagggccggggcagagccccccagctacagtcactgccacccagggctgaggtctgcaccagctgcaaacggcgtggtggggacaccaccgtgctgtcagggcttgtggggaacctgcctcctggctgccaaaagctattctgttgcaggacacttggcagaggcacccctagagaacagctacccgaatggggtcggggaagcccctggctctggctacagtgggcaggatgctccctggagtaggtactggggagactgcaggtgtcggagggccctgcagagagtggtcagaaccaggaggcaaacctcttcctgctgtgttcactcctcggctccctctgctgatgacacgcagcattgtggaggaagagcctgctaagggcccagctctgtttctacagggcaagtaaaaaggatggacttagagctgaggggctctacgttaatacctggcacagcagctgattctcctccagtagatttctttttttctttgagacagagtttcgctctttgttgcccaggctggagtgcagtggcgtgatctcggctgactgcaacctctgcctcccgggttcaagcgagtctcctgtcccagcctcccgagtggctgggattgcaggcgtgcgccaccattcccggttatttttgaatttttagtagagacagggtttctccacgttggccaggctggtctcgaactcccgacctctggagatccacccgcctcagcctcccaaagtgctcaggttgtaggcgtgagccaccgcgcccggcccctccagtagacttttctgcctgaccctggaaagaaaatcagaggtgtttttgagacaggtaagctgaagagagacgtggctttgtgagttccaggaccgtgatggttcccaggccccaggggtgagggtgtcttcctgcaggctgaggctaatagttcagcagctagactgtaaaatacaactttggacctcagaaatgagggagaaggtaagtttggcccatgtgccactgcagatggttaaatcagacagctgatgtataattggctatatttactgccctgaaatggcaacgggaaaggtttccaaactgatgcctaggcaggcgttctgagcatgatgcatcagtgcctgagtcgaagccagcggcaaactctcctgtcacagcggggcctgggtcacttttcacttgggggcctccgaaggccaagcgtttgggggtaatttggcttcagaagcattgggacagtgcagccagcgggtgggaccaggtgtggcgctggcctctcagtcgtggtctggggtggctgcatctggaagcctctttgggggctggagtaacgagacgtatgcggcctcaccccagcactgccgtgtccttgctgttttgctgagtgagcatttgtgcatggacttgcctggggggccctgcatgccgggagcattgctgaaaggccgcccacctcgtatctccacagcctgagtttcctgcttcctcctgctcctctctgtctgttctaacaattttcctgtttattttgttttctgcacagtccgacaaagcggctctccagcaagaaggtggcaaggtaggtgggtctctggttcctgctgaaaaacgttctgaagtggataattaatcatagttttttaaaaaacattttaaaatgttcttttccaaggtattttttaaactcttgcaagttactttacatggtttggggctgaaggtatcctgaaggagtgttgggaaaggggtttccagggctgtgaatttggacctggatttgtgaccagggagggtgcgtgtcagagcttttggtgctgggcctcttgtgtgttcactaaggtctggaaggggccgccatccccagatgtctgctctatgttagctctgaggtagcgagacccagtgaggagcctggcttctcagagccgggtctgggcagctccccaaggtgagtcgaaggtgagggatgggtctgactccaattcctaaagaccatttcttcattttccagcttcgtatagatctgttggcttcctgctgtgaaagatggcaacatacacttttatcttcctcccctgccagttcttaccgaaataaacatgcagggttaaggcccttcccagggagccactcagtgtggctgccgggtggcctctgctgccgtcagagtctgcctttgtgtctttatctgctttgccttcctagtccccgtcctgcttcgtggcccggcatctggcagggctgggagacgcctctccagcttcctctggagcatcccctctggagcctcctctctgccctgttgtgccgggcgttctccaggcctcgtggctgtggtcctggacaggtctccccacactggtgggttcctttgtttcgggggttggatcctctagctccctggccccgtcttccttctcatttgttttctctggtttttgtccagcgtatcttcctgtagcttcttgagaaaagaggtgctcaggagataaacttgagcttgggttggtttgtactgtgagagtgggatcattttcctgtaagatttttgacggcattgcttatcttctagagctaaagttgttaccatgaagtttaacctttctgactcggtttctttgggaccagcctgagcaacttagtgaaaccctgtctctac

SEQ ID NO: 358 - DNA, 1780 bp, Homo sapiens
acggaagctggtagggctgtgggtgcttcactatggcgacggtgggggctccgcggcacttctgccgctgcgcctgcttctgcaccgataacttgtacgtggcgcgctatgggctgcacgtgcgcttccgaggcgagcagcagctgcgccgggactacggcccgatcctgcgcagccgaggctgtgttagcgccaaggacttccagcagctgttagcagagcttgagcaggaggtggagcggcggcagcggctggggcaggagtcagcagctaggaaagccctcatcgcgagttcctaccacccggcacggcctgaggtctacgactcactgcaggatgcagctctggcccccgagttcctggccgtgactgagtacagcgtgtccccagacgcagacctcaagggccttctccagcggctggagacagtatcggaggagaagcgcatctaccgggtgcctgttttcacagcgcccttctgccaggccctgctggaagagctggagcacttcgagcaatcggacatgcctaaggggaggcccaacaccatgaacaactacggggtgctgctgcacgagctcgggctggacgagccgctgatgacaccactgcgggagcgcttcctgcagccgctgatggccctgctgtaccctgactgtggcgggggccggctcgacagccaccgggcctttgtggtcaaatacgcaccgggccaggacctggagctgggctgccactatgataatgccgagctcaccctcaatgtggccttgggcaaggtcttcacagggggcgccctgtattttgggggcctcttccaggcacccacagccctgacggagcccctggaggtggagcacgtggtgggccagggtgtcctccaccgtggcggccagctgcatggagcccggcccttgggcactggtgagcgttggaaccttgtcgtctggctccgagcctctgctgtgcgcaacagcctctgtcccatgtgctgccgtgagcccgacctggtggacgatgagggcttcggtgatggcttcacccgagaggagcccgccacggtggatgtatgtgcgctcacctgagcttgcttgggcccagtgtgggggtggcaggcaggtgggggctccgttgccttggtctgggggcagaaataaaatccccgcagcctactgcacttcttggctcaacggtgtgccagcttctgggtcattctatgggcaaagatgctgccttagttcaggtttgtcagaagcagggtctggaatggggcttcagcgagggagtcagggaagcaggggaggggagggagcagctgggcaaggaagtggcttcagaggacgtccagcctcagctggccccacggagagctccaggcagagcccacagtaccacagtgtgcccacaccaccggttactggctcctggatgagggggccagagaggagtgaataacttcccagacacttatctccagggcagggtgccttccagtagccaagggaagcctccagagagcacagatgtgaaccctcagcagcaggcatcaccccccagtggactcgggtgggccaccagtagcatcttctagatggcagaggggtgaatggcagggccaggaaccaggctgcccgggttcccattctgcttctgccacttccagctgtgtggctttaggtgagccttcaccttttggtgccttcgtttcctcatttagcacctacctcctagagctgttttgggagtcaaatgcgctgacgtatataaagtgctttgcaag

SEQ ID NO: 359 - DNA, 2067 bp, Homo sapiens
cctgcggcgctggagccttgacgcacggagctcgagagcgagaacgggagagaaaggggtagaaatggcggctccgctcggctcccgctgaggagggcgaagccggcggagtgtctgtgctgccggtctgcagcaccgcccccgcttcccgcacgccgcctgctcacgccgacttcccttcctctgcccggctctctcttgtgctcgtctgcgctccgcacgctccgggccggctcgtctctcattgcccggctcggctccgctggccctgactgaccggccggcgggccggccttgctcggctctcccgggcgcggcgtggactccgtccccctggctggaccatggtgaacacccggaagagctctctccgccttctcgggtccaagtctcctggtcccgggcctgggcctggggccggagcagagcctggggcgaccggaggcagcagccatttcatctcctctcggacccgctcctccaagacccgcgccgccagctgccccgccgccaaagccgggggaagcggtggcgccggcgtcactctggatgaggccaggaaagttgaagttgatggtagtttaagtgatagccacgtatctcctccagccaaacgcactttgaaacaacctgattctgtttgcaaagacaaatcaaaatcacgaagtactggtcagcgagaggaatggaacttatcaactggacaggccaggttaacttctcagcctggtgctacattaccaaatggacatagtggcttatcccttcgaagccatccccttcgaggggaaaagaagggagatggggacctttcttgtataaatggtgacatggaagtcagaaaaagttgtcgttccaggaaaaacagatttgaaagtgtgaaccagagtttgttatttgatcaactagtaaatagcactgctgaagctgtactacaggaaatggacaacattaacatccgacggaatcgtcgatcaggagaagtagaacgacttcgaatgtggacagatacagaatttgaaaacatggatatgtattcaagagtgaaaaggcgaagaaagtcactaagaagaaatagttatgggatacaaaatcatcatgaagtttctactgagggtgaagaagaagaatctcaagaggaggatggagatatagaagttgaagaggcagaaggagaagaaaatgatagaccatataatttgagacagagaaaagcagtggatcgataccaagcacctccaatagtaccagctcatcaaaaaaagagggaaaacacgctgtttgatattcatagatctccagcaagaagaagccatattaggagaaagaagcatgccattcatagtagtgacacaacttcttctgatgaggaacgctttgaaagaaggaaatcaaagagcatggcaagagcaagaaatagatgtttgcctatgaacttcagagcagaggacttagctagcggtattctccgagaacgagtgaaagtgggtgcaagcttggctgatgttgatccaatgaacattgataaatcagtacggtttgatagcataggtggattgagccatcatattcatgcgctaaaggaaatggtagtattcccacttttatatccagaaatttttgaaaagtttaaaattcagcctccaaggggctgtttgttttatggccctcctggcacaggtaaaaccttggttgccagagcattagctaatgaatgcagccaaggagacaaaaaagtggctttttttatgcgaaaaggagcagattgtttgagcaagtgggttggtgaatctgaaaggcaacttaggcttctttttgatcaggcatatttgatgagaccttctataatattttttgatgaaatagatggattagctccagttcgctctagcagacaagatcagatccacagctctatagtatcaaccctccttgctcttatggatggattagataataggggtgaaattgttgttattggtgctacaaacagacttgactctatagatcctgcactcaggagacctggtcgttttgacagagaattcctcttcaacctgcctgatc

SEQ ID NO: 360 - DNA, 2532 bp, Homo sapiens
ggcacgtgcctggtggggacttggatcccggggcaggcattgggggaggcacctggtgggggcctggatccctggggcagactgcaccggggatgcccttctcaggcaaggctgcttcaggggcacctggctcctggctgcctgcggtctggcccacacccctcaccaccagccactcttgcggggagactgcgtctcccctctgggggccgggttcagggtgatgaaggagagaggacgctctgacctggagggcagacagggccaccttcctttctcctgcagagtgaaattccctctcacatgccagggtccttctctggcctctggcaactctgcaaatgctctgacctttgtcctgccccacattctgggaggagggcctgcagcctgggtgtcagcccccacccccacgccccgtctgtggttggacctcagtgcagtgcttctgtgcttgtcccgcaggttcaggcgtgaacggcctggaggagcccagcatcgccaagcgactgaggggcaccccagagcggatcgagctggagaactaccgcctgtccctgaggcaggctgaggcactgcaggaggtaccggaggagactcaggccgagcacaacctgagcagcgtgctggacacgggcgccgaggaggacgtcgccagcaggtcagcacgcagggctgcagggcgcccacccgccacacggccctaagagcctcctcacctctgtgtgtctcggtttcttctcagtgaagggaggcctcctgtctttcctgctgcccgcagtccattctccccagtcccttttaggttcttagcctcatcttctagtcagtgaggactcctccatcagactcaattcagagattcaggaagtatttattccttgaggacctgacatgtccccagctccaagtctgtcattgggaaggaaagtggcaggctctgcccccgggttattcacagattcagcagagggaaggacgggcacacggggagggactctgggtgattcagccaccagtgcaccgggccgtcttgagggaggcctagtccgtcccccaggcatctttttttctcctgtaggtaaagaaagggactgaaaatgtgtgccccaggggccgcatgcagcaccagtggatgcatgcttaggcagttccagagctgtaatcacatccagctgggtgacacctttggggatgtgcatgctataaccctaggactccctatatccactgccctgcaccccagggcttccagtatcagcgaaggcttcaaagtgttcagccgattacagatgatcaagagagccaagaatcaaaagggggtccggtgtcctgtggggcttcaggacagaaacacaggctgcaaccccgaggggcagaggcctcaagtggccttggagagcatttgaatcacacaccttgatttagccatgatgaagggaacatgtggggataaggagagcagagcagtttttttaaggtccaagaacgctttccagaaggtgtttgctgggccgagctgctttcagctgcacccgccacctcagccctcatgtcagacaccctctgcctagattcattcttgggctgcctcacagaccgctcctccgtgcatgccgggggcagcctctgccttggtgtctgcagttccaaagctgtcactgatggtgcatcctcatccagaactctgcttccctatccagagcacccatggaggccccactctccccactgtgcccagatgagggggagcccactctctctctccactgaccctgcagtgagggtgagagatgctgtgtgtcaaaacgcatttataaacccttgagcagagctactggcttgaccttgggctgagtgtgggtcagcaccattttctccactgtaatttataaattgtgagaggcagtggggcagcaagttcatgtaatgtagcaaggacattccaggaaggctaacccctggcatttatggcaggtatgacaggagggcagcacagaaaacatgaaatcagtcagcatctatgcaatgcaatacatgcctcatcttactcagattgaagttaaaaaaagattttaaaactagcattcatgctgggcgcagtggctcatgcctgtaatcccagcactttgggaggccaaggtgggcacatcacttaaggtcaggagttcaagaccagcctggccaacataatgaaaccctgtctctactaaaaatacaaaaattagctgggcatggtggtgcacacctgtaatcccagctacttgggagggtaaggcatgagaattgcttgaacctgggaggcggaggttgcagcgagccgagatcatgccactgcaccactgcactccagcctgtgtgacagaatgagactccatctcaaaaaaaattaaaattaaaatcaaaaaataaaataaaggccaggcacggtggctcacacaggagaatcacttgaacccgggaggcggaggttgcagtgatctgagatcacaccagtacactccagcctgggagatggtgagactccgtctc

SEQ ID NO: 361 - DNA, 2458 bp, Homo sapiens
atgagcggcgccctcctccggcccgcgagcgtcctgctggttccccgagcgagggtctcgcggcgcggggcctagcggagggcatcgaaggcctccgcgtgcgcacgggttgctgcggccgcgccgggcgccggggagggcggcggccgccatggaggtgagcgggccggaagacgaccccttcctttcgcagctgcaccaggtgcagtgccccgtgtgccagcagatgatgcccgccgcgcacatcaactcgcacctggaccgctgtctgctgctccacccggcggggcacgcggagcccgcggccgggtcgcaccgcgccggggagcgggccaaggggccctcgccgcccggcgccaagaggcggcggctgtcggagagctcggcgctgaagcagccagccaccccgacggcagccgagagcagtgagggcgagggcgaggagggcgacgacggcggcgagaccgagagccgcgagagctacgacgcgccgcccacacccagcggcgcccgccttatccccgacttcccggtggcccgctccagcagccccgggaggaaggggtcggggaagaggccggcggccgccgccgcggcggggagcgcgtctccgcgcagctgggacgaggcggaggcgcaggaggaggaggaggccgtgggcgacggcgatggcgacggggacgcggacgcggacggcgaggacgacccggggcactgggacgcggacgctgccgaagccgccaccgccttcggggccagcggcgggggccgcccgcacccccgggcgctggctgccgaggagatccgacagatgctacagggcaagccgctggccgacacgatgcgtcctgacacgctgcaggattacttcgggcagagcaaggccgtgggccaggataccctgctgcgctcgctcctggagaccaacgaaatcccctcgcttatcctgtgggggccgccgggctgcggcaagaccactctggctcacatcatagccagcaacagcaagaaacatagcataaggtttgtgacattatctgcaacaaatgccaagacaaatgatgtgcgagatgtcataaaacaagctcaaaatgaaaagagctttttcaaaaggaaaaccatcctttttattgatgagattcatcggttcaataaatctcagcaggacactttccttcctcacgtggaatgtgggacgatcactctgattggggcaaccactgaaaacccttccttccaggtcaacgctgctcttctgagccgctgtcgagtgattgttcttgagaagcttccagtagaggcaatggtgactattttaatgcgagcgatcaactccctgggaatccacgtcctagactctagccgtcccactgaccctctgagccacagcagcaacagcagctcagagcccgccatgttcatagaggataaagcagtagacaccctggcttacctcagtgacggtgacgcccgagctgggttgaacggactgcagctggcggtgctggctaggttaagctctaggaagatgttctgtaagaagagtgggcaatcctattctcccagtagagttctgatcacagagaatgacgtgaaggagggcctacagcgatcccacattttatatgaccgggcaggtgaggagcattacaactgcatctccgccctgcacaagtccatgcggggctcagaccagaacgcctccctctactggctggctcgcatgctcgagggaggagaggacccactctacgtggcacggaggcttgtcaggtttgccagcgcctacaacaacgtcaaagcctgcctgaggaaccaccaggggccactgccccccgtgcccctgcacctgaggaacgcgcccactaggctgatgaaggatttgggctatggcaaaggctacaagtacaaccccatgtacagcgagcccgtggatcaggagtacctgcctgaagagttgaggggggtagatttcttcaagcagaggaggtgctgactcctcagggcacgacagcagaaggatgttgcttttttaagggagggccagaaagaaagttagtggattgcaaagttggttgcctggtggaagttagaacagaccaacattttgtgccagaaatttaagagttccataggtggaggcgcagttctttcgaataaatgtgtaactttgaaattgtgttcatttgcactcggtgcagcggttatgcttatgaaaatacctggcagctttgtgcaatgaattaatgttataaggaattatctattttgtcatagtatttaagtcataatgtcatttcagaattcagttctgtaggattttcttttctttaaaaaatgtatattctgggtagttttaattggtaaaaaaatgtaattgtgatttaatactgcatagtgttttgggtattttttttatatgcaaaggtcttacgagccaataaaactatttcaaagt

SEQ ID NO: 362 - DNA, 1989 bp, Homo sapiens
attttttaagaccaaaggcttaatgtatccacatctggggtaggagtcagatgtaaaacaagcccaacattgccttggaagttctataggctccctcccaggatccttgatctgatctgtcagcctttaccactgagcacggaagcaccaggagacatcaggatcaagaaattacttggttccattgccatggagaccaggtgatgcacacatgcaaattcagtggccgtgcagaagtttcaagatcagggcgagggaaaagacagacagtaaatgacactgcagaggcaacactaacaagcaaggttctgcaggggctgaacatcatattcatcaaactttggagtttgccctcagagatccccctcctggagcaggggaattcctgatctatcgacttctgtgtcaatattcagaactacagtcaggaggaccggcttgttttcccttcttctccatactcaagatgacactataatgagagagttggctgcaaaatcccttacaagagatgatggtcatcacagtcagagatatgtcaaagcacaggcagtgcagcctgggtggaaatgtggtttggaaattcagaaggagtttaccactttgataacagatgcattgtgtcatttcttctggtggtcattttgacatcgaagcattaaccttggattttgctatttctttctaattttaactcccttctatttggccttattattaatcctgagaaggcttttttttctttttcaaaaaacacaaatatttggtattgatcttaccagggagaacagaagagtatggccatgttacctgagaggagttagtgctattgcagcatagggtggaacaattgaggcttcatttgtgcagggagaggattcagtcttcttcaaagctgatctctctgtgtgtgtgtgtgtgtgtgtgtgtgtgtgtgtgtgtgtggtgtgtttgtgtgtatctgcctaaaagctaacaccaggatctcattttatctgtaattgaaacgtgaactaatggattaatattattagtctgtcacctatagacaaaaagagagtcttcggtgatcagaaatcaacttaatatactctaagtacttttaacatcttacaccatttaaaccacacagacacacgcatggggtgagtgtaaaaacaaatagacacatcatagaagacaattagcaattttgtcagaagtcttaaaatatatttccactatgcattcatatttcacttctaaaaatatatcctaaggaaataatttcaatgctgcagttaactattgcttctgcctgccctggaaaggttgttccttctgctactggcacccaaattccctttgggaatgtctctcttgcccactctccatccatgtgtttaggtggggccaatgccttcctctgctcagagagcagccccagtgtcaggtctaagaaattagtgaatttcatcgttttgcattgtaatctgttcaaagctgagaataaggatcagttaaattttaagccagggatgtcccagaacgttaatagaactgtggaaataaggtctctttttaattacatgtattgctggaaggatatgagcttggaaaggtagggtaccaccacacggagagaacctagctaaaaatgtatctgtcacagaaaatagtagggctgagcacgtgaacctaggatggactccaggcctctctcaccgtcaactagaatcttggcttgaggaagacagactttctatgtgcaatgctgtgtctctgctaccaagaatgtcacttgggagatgctcataaatgtctgtgggataaagactttggggaacaaaatcctgatgaggccccttgagtacctcaacgaagccatttctgaagccaatgtactcctttccagttatgacagttaacatattcttgtgtgggtgtgtgtttgttttctagcttaagccagcttgaattgggttcataacaaataaacatttcaaatac

SEQ ID NO: 363 - DNA, 2948 bp, Homo sapiens
aggcaaccgtcgtgccgcgtcttcctgaggtagctcctgtcagcccactgatcccaccacccgctccctactgccccgcggtcttcgcgtgagctcggagactgagggacaacaaaaatggcggaggggagccagtcggcgcctgaggcaggcaatgatatgggaaatgatgatgccattggagggaatgtgagcaaatatatagtgcttccaactggctattgtggacagcccaagaaaggacatcttatctttgatgcttgctttgaaagtggtaacctgggccgggtggaccaggtctctgagtttgagtatgatctgttcattaggccggacacctgtaatccacgcttccgagtctggttcaactttactgttgaaaatgtgaaagaatcacagagggtcattttcaacattgttaacttcagtaaaaccaagagtctctatagagatgggatggcccctatggtgaaatctaccagcagaccaaaatggcaaaggctgccacccaaaaatgtttactactaccgctgcccggaccacaggaagaactatgtgatgtcctttgccttttgttttgaccgagaagaagatatttaccagtttgcttactgctacccatatacatacactcgcttccaacattaccttgacagcctgcaaaagagaaacatggattacttctttcgggagcagctgggccagagtgtgcaacaacgaaagcttgacctcctgacgataaccagccctgacaatctccgggaaggggcagagcagaaggtggtattcatcacaggacgagtccacccaggggaaacaccctcatcatttgtgtgccaagggatcattgacttccttgtaagccagcaccctattgcctgtgtcctccgggaatacctggtcttcaagatcgcaccaatgctcaatcctgatggagtctacctgggcaattacaggtgttctctgatgggatttgatctgaatcgtcactggctggatccctctccatgggtccatcctaccctgcatggagtgaaacaactcatcgtccagatgtacaacgacccaaaaacaagcctggagttttatattgacatccatgcccactccaccatgatgaatggcttcatgtatggcaacatctttgaggatgaggaacggttccagaggcaggccatttttcccaagctcctctgccagaatgctgaggacttctcctattccagcacatcctttaaccgggacgctgtgaaagcaggaactggccgtcgcttcctcggtggactcctggaccacacttcctattgctacaccctagaggtctccttctacagctacatcatcagtggcaccacggctgctgtgccctacactgaagaagcctatatgaagctggggcggaatgtggcaagaacctttttggactattatcggctgaaccccgtggttgaaaaggtggcaattcccatgccgagactgcgaaataaagaaatagaagtccagagaaggaaagaaaaatcccctccttacaagcacccactcctgcggggcccagccagcaactaccccaacagcaaaggggacaagaagagctcagtgaaccacaaggacccttcaaccccttttttaaagacacggagtcctgggaggtcttatggggacaggagcatgcattttctgctggggaatgaaattaatcactcttctctagcttccaaggatttgtggattaatgcataggctagtgaaagggaagggatacaatgagaaacttcatcactgattttccctttttccaatggaaaatcaattgtaagccttcagctcaaaaagctcaggaacaaaataggagatcggaaccaggtgagcacagatgctattttctacaacatagagatcttccaagatgaggaaaacctacacatcccttttaagagatttgacacatatcaggtcagttctttcaaagccactttacatttttaagttttatagttactgcagatggttaccttttaaataggcttggttgtttacagctttagaaatgcagtgtttgtattttctgatccaaaacaacagcaacaacacatgcaaccaaagggcaaatgcatcctagggaacaatgggacagaatttttgaaatcaacggtggacttaaatatatggtcactgtatctaagctgcatgcttgctgattccctcaaaccccagcatgcagatttagaaaactgttttgagagctgtttcccaatttcctcggtagtttaattaaaattttagctctaaagacaaaaagcactggtcactcattttaaaaggtttattatggttaaggtctccagatcccaggtgacagggattaagcctggcccctgaagatgtaggcattgctaatctgcaatgaggaaagggtgattgccaggcaaggaagatgcaaaagacagaaggatgcaccctgaggcagggaggaatgataaaataaaacagtagtagcaattcccaaggtgtggcaagctaaatattggcatttttgtgaagagtaaagtgcctttgtatgatgaatgggtccaggggggtctgctcccttcctgtctgtggaaacagcaggctgagtcaccatgacagcctgctaattaaaatgacctcccggaaatgaggattagaacacagggagaggaagggaggctccagggaggaaaatcccttagcacagagctccactaaagcattttttgtttgtttgtttgtttgtttgtttgtttgggttggagattattgaagtttgctacaaaaatcaaaaagaaaacttgttctcctttgcatgctagttttcagaaatgatgacaaagagccatatgttgattggctacaaatgtcatgttgtatatacagcttctcccctgggttcgttttgcccagaggaacacaaataaagtgttttgtgc

SEQ ID NO: 364 - DNA, 2688 bp, Homo sapiens
atccaaacccctcatgagggaaatcctctttcatctgcatcaagggactcattagggacctcaagctaagtgtgatgcagtcctcggggtctacagatgtataggaatttacattttggcaagacaagttacagatagttgcctagtatgtaagaagactaataagcagatcctcagaaaaccacctgttggagggagaaatccaggattaaggctgttccaaattgtccaaattgattatgccgaaatgcccccaattggtcacttaaaatatttattagtgatagatcaccttactcattgggtagaagctattcccttttcaagtgcaactgctagtaatgtactcaaggcattagttgaaaatattatacccaggtttggattaatagaaaatgctgattcagacaacaggactcatttcactgcacatgttcttaagaaactagcccaagtactagatataacatgggactaccataacccctggcacccaccttcatcaggaagagtagaaagaatgaatcagactctgaaaaaccacctaaccaaattagtcctagagactcggttgccatggactaaatgcctccccatggtcttgtgaagattccaaactgcccctaggaaagatgtcggctcacctccttatgaaatgctgtatgagttgccttatctacactccactgctgacattcctcgttcgaaacaaaagatctgtttctcaagaactatatacttggtctatcctccactttctctttccttaggactaaaggcctcttggcacatacaccaccccttgaatttccagttcaccaccaccagcccggacagtgaccacattctcatcaaaggtcagaaagaaaggaagctcaagcccacctgggagggacattatctagtgtttctaatgactgagacagccgtccacaccactgaaaaagaatggactcaccatacctgagtcaaaagagcaccacccactccagaatcatggacagctatttcagggccaattccaaccaagttaaagctaaaacgggtttgatcctcttatgctatatttcttttccccttctattgctagtcctctcgttattaacgtaactaggtcgagctcaccccaaactattacctttgatgcttgccttgttatatcctgtggagctctccaaagtcaaaagcaactctcagcctcagagaagtatctccgtccctttcagacaaaagcctcccccattacgactcttgttccttaagaaatgtagggaaacaggcctgccacagctggaatgatattatgtggacaactgaacatcagggctttgtcaacaggcagttgtaagtctctaaaaccatgtttgctttgttaaaggaaacattccccaccccctgactgccagtataaccaatgtaatccagtgcaaatttctattcttatccccacttctgccaaccctaaacctactttaagtcgcttatacggcataggggccaaaatagcagggacacatcttatagaatcctttgaaatgcatttcattactttctcacctcctccacctccttctacactctctctcaacgaaaccgctgttcttccttcaaccaaggataaaatcaaggtaagccattgtagaagttaaaaatttgaaacaaaccatagcaactgagacagggtaccaagatgcaaatgcttggttagaatggattaaatattctgtccgcactctaaacaaaagcaactgttacacttgtgcgcacagtaggccagaggcccaggttgtcccctttccactcggatggtcttccagccaactgggcatgagctgtatggtagctcttctccaagaccccacagcctggggtaatgaatcttgccaagctctctctctgctattccctaaagtccaacaccctgcaggtcagtccctgagggccatccagcctccatctattgacaccaatttttacctcgggtctctcacaacaaggggaaaacttggcatttcatgaagacctaaagggatgcggtgaacttaaactctcccaagagcttaccagtcagtctgcccttgttcatcctcgagcatacgtatggtggtattgtggtggacccttactggacactctgccaagtaactggagtggtacttgtgctctagtccaactggccatccctttcaccctagcattccattaacataatagaagagaaaatcagaagagaagaagtgaccttcatgggtcctttgactcccacgtttataaagatgctactggagttccacgaggggtaccagataaatttaaggcccgaaatcaaacagcttcaggatttgaatctgtgctgttttggtggtcaactgtaaataaaaatgtagatcggataaactacatttattacaaccaacaaaggtttgttaactacacaagacatgccattaagggaacagcctcccaattaggtcccattaactaaatagtctgggaaaacaggatagccctagatacgatgctagcagaaaaaggtggtgtctgtgtcatgattggagtccaatgatgtacttttattcctaataacacagcccctgacggaacagtaacaaaagctttgcaggacctaacctccttatccaatgagttagcaagcaattctggaataaatgatccctttacaagttt

SEQ ID NO: 365 - DNA, 2213 bp, Homo sapiens
ggtgccgcaccggccgcgggcgcagggagtattatgggctgtgggtgccgctgagcaagatggagctgtctgcagtgggcgagcgggtcttcgcggccgaatccatcatcaaacggcggatccgaaagggacgcatcgagtacctggtgaaatggaaggggtgggcgatcaagtacagcacttgggagcccgaggagaacatcctggactcgcggctcattgcagccttcgaacaaaaggagagggagcgtgagctgtatgggcccaagaagaggggacccaaacccaaaactttcctcctgaaggtaacctggcccagccccagcagcatccccctctcgggcccccagccccggcacagcacggggcctggaagggagggacagatacgcggccgcccaagcgggccggccttttcagaggggccccagctgggcagggggtggttgtgagcccccccagaagcccctgatggcaagcctcagccagcatcagcttcaacaagagggttttgggactggggataatcctccctgttgaaaccaggggctggggatgcctttagggctccaggaaagggggtggctgaggcaggtgggggatgcccatgggaagggggcatttgtttgagctgttatgactgtgctgggagttggaacccagggggagagtgagtggggtcccacctcctggcagggcacaaggagaggatttgggggaccacctgcctccctgcccccagcttcccccgttcagtctttcaggatttgttcttcatggctcccctcctttcttggggatccaacttgaatttgacctcaaatcattttactttgaatttatcacccaggctgggccactaactttagggctctgagcctcagtttccccccactcccggccatttctgggggatggggatgtgggagtgagagcatagcatattagtctctgctagggagggaagaacttccagaggaagccatcttggaggatttgggtttttattttattttgacaaggaaaaacagagtctgggaaaggaagggcaagatggccctaggtggcaggcacggctgcaggtgggactcagtgggccccctgccttcctgtagtgctacggatgcctcagggccccctcccacccgacagccggtgactttgtgggaggactctttttcggagaagagaagcagaagtgaaagaaatgttggtttccagaatttcatatttttataacccccaccctcaagcgacgcacatcctaggggatccagggagtaaccttaaccctgatgcttctcttggggagggatgggcggagcagctggaaggctgttgggctgtgtgacagcctctcagtgcagctggggcaccctctagcggcgaagcgagtatgaccatgagcattgatacacagaacgcctttttttcttgatagttcttttggttcctgagctggctgtgggcctaatacagggctgagcccccacatggattatctcctttaattctttcaacagttccaagaagtaaggagtattatccccatttcacagataaaaaatcaaggcccaggaagggaaagtgacttacccgaggtccagcttcctggcttcatcctgtctccttttcttcatcttgtgccttgagtagtccatgtcaggttaaagggggaaggcagacacacacaggaaactatgaaggctgcagagttggcgtggcaggggatagagacacagatagtaggacttttttatctggaccctaagaaacaggtagcctgagagtgatgtggatgtttgtgaggggctatggagattagcttgggctgaacacattgttctggggctccctgagaggcagtatggcagagtcagcaaattacactcagcgctttctgccaggaactactctgaagcaaacaggagcccatgagatagcttccatcctccctgtttcacgcatggggaaacagggccagaggtgtccagtaacttgcccacagacatggggagaggccatggtagagttcaggtgcttaaaccttcacaccatctacggtgcttgccaagcccacagagctatgcctgtcacctggtcagggtgcaataagcatgttggctacagttatttttaattcatcaggcagacccaggtcccactttcaaagagttctccatgtggggaggaagaggaagggtaaacccttt

SEQ ID NO: 366 - DNA, 2133 bp, Homo sapiens
ggctttcctggcaggcctggcgggggggccaggttgccatgacgaccgcggctaggtcgcggcagactcgagccatgggcagcaggaagaaggaaattgccctgcaggctggagtgcagcggcatgatctcatctcagtgcaacctccacctctcacgttcaagcggttctcatgtctcagcctcccgagtagctggtaaaacaggtcaacatcagcacccaagagctttgggaggaaatgctcagttccaaaggactaactgttgttgatgtctatcaaggctggtgtggcccctgcaaacctgtggtgagcctcttccagaagatgaggatcgaggtcggcctggaccttctgcactttgcattagcagaggcagatcgtcttgatgtcctcgaaaagtacagagggaagtgcgagccaacctttctgttttatgcaattaaagatgaggctctttctgatgaagatgaatgtgtttcccatggaaagaataatggtgaagatgaggacatggtttcatcagagaggacctgtaccttggccatcattaaaccagatgcagtggcccatggaaagactgatgagattatcatgaagattcaggaagctgggtttgaaattctaacaaatgaagagagaaccatgacagaggcagaagtgcgacttttctaccaacacaaagctggagaggaggcatttgagaagctggtacatcacatgtgcagtggaccaagccacctcctgatcctcaccaggactgagggcttcgaggacgtggtcactacctggcgaaccgtcatgggcccccgtgaccccaatgtggccaggagggagcagccagaaagtctccgagctcagtacggcacagaaatgcccttcaatgccgtccatggaagccgggacagagaagatgctgacagagaactggcattgctcttccccagtttgaaattttcagacaaagatacagaagcccctcagggtgagtccagtacacagccaaggttgaagatcactgacctagactaaaatgagaggattcagaagtctgaccttagaacatgagagagtggaaaacctcaggatgtttcagccaaacaagaagagaagaaaatattgttgaaattaacaatgatcagggaaaatatcatctattaagaacagggaaccacattttagctgtagattaggaatggtaatttttatctggtgttttagtttccaaaacatttacatattgatctactcctcgccctagaccaaacctaattccattcttactgatatgcacaatcactctctgtcctcattgtcacctctagcccctaaattcctccctttctcagtctacctactctttgtgactccctcatatcttttccccctggcatggatgtcctgctcagacactccacttagaagacagtttccctttttcactgtcctcccaccattcattactcctcctccagataccaactgctgatgttgctctagaaaaaccaccaaacatgactgttctttccgtgtaagctatcccacctcagcggcaccctcactgctggtgaccagccttgtaaccccctggagatgcccatgttccttatggtagctacctcttacttcaaattcttctgcctccctcatgctcgcagccactctgtgcccacctcatcttcgtagggaccttgattttggggacacacattgcaacttcccacttctgacgaaaggtctccatgcttttgctgttttctttactcttgtcaaggttgggtacttcaagctcaaagcctatctaccttgatccaaaaactacctttccataatgttctcacatctttactctgtcctacctctcattttcaatcctgtttaaaagacgtttaagtgtccaaactttaacctcttgaagctagtcctctccccactttccatctttaaatgggcatatatacaataaaggctctgtccatctccatctcttatatataacaatactgtgacttaaaaaccaactcagtattggaaattttctaaagttctgtcctagagttctttcctgacctctagctccatacttctgattgcctaataaatatgacatggatgttcagtggaacttcccatct

SEQ ID NO: 367 - DNA, 1890 bp, Homo sapiens
tgggcactgtatcaccctgttcctagataccgatttactggtggccatttaaatagaatttttttctatctaattcatttatacttccagagttcgaaattacatttcacctgcaataaatgagataacacttgtaaattatatggcactctgcctaacacacgttaataactcaatacatgttagcaataaacttttagtatagtagtcaaagtattaatttctcacattgcaatttccttcaaagacatgaatacaacctttctaatgactccttgttcatcaagatacctcttcaaattattctatttgtttcattcagtatattatctgtgtataccgatattacactcttttctttttttgagatggaatctcattctgttactgatgctggggtgaggtggcatgatctcggttcactgcaacctccacctcccaggttcaggcgattctcctgtctcggccccgcgagtggctaggactacaggtgcacaccaccatgcctggctaatttttgtgtttttagtacagccagagtccatgcctggctggactcgagctcctgacctcaggtgatccgcccaccatggcctcccaaagtgctgggattacaggcataagccaccgcacccagcctgatattgcactcttggattttgaacactgaatatctttttgaaagattacacctctttacctctttgtgcttcagaaattattttccttcaagtgttctaagagtctaatgaagaatgaagtcatgttttatcacttttgtccttaaagatttcagacatgctgaaactgattgaagtatcatttgctaccagatagattaattatctctagttgtaggagtggatacatctttaatggtatattttgggttattgtcttatttttgatgcagtattctataaataatttattaaacctggcatccttgggtgagcatagatttttcaactttggtgttatattgtgtttgcttttaaaaactgcttttgaggccaggtatggtggctcttgcccatacccagcactttgggaggccaaggtgggcggattacctcaggtcaggagttcgagaccagcctggtcaacatggcaaaaccatgtctctgctggaaacacagaattagccaggcatggtggtgcatgcttgtggttctggccgctcgagaggctggggcaggggaatcacctgagcctgggaggcaaaggttgctaggttgctgtgagccaaattcgcaccattgcactccagcctgggtgaaaagagcaaaactcatctcaaaaaaaaaaaaaaaaacccaccaaaaactgcttttgaatggagttgtacatacaatttttatgaaaaaaattatcaagtgcataagttcataatggaaaaaccaataatactccaggcacaagttagtactaaaaaaattatgttgaatattctctaatacaacatgctttttcccttcatgaacaatttgtgttttactgagaagagtcattgtttatggtagacattagactacagatgaatatgtactttaaacactcttagttgctttcttaattttatatctgctgctttatgcttctgtttattttcattctttccaatgtccacattctagtaaatttgaatattttaatccgtttatatactatttaatattgcttgtatagtttagtattgttaagactcaaaaaggtttacagaaagaagaaaaagatcaacatgttattaatcatttaaagatcattttaaaatctttgacctttatattttaatgaataaaatgttagtagttattagtataaaataatttatgtcttttggacttagcatccagtattttttaataaagaaaataattattctcttgc

SEQ ID NO: 368 - DNA, 2861 bp, Homo sapiens
tcctaaactacttcagcaggctcttacaaaagctgtcagaaaggcctcctaactcctttcttagtcattgatggacctcagctccatcttctggaaccttctgtggctgcccatcatcatgggatgatgcaaaccccttaacatggcatccagggtcctttataagctgacttgtcgcacctccccgacccatcttcctccactcactctgctgtccacgctccagcgagagaaatgcccgcagctccctcatggcgccgggactcctgctccagagccccacacccaggccttctgccagcagtgttcttcctccttcaggctcacaggcaaggtgggactcggatttctcactcagcagcggtggtcctgcctcctcttctgtgctcccactgcacgctctacgtagctcaggacaggttgtttttagtgagtcctacctgagtctctggctgaaaagagttctgtcggggcagggaccttacctgctccaaggccagagaggacctgctaaacggggccaaacagaatcacagatgagcgggagagagccaggcatggggtcagaaagactaagtttacgttccggttcacttactctgcctgtgctgggtactcctccgagcgtcctttttctcaccagtagacctgtgatatcctctgcagctgctttctgtgacctgcttactctgtggcaggcccctgatatgctttgtcccaaccaattctcacagtgcttctgagttacacaccggtgtcctgcttcacagttgagaaggtgagaggcacagagaggtcaaatagtttacctgagatcacacagccaacaagtggcagggccagagcttgcaattgggtctgaccacacagcctgagcttctaactaccgtggtctgctgagaacgggaggggatgagacagatcaaaagtcctttactatccccagctcttgttttgggatcttgggtgactcgtatttaatcacgtgtggtaggcagcaggtggcagtggaaattacaagatgactcctgagtggtctcagccccagcaggggcttttatctgtggcgtgagcgtgggaagtcattttctgacaatggctggactgaaacatccgaaacacaggccttgtgccagtgctgaaaagggtactttccagaaccgacagaccttagcccgtgtcttggctcccagtggagggactctgggcccggtcactgctgtcgccctggaaccacaacttttcccctctgtgcgttggaatcttggtgctgatcagggagctgtgccgcacactctgtaaagcgtggtggggcgccaagacctctgcctctacaggtcacaggcgtggctctgggtccaaaccttggccctgctgtggatccccgtgtgacctttgacaaggcacactttctctcctacataaactgggaattgaaaccactcagagggtaacttgaggattaaagagcagacgtcatgtagcatctggcacatgggggaacgcaatggaagtcctctttcttctgggccacctcagctcaggcgtcgtcacaaggctttgtggctcctttcttacggtatccccactttgcttttttccccttcagcaagagaattaaaggacattgaccaaattcctaagtggaaaatcccaggaacaccctgtctccaacccccaaccctatcctcattttctaccctgatccctttctcccttgccagagaatatttcacatgcatgtagcaaaaacaccaggggtcttgagaggtcatagcctgaaaaggaagtagagagagaagcagaggaagtgacacttaacgtgaatgaccgtttttcatggactctgcttccccatttcttgagaccctgatgatttctgctttttctcccaaagtcttctcaagtcttaggattgcagcaacacgctcggctgcccaaacccaaggcgaagaccttgccagagttcatcaaggatggctccagtacgtacagcaagattcctgcccacaggaagggccacaggcccgctaagccccaaaggcaggatctagatgatgatgaacatgattatgaagaaatacttgagcaatttcagaaaaccatctaagtgctggaggaaccacgcttcctaactgctgcttctcagggaatccgacaccagccaaccattttaagcctctaaaagacctcgggcaagtctcacagaaactgagctgcagacggggagtagctttgtggaaactgatttgatggacactgcaccagcttccttcaggttctagattcttgctacttagggcgggctggtttggacctaacatctcgcacgtgactccctcagcctcagagccttgggatgcagagcagctggcagggttcctctcaatcctgcaaccccagctgtcccaccggtggatgcagaggggaatccgaggccatcaaccttggtgacagcagcgcagtgccaatgctgatcacactgcatgggagattttgttaacgtctgccacccccactctcacccccaagctctaagcccccgggaggcctggactgtcttcctcatctctgtagcaccaagcctgatagatctgtatatggtaaacaggggtttaaccacatgtggttaacatggattaatgtgggaacttggcttcaagaacacaaccttaggaccttgggccccaaaagctggtggtgaaatgaggaggagccaatttaagaagacccttatggagacctgaggctgcagaaactggtaggtttcatcaggtggttaaagtcgtcaaagttgtaagtgactaaccaagattatttcattttaaaaccatagaataaaaatgacacctgagcttctc

SEQ ID NO: 369 - DNA, 1966 bp, Homo sapiens
aatgcagagagctgaggctagagaggcagccaggggccgatcgtgaagatgctgtgtgtgggtgtgtggttggaaggagtttggacttgatcctatcagtcagtgcttttcaagctgatttttaagctgtgaagcccatgattgatatgaagttagcatgtaaaacagatgaaaatgatagaatggaggtgggagtgtgtgtcccagagccctctttttgagaccattcaccattttccaaggagctgtaggtgttggaaaccaatgaatcttgtagccgggagttagaagaccatatctgcctcttgattgaattgttctactagcagcatgaagggggacagatgatttctgctgaagattgtgagtttattcagaggtttgaaatgaaacgaagccctgaagagaagcaagagatgcttcaaactgaaggcagccagtgtgctaaaacatttataaatctgatgactcatatctgcaaagaacagaccgttcagtatatactaactatggtggatgatatgctgcaggaaaatcatcagcgtgttagcattttctttgactatgcaagatgtagcaagaacactgcgtggccctactttctgccaatgttgaatcgccaggatcccttcactgttcatatggcagcaagaattattgccaagttagcagcttggggaaaagaactgatggaaggcagtgacttaaattactatttcaattggataaaaactcagctgagttcacagaaactgcgtggtagcggtgttgctgttgaaacaggaacagtctcttcaagtgatagttcgcagtatgtgcagtgcgtggccgggtgtttgcagctgatgctccgggtcaatgagtaccgctttgcttgggtggaagcagatggggtaaattgcataatgggagtgttgagtaacaagtgtggctttcagctccagtatcaaatgattttttcaatatggctcctggcattcagtcctcaaatgtgtgaacacctgcggcgctataatatcattccagttctgttgatatccttcaggagtctgtcaaagagaaagtaacaagaatcatccttgcagcatttcgtaactttttagaaaaatcaactgaaagagaaactcgccaagaatatgccctggctatgattcagtgcaaagttctgaaacagttggagaacttggaacagcagaagtacgatgatgaagatatcagcgaagatatcaaatttcttttggaaaaacttggagagagtgtccaggaccttagttcatttgatgaatacagttcagaacttaaatctggaaggttggaatggagtcctgtgcacaaatctgagaaattttggagagagaatgctgtgaggttaaatgagaagaattatgaactcttgaaaatcttgacaaaacttttggaagtgtcagatgatccccaagtcttagctgttgctgctcacgatgttggagaatatgtgcggcattatccacgaggcaaacgggtcatcgagcagctcggtgggaagcagctggtcatgaaccacatgcatcatgaagaccagcaggtccgctataatgctctgctggccgtgcagaagctcatggtgcacaactgggaataccttggcaagcagctccagtccgagcagccccagaccgctgccgcccgaagctaagcctgcctctggccttcccctccgcctcaatgcagaaccagtagtgggagcactgtgtttagagttaagagtgaacactgtttgattttacttggaatttcctctgttatatagcttttcccaatgctaatttccaaacaacaacaacaaaataacatgtttgcctgttaagttgtataaaagtaggtgattctgtatttaaagaaaatattactgttacatatactgcttgcaatttctgtatttattgttctctggaaataaatatagttattaaaggattctcactcc

SEQ ID NO: 370 - DNA, 1931 bp, Homo sapiens
ctctgggcggctgggtgagggcccatctgggcaaggcccccagcgcctgccttctctcccggggccctgtgggcaagcctcctgcttcactttcaggtttctcgaagtgccttcttgctcctgtctgtttccccatcctgccagatttctgtttctcttgctgggcttttggcagtagggggctgtgttggtgggccctacgaagatgctcagtgctcgagatcgccgggaccggcaccctgaggagggggtagttgcagagctccagggcttcgcggtggacaaggccttcctcacctcccacaagggcatcctgctggaaaccgagctggtaacagctgcctcccaacctggtgcctccatctccctgacccccggctcctggccagccttatgccagcccccagctcacccttcagtagcctccttccccaagccctctggacacctctcctgcccgcagctgccccttcttcgtctcctactctgccttcttgctgcctctccacccggagacatttacagcaggtttcagttgcagcaggaaggactgcagttagacagggtgactttttgggacattgaggaagcttgagacatagggatgggacaggggcaatgacagcctctaacatggccacttctcagcacgtccaagaagtctaactatcaaaaagggcagacttcctgcaactgcactttatctgtggtctgctgcccagaaacatctcttctcaggaaaggatcttcccctggttacttagcaagaccacagtgtagagttaaggcctctgcacgtatgccaccctaggtcatcagagctaaaggggctcccagaaaccactgggcagcatctgccttctctcttggcatggaatcaaaggctctggtccttgtcagggggctttcaggcatctgggggtggggaaagcattatgaggcagggggctcctcttggtccctgtggagtcgggtctctgtgggcacaactccaggggctggcattcacactgtacctatgaattactgtgggatagtgctcctgggagccatatggcttggccagactgctggggttgctgggtgagcagagtgggaggccggaggctgcccttgaccggcaaatgccctgcaacggtggctcctgacaccaggggatagggagatgtgccagagtccttcctcccctccaaggacaggtagtaggtgccagcctaggggagcttccaaggaggggaaggcaaagccctggcccctgcctgtgtccccttcttggcatgttccacatgctcggtcctgcaggccctgaccctcatcatcttcatctgcttcacggcctccatctctgcctacatggccgcggcgctactggagttcttcatcacacttgccttcctcttcctctatgccacccagtactaccagcgcttcgaccgaattaactggccctgtctggacttcctgcgctgtgtcagtgccatcatcatcttcctggtggtctcctttgcagctgtgacctcccgggacggagctgccattgctgcttttgtttttggcatcatcctggtttccatctttgcctatgatgccttcaagatctaccggactgagatggcacccggggccagccagggggaccagcagtgactctggggctacctggctcctaggcccagccagccagagaggacagtggagcccagacacgtctccttgggattcactagcccccagcccgccaaaccccaccccagccctacacagcagtctggcctgagacgtcactggggacttatctgtggagcctggtgctccaggatgtggcttctcatgaagctctggccagaggaggggaacttattgggggagggggggtggaggggaggaatctggacctctaagtcattcccaaattaaaatattcaaattct

SEQ ID NO: 371 - DNA, 2029 bp, Homo sapiens
agagcgcggagagggaccaggcaggcgccggaggggacccgcgcggaaaaggaagaagcccaaacaaaaacgctgtccggcgccaggcgcccacctgcaagcccaagccggtgctcggccagttacaaaagaaatggtcaggatctggacaacgataatgatagtattaatcctcctattaagaatcggcccaaacaaaccctcgctgtcagggcgacaggcgcccgcccaagcccagacctcggacctggttccaagcctgttcccgctgggtctctgggcgcccggtttctgcacctggagctcgcccgatgaggacaagaggccgaggaagccggttccggggacgggcaacagggactcagggaccagaaggcggctgcaggacgcgaccgagcaggaccccaggcccgggaacgacgtcgcgagcgctgagactgccgggcctcccagcccatctggcattcgagcgcaggaccgggcgccccggcaccgccgcgcgccacccgctaggatgccggtggccccagcgccctcagccgacggagagccgctgcaggaacagggaggaggccttttccaccgcacccggagcgtttactacgggctggagctgaatacctggatgaaagtggagaggctgttcgtggagaagttccatcagtcgttttccttggacaattaacaagttaggcttccacagtgccagggcctggggatgctggacgtgggagagggttgtggtcgttagcctgggaaaatcattcttttaaacaatattcgccggaaaattagttttttcctaacatttctcaaacaaggcaattagggccgtcagaatcggtgctggaagacgaagtccccacagtgcaataatgaggttcccacggaaaatcagtacgttgtgttcgtaactgagataacagctagagaaggggctttgggctttttgagtctcccaatagtcagtctctctctctctctctctctctcttcctctgactttctggctttggacactcccaatggtatatttctttgtggtgtttttatatttggatataagagaggaacttcttgttggatttttaagggaacacacttcgttttgacccttccaataaggaaaggggagctacaggaacagagagctctttagaaggttacttttaaatggaggcccccccattcatggtacccactcccacttggacctctgagacctccagaattaggcatcattctaaaatctggacattagaagtcacagactttgtatataaccacatattcataatttatcttttcaatgttttttattcatagatgaaaatcttgcaggcatagttaagaaaaatataattcctagaaagtacaagggaaggattatgctctgcagatacatgactaacaaggatagctggccatgcccagggctggtgttggttgaggaggtggtgatggtgcggggcatgtgtgtgtgtgtgtgtgtgcgcgcttgaggagttgtggaagtgttcatatctgtaaagtattatttcatggatgcagaccttaatgctaggttgaataactttgttgccatagaagaagaaccgcacgtcaggcttttttcattagcaaaccagtaagcactcactttgggcctttgaaatcacttccatcacctaacaccagagatacaaactgaagctagcccttaagagcctccccctaagatttagagagaatgatttctcaaccagttttcatctttgaaagtgccatttctccctttatcattgtgatttttattcaaatgcatgagtctctgattttctaccatatacaaaagggtagagactacagtttcctatagaagaaacttcacatagtggccgaaggatcttatttctcaaaattcaggaactggtttcctctttctggaaattatgacattaacttgatttcatggtatctctttcatcttcctcaatgcctgtgctgtatgtatatttttattatatactgtaggtatatttttattacc

SEQ ID NO: 372 - DNA, 2127 bp, Homo sapiens
agtgtgttctcttgcctttaggagctgaaaatatgataacattgggcccagacatgcctgtgtggaggttagggtactcctggggtttttgcagctagctgtaaagcaagctagaacttgttcatctctgagttccttgtttttctttcaaccctttcagtgccctgcaggagtcattaaatcaaaacttcatgctgatcatcacccaccgagaagtccagcgggagtacaacctgaacttctcaggaagcagtactattcaagaggtaaagagaaatgtgtatgaccttacaagtatccccgttcgccaccaattatgggagggctggccaacttctgctacagacgactcaatgtgtcttgctgaatcagggctctcttatccctgccatcgacttacagtgggaagaagatcttcacctgcacagacccgggaacagtcggaagaacaaatcaccgatgttcatatggttagtgatagcgatggagatgactttgaagatgctacagaatttggggtggatgatggagaagtatttggcatggcgtcatctgccttgagaaaatctccaatgatgccagaaaacgcagaaaatgaaggagatgccttattacaatttacagcagagttttcttcaagatatggtgattgccatcctgtattttttattggctcattagaagctgcttttcaagaggccttctatgtgaaagcccgagatagaaagcttcttgctatctacctccaccatgatgaaagtgtgttaaccaacgtgttctgctcacaaatgctttgtgctgaatccattgtttcttatctgagtcaaaattttataacctgggcttgggatctgacaaaggactccaacagagcaagatttctcactatgtgcaatagacactttggcagtgttgtggcacaaaccattcggactcaaaaaacggatcagtttccgcttttcctgattattatgggaaagcgatcatctaatgaagtgttgaatgtgatacaagggaacacaacagtagatgagttaatgatgagactcatggctgcaatggagatcttcacagcccaacaacaggaagatataaaggacgaggatgaacgtgaagccagagaaaatgtgaagagagagcaagatgaggcctatcgcctttcacttgaggctgacagagcaaagagggaagctcacgagagagagatggcagaacagtttcgtttggagcagattcgcaaagaacaagaagaggaacgtgaggccatccggctgtccttagagcaagccctgcctcctgagccaaaggaagaaaatgctgagcctgtgagcaaactgcggatccggacccccagtggcgagttcttggagcggcgtttcctggccagcaacaagctccagattgtctttgattttgtagcttccaaaggatttccatgggatgagtacaagttactgagcacctttcctaggagagacattccaggactttccaggatggggaaacatgcctgttctcgttctttgtatattcattttatgttctttattctcattctgaagacttggatcatctcctgtttttagactaagacggttttttcctccccattccattcttaatagaatcccctctgggccttccccacttatattgtcatttaatagtatagtgaccaaagccaccatcaaggataccactgcaaggagaaggttacagcttttgtttggtgcccagggtgtccccgacagtgtgccaagtttgagaccattttaacattataataccttagagctggtgtcttcactaaacagtccatctaaaggcataggctaggaatgaagaatccagatttgccatgaatgctgaataaacttgggtaactcaactggacccaaataaatcattattggaggtaaagttgttccctcaagaaacccttttccttgaagcaaaagagtaaacacggcccagcggtggaaccagccattccttgacaagccagcagcctgcgtcaggagaagggctcctcgccaacccacccacacgctcgtctcactcaattcaatgtcacacttctgcctcttgcaaaattgctggaaaaagtaataataaatatagctactt

SEQ ID NO: 373 - DNA, 2333 bp, Homo sapiens
agtccactgctgggcctggaacacggagcagtggctgccctgcgaggaggtcctagagcagctccagcaggatggcggctccagcgtctctaaggcctgcagggggtccagccccatggggggcgccctaggcctccgacagctccccatctgtgctcctgcctgccggccatcctcaggccactcgccatgggcggctgcttctccaaacccaaaccaggcgctgccttgcccacagtggagctcaagatcgaggtggtgctgcctgagaaggagcgaggcaaggaggagctgtcggccagtgggaagggcagcccccgggcctaccagggcaatggcacggcccgccacttccacacggaggagcgcctgtccacccctcacccctaccccagccctcaggattgcgtggaggctgctgtctgccacgtcaaggacctcgagaatggccagatgcgggaagtggagctgggctgggggaaggtgttgctggtgaaggacaatggggagttccacgccctgggccataagtgtccgcactacggcgcacccctggtgaaaggcgttctgtcccgtggtcgggtgcgctgcccctggcacggcgcctgcttcaacatcagcactggggacctggaggacttccctggcctggacagtctacacaagttccaggtgaagattgagaaggagaaggtgtacgcccgggccagcaagcaggccctacagctgcagcgaaggaccaaggtgatggccaagtgtatctctccaagtgctgggtacagcagtagcaccaatgtgctcattgtgggtgcaggtgcagctggcctggtgtgtgcagagacactgcggcaggagggcttctccgaccggatcgtcctgtgcacgctagaccggcaccttccctacgaccgtcccaagctcagcaagtccctggacacacagcctgagcagctggccctgaggcccaaggagtttttccgagcctatggcatcgaggtgctcaccgaggctcaggtggtcacagtggacgtgagaactaagaaggtcgtgttcaaggatggcttcaagctggagtacagcaagctgctgctggcaccagggagcagccccaagactctgagctgcaaaggcaaagaagtggagaacgtgttcactatccggacgccagaggatgccaatcgcgtagtgaggctggcccgaggccgcaacgtggtcgtcgtgggagccggcttcctggggatggaggtggccgcttacctgacggagaaggcccactctgtgtctgtggtggagctggaggagacgcccttcaggaggttcctgggggagcgcgtgggtcgtgccctcatgaagatgtttgagaacaaccgggtgaagttctacatgcagacggaggtgtctgagctgcggggccaggagggaaagctgaaggaggttgtgctgaagagcagcaaggtcgtgcgggctgacgtctgcgtggtgggcattggtgcagtgcccgccacaggcttcctgaggcaaagcggcatcggtttggattcccgaggcttcatccctgtcaacaagatgatgcagaccaatgtcccaggcgtgtttgcagctggcgatgctgtcaccttcccccttgcctggaggaacaaccgcaaagtgaacattccacattggcagatggctcatgctcaggggcgcgtggcagcccagaacatgttggcgcaggaggcggagatgagcactgtgccctacctctggaccgccatgtttggcaagagcctgcgctacgcgggctacggagaaggcttcgacgacgtcatcatccagggggatctggaggagctgaagtttgtggctttttacactaaaggcgacgaggtgatcgccgtggccagcatgaactacgatcccattgtgtccaaggtcgctgaggtgctggcctcaggccgtgccatccggaagcgggaggtggagactggcgacatgtcctggcttacggggaaaggatcctgagctcacatgcagtagacttgggcaggcaaagggggcaccaagggcacaggccaagccttgggggcaggtgccaatctccagtcccaggatcccccagggcagaacctgagccctcccagtgcttgccttcagccacctggctcccctcctgggaggcctctgctggatccagaagatgctcaaccctcaaggcctctgctgccactgacagctggcactggaggcaggacaagccctgcctcttctccctctattgggactggtcccctgaagaaccctgcaacatgttagacattaccgtaaaattaaaacgcacaaatttgcagatc

SEQ ID NO: 374 - DNA, 2152 bp, Homo sapiens
attttgcagttactgggagggggcttgctgtggccccatctgggagagttgagccctggtccagccccgcgcaggaagggaggctgtaaccgtgccagcctgctgcagctgcagtgatgttttcctgtatgagacaaacaaagtcgcccggatccaaagcatcaattatggcaccattaagttcttccacgtgatcgtcttttcctatgttagagagggaaaacgagtcacacggaagcaagtcatgcagccgagctaggattggaacggaagtggcctgcagagcctgcctcccaccccactgtgctatgcctcccattgatgctttcctgtgcctgccatttagctttgctctggtgagtggcaagctgtaccagtggaaagagcctgtcatcagttctgtgcacagcaaggtgaaaaggacagcagaagtgaaagaggagatcgtggagaaagaaatgaagaagttggtgcacagtgtctttaacatggcagattacaccttccctttgcaggtgaacacctggtagtgttaacggaccccaacacttacccaaaggtagccattgggtcaggtttctgcactatagtcccttctgtggttgccagaaatacgttacaggaaaagggtcccgatccagaccccaagagggggttcttggatctagcgcaagaaagaattagggcaagtccacagtgcaaagtgaaagcaagtttattaataaagtagtggaataaaagaatggctactccatagacagagtagcccccgagggctgctggttaggcatttttatgattatttcttgatgatacgctaaacgaggggtggattattcatgcctcccccttttagaccatatagggtaacttcctgacattaccatggcatttgtaaactgtcatggcgctgctgggagtgtagcagtgaggacgaccagaggtcactcttgtcaccattttggttttggtggtttatagcaggctcctttactgcaacctgttttatcagcaaggtctttatgacctgtattttgtgctgacctcctatatcatcctgtgacttagaatgccttaaccgtctgggaattcagcccagtaggtttcagcctcattttacccagctcctatttaagatggagttgctctggttcacacgcctctgacatttgtattgcacatccattgtgaggtgaatgatactaatcccactacaaatcaaaccttcaggaggtgaggcaatgtgtgaggtggtaaagcctccagattcaaaactatgcttgggtcaaattctagctctgccactttgtgtgtgcagtgttgggccaaacacttagctcaattccctcatgtattcagcaaacagttactgaatataatatgctactcttctagtcttgtagcaggacgagccgcagacaaaacctctcagacaccgagttgtagaaggaagggctttattcagctggcagcatcggcaagctaccgccttaaaatccgagctccccgaatgcacaatttctgtcccttttaagggctcctcacagcactagagatttcacatgaaagggtcgtgattgatttgagcaagtaggtggtacgtgacaggggctgcatgcaccagtggtaagagagaaacagaacagggcagggagtttcacaacgttcttctatacaatgtctggaatctatgaataacatcggtttctaagttatgagttgatttttagctactgggtgtgaggcctctgagcccaagccaagccatcgcatcccctgtgacttgcacgtatacatccagatggcctgaagtaactgaagatccacaaaagaagtaaaaatagccttaactgatgacattccaccattgtgatttgtttctgccccaccctaactgatcaatgtactttgtaatctcccccacccttaaggtactttgtaatctcccccaaccttaagaaggttctttgtaattctccctacccttgagaatgtacttcgtgagatccacccctgcccgcaaaacattgctcttaacttcaccgcctatcccaaaacctgtaagaactaatgataatccaccaccctttgcttactctcttttcggactcagcccgcctgcacccaggtgaaataaacagccatgttgctc

SEQ ID NO: 375 - DNA, 2266 bp, Homo sapiens
agcaaagtaatcagaacctcccaaggatggatgacaaaatttcgccggaggcccaagtggcggagctggaacttgacgccgtgatcggcttcaatggtcctgttctcctgaaactgtttttagtgaataaactaccaactcaagcaaaacaataattacattcaagcatacaaacttttctctaacatggaagcagtagtgttaccttggcagatatttggagtacgggagttgcctgtggaaagaggtgtcaccatgaaaggtcccaggctcttcagagcacctggacatgtgcccactggtctcaaatgccatcctgaccaggagcatatgatttatcctcttggttgcacagtcctcattcaggcaataaatactaaagagcagaacttcctacagggtcatggcaacaacgtctcctgcttggccatctccaggtctggagagtacatcgcctccggacaagtcacattcatggggttcaaggcagacatcattttgtgggattataagaacagagagctgcttgctcggctgtcccttcacaaaggcaaaattgaagctctggccttttctccaaatgatttgtacttggtatcactaggaggcccagatgacggaagtgtggtggtgtggagcatagccaagagagatgccatctgtggcagccctgcagccggcctcaatgttggcaatgccaccaatgtgatcttctccaggtgccgggatgagatgtttatgactgctggaaatgggacaattcgagtatgggaattggatcttccaaatagaaaaatctggccaactgagtgccaaacaggacagttgaaaagaatagtcatgagtattggagtggatgatgatgatagctttttctaccttggcaccacgactggagatattctaaaaatgaaccccaggactaaactgctgacagatgttgggcctgcgaaggacaaattcagtttgggagtgtcagctatcaggtgcctgaagatggggggtttgttggtgggctctggagccggactgctggtcttctgtaaaagccctggctacaaacccatcaagaagattcagttacaaggcggcatcacttctatcacacttcgaggagaaggacaccagtttctcgtaggaacagaagaatcgcacatttatcgtgtcagcttcacggatttcaaagagacgctcatagcgacttgtcactttgatgctgtcaaggatattgtctttccatttggcactgctgagctatttgcaacctgtgccaagaaggatatcagggtgtggcacacatcatccaacagggagctgctgcggatcaccgtgcccaacatgacctgccacggcatcgacttcatgagggacggcaaaagcatcatttcagcatggaacgacggtaaaatccgagccttcgccccagagacaggccgactgatgtatgtcattaacaatgctcacaggatcggcgtcactgccatcgccaccaccagtgactgtaaaagggtcatcagtggcggtggggaaggggaggtgagggtatggcagataggctgtcagacccagaagctggaggaggccctgaaggaacacaagtcatcagtgtcctgcattagggtgaagaggaacaacgaggagtgtgtcaccgccagcaccgatgggacttgtatcatttgggaccttgtgcgtctcaggaggaatcagatgatactagccaacaccttattccagtgtgtgtgctatcaccctgaggagttccagatcatcaccagcggaacagacagaaagattgcttactgggaagtatttgatgggacagtaatcagagaattggaaggttccctgtctgggtcgataaatggcatggatatcacacaggaaggggtgcactttgtcacaggtggaaatgaccatctggtcaaagtttgggattataatgagggtgaagtgactcacgttggggtgggacacagtggcaacatcacacgcatccgcataagtccaggaaatcaatatattgttagtgtaagtgccgatggagccattttgcgatggaagtacccatatacctcctgaagctgatgagatgtctctgagccttggcgttgcacgcagtcctgttgaagactgagtttagataactccaacactagtcttcatttctcacagctctgtttttgttcttgagtcaatttttctctttttctttatagaatgcattttatattcttaaattgcatattaaaattgaagtatgttcaag

SEQ ID NO: 376 - DNA, 1933 bp, Homo sapiens
agtgctgaaaaggagcctctggaagagagggccttctcccgcttctctcctcctcctctccacgctggggggatcctggtcacctctgacaaaattctggggacgctgggaacactgaatcaacatgggcaatgagaacagcacctcggacaaccaggtgggtgtcaggaagcttctctctcgagctacgtggtgctcttggcagaccttgactaggttctttttacagcgtctcatcttcacccaggaaggagcaaacaagacagcttctgcgtagatgtgtgcgggcatttatggatctatgcagccatttttcatttcattggaattctcttacgattaaggctagctctagttaaagccggaaacgctaattctacttattatttattattatttttaaagacatggtcttgctctgtcacccaggcttgaatgcagtggcatgatcatagctcactgcagcctcaaacacctggactaaagcgatcctcctgccacacagccttccaagtgtctgggactacaggcatgcaccaccacgcctggctaattttttaatgtttaggttttgtagagatggggtctggctatgttgcccaggctggccttggactcccggactcaagtaattctccttctttcactccccaaagcgctgggattacaagtatgagccaccattacaggcatgagccaccaggcctggccttactttttattctgtcttctaaaactgacataagagaaattggcacatttttcctaggttgtgtccacccatcaacttacatggatttagcagaggttaaaataaaacctttccacactgctcccccaaataaagctatggccattaaaaatgattttgaaatctatcagtgttgggcagattaaatgtgagtggtcattctcatgttaaacaaggttttcacaattgaagaatggactttaactgcttaattgtgcataggctgagatattacaacatattcaagtttttcattatctattttaagtttgaaagttttaacttaatgcgttggtgaacaaaatcaggaagacactttctcatttatctcacacaaactggaaaatttggattaatgacattgagttccttgaacgagaaaactggatctaaaaacccacatgctgtaattcatttccctctgcctttttcttccctacaattttttttttttgacagagtctctctctgtcacccacgctggagtgcagtggcacaatctccgtctccccccgggttcaggcggttctcctgcctcagcctcccgagtagctgggattacaggggcctgccaccatgcccagctgatttttgtatttttagcagaggcagggtttcaccatgttggccaggctggtatcgaactcctgacttcaggtgatccacccttctcggcctcccaaactgctgggattacaggcatgagcccccgcgcccggcctctacaattttcttttctcaagcaagaaaacaaagtgtcaaaagaaaagttgtcaaactccagcatctttaggggcaggccagaaacaacaattgtgttaaaagactgggtgtgaccatggaatactatgcagccataaaaaaggatgagttcacatcctttgtaggtacatggatgaagctggaaaccatcattctgagcaacctatcgcaaggacagaaaaccaaacaccatatattctcactcataggtgggaattgaacgatgagaagacttggacacaggatggggaacgtcacacactggggcctgtcgtggggttgggggagggggagggatagcattaggagatatacctaatgtaaatgacaagttaatgggtgcagcaaaccaacatggcacatgtatacatatgtaacaaacctgcacgttgtgcacatgtaccctagaacttaaagtat

SEQ ID NO: 377 - DNA, 2178 bp, Homo sapiens
agccgagagcacgatggctactggggagctcggggacttgggtggctactacttcaggttcttgcctcagaaaaccttccagtctctgagctctaaggagatcaccagccggctccgccagtggtccatgctgggcagaatcaaggcgcaggcgttcggctttgaccagacctttcagtcctatcggaaggatgattccgttatggcttttttcaaagacccaaatgttattcccaatttgaagttactttcagattcttctggacaatggatcatattaggaactgaagtgaaaaaaattgaagctataaatgttccttgcacacagctttcaatgtcattttttcatcggttatatgatgaagatattgtacgagacagtggacatattgttaaatgtttagattctttttgtgatccatttctcatttctgatgagttacgaagagttttgctagtggaagactcagaaaaatatgaaatattcagccaaccagatagagaagagttcctgttttgtcttttcaaacatctttgccttggtggagccctttgtcaatatgaggatgtgattagcccatatctggaaacaacaaagcttatctataaggatctggtgagtgttcgaaagaatcctcaaaccaagaaaatacagattacctcttctgtctttaaagtttcagcttatgattctgctggtatgtgctatccttcagcaaagaatcatgaacagacattttcttactttattgtggatcctatcaggcgtcaccttcatgttttataccactgttatggtgtgggagacatgtcttaatgttctttcagattatgtacctctactattttgtatttatcatttttctatcttaatactaacttatagataaacatatactttgcaaattaattcaagaaaaatgtaaggagcctacttagagcagaagaaagcaaacaccaagatgcctttttaaaaatttgtgtggaatactaaccggggatcaaatttcatccataataaaatctataccaaaaaagttgtggaatttttacagaaagttacaaggaattagaaatctagttcatatttgttgcattgtgattcaagtgaatcctcaattttccatgtattttaatttataagctaattaattatggattgaaaatgtagcagaaaactaaacatgtctaccactgatcattaatatgaattgttagtttatttaacttgtttcatttaattacatttcttcattgcacaagcgtttacatctgtaaagctaggcaaagcataacaattcttttgcttcatttgttccacttataagcctcagtaaagaagtaacgttctggggcctggcacggtggctcacgcctgtaatctcagcactttgggaggccaaggcgggcggatcacgaggtcaagagatcgagaccatcctggccaacatggtgaaaccccgtctctaccaaaagtacaaaaattagctggctgtggtggtgtgtgcctgtagtcccagctactcaggaggctgaggcaagagaatcacttgaacccgggaagtgaggttgcagtgagccgaggctgtgccactgtactctagctctggcaacagagcaagactccgtctcagaaaaaaaaaaggttctgaaagtggttgtaaactcttgtatcacataataaattaaaactgcagctgtcccacggctaatacaagagctacatgtaaacagagaaagttgcctgatggcattagtaagtcgttcaaagagtgagaagcaggttatcttagtactgttccttatttcattcatagaatgaatgtataacctagattgtttttggtttattttgatggcaaaaatcattgacatatatcccatgggtcatgggaagcctgtaagaaatgttgaggtttgaggaggagcaagtttgaaagatgtgtttctgtgttgtgggataaagacgataatcttggacttgaacctggatttgaatctggaatgcagctggcaatttgggtatagagctcaggagaaagagtatgttttacttctaatacctaacacaatgacttggcatattaaatgtttattgaatgaataactactttctagatatcctcataatacccatagatttttttaaattacataaaaacataaaatcaagaactg

SEQ ID NO: 378 - DNA, 2352 bp, Homo sapiens
gttgattgaatacctattatgtgccaggcactgtgctgggcactagggaaaccaggatgactgagaccccgcctctgatcacagtggggcacgaaggaggaggccattctagctggttccatggatcagggaggacttcagcaatgggtaggtgttgaccaggtgaacagagccgggggtggccaaggcatgctagatagaggggtctgcccaagcaaaggtcggaggggggccatcaaacaccaggtgaacttcagttctgggggggtagctcccttgggagggtcatggcacaggctggagagtgacagagctcggtggtggagaggcttggtgcacgtgagtgggcggttgctaactgggatctccatttccatatgcccaaagcgtacctacaccctgcatgctcccttgtcatgcttctcttgcttgcttatgcgtcaggcaacactacagatcctctcttgctctaagctaggagccctagggtggacttttattgctggacctgattgctgagttttgggggaggcaggggtagaaatcattcaagggtggtataaatgaaaagccgtatgtatttgttttccagatgaatagaaaacatcccacccacctgtctacttttgtatgaggcagaaaacacaaaagctgctcaagaaataaaacaaatacataaaagcatattattaagctctcttttgatgagttaagggagagagacaaaacggggattgagagaggtggtaagaaagacaggcgagaagtagagaggtagaaatagcggcacagagagaaaaagacacaggaaagcacacatatgaagacacctagagtaacctaagagagtgcgagaaggtgagacacactcagagtcagagaaagggcaagcgttgggcaatggagaaggcaggaaggcaggggccttgccagctttgtcagtgctgcccacgtgctcagggctcccccaggggctcttccgcctgtggttcccaccatgctcccctctgctgcccagagccccaggaggcaaatctataacccatcactcacattacctccctgaaacagcaaacaaacaaaattcaaaccagccccctattttcaaaataggtcattgttgctaagttagctataaatgtatttcaattcttccttagagtttttgtgttcttcatgaaattcttccctcttttgtttcactagggtttaagaatttacaacctgcttctcacttctcatagatttgaggagcgtcaagtcccatttcacaaaggctatggactcctttagtgtgtcactgtggtttaaggctccttttactgctaaaatgtctcaaagcagttcacattttcaggaccataggtacagaagtttctttcaggatataacctgtgaaccatctgcgttaaagcaaggcttcacccctagcaccacctgagaccagcagggttaggaaagcggctagggcagccaaggccactggaacaggaaagacagctgtttcaaacaaagggagcccaaactccactctcacagaaccgggcatgtgtttcaacccctacttccaccccactgccatttgatgcatatatcctcataacacctagaccatcctagaattcctacaacagggagaactagaattaacaccattatgtattttgttatttaccctatgaatactggttaacatggacagtgcacttaggcatttacaaagttcgtgagtggaaaccagtgctgccgtgcaacgctgtgtctctcactaacctcctggagcattagtgtcctcctctgaaaatggggacactaataccccccctcagaggagcagaatgaggatgaaatgacatgagggctgtagggaacccctggaggacactaaacatgtcacttcacgcccttcccctccctttagagtacttgaaagtacttgtccactttctgacagatatatacttagctgttagtaatacacgaagttgattgaggcaaacattcttaagaagattgcttttaaagaattacagctattgaattaccttgagtccacaggcctaaatggtaatattctaacaatttatatgtatgcgttgcttatgaagcgtttctttctgtgccattccactgaaccctcccaatgttatggggcaggtgttggccccatgtaacagaggagaaagggaagctcaaagaggaggggacacctgccagcttggtcaggcttagaagatggggaaagcactggaatccaggcttccagctccatagcctgctgtctatccctctcacctgaaggaggctcagctggcctgaaaagaatcaggtttcagacaagtgggacccccc

SEQ ID NO: 379 - DNA, 2111 bp, Homo sapiens
acgatgcaattgagattccaaaagattttgcaattttgctggtctggaagatgtccaaataaggaatgaaattcagtggagatggatgtaaaatcctacccttaagccccatagcatccatcatcatccaaggacggacggagaagcagcacatgcagataaagcttgcatttctctgcaggctcagagagaatcctcagcggcttgggcccagcacaggagaggtcactgccacacatttgcccttggcatggtctccagaaccatgcattgcatcctgggagcaacattttctgagatattctggtaaattggagtgtgtgttggtgagggtccccagaatggcaaagaagagcctgatgcaaggaactcagaggacctgagatgctgtatcctaacatttcaagaactgcgatattgaaaaaagcattggatctactagatgtggttctattaaatggaaccaaacccaacaggtacatttgaaagtgagagtgtttggatcagtacaaagaagagctttttcttttttttttcttttctctctttctctttctctctccttccttccttccttcctttctttctttctttctttctttctttttttttctttctctctttcttcttcctctttttgtttttttgagttgggatctttctctgttacccaggctggagtgcagtgctgtaatcatggcttattgcagcctcgaaatcctgggctcaagcaatcctcctggcagagcctcttgagtacctgagactataggtgtgcatcaccacacctggctagttaaaacaaatttttttagagatggggtcccactgtgttgcccaggctggtctcaaactcctggccttaagtgatcctcccaccttgacctcccaaagtgctgagattacaggcatgagtcaccatgcccaacaaagaggatttgtctagtagagcagcccagaaatgacagtctgtccattgagggcaggagtgcccagaacaagttggatatggatggtttctacattgtgtggattgggctaagggacctctctgataccctgcagttctacgcctctgtaaaccctgatggagaggaaactgaacaggtgagtgctggagcaaagccaaggcaagggatgttttcattcatttgttagtgcaatcaacaaacatttgttatgttccaggtactgttctaggtgctggggatatagctgtgaacccaatagagatcttcggaaagcacattagcatttggggggactaactgcacaggggcatggggaactttttggagtgattgaaatgttccgtgtattgatcaacacaggtgtatacatttgtcaaaactcactggatcatacttaaaatagatacattttattttacgtaagttatacctcaataaattgtttctcccagtgggaggggggagacactcatcaaatagacaaatatctgaatatctgagcagtggaggggacatgcgtaatgagacagctttcatgggcaagaggtgaacagcgcggcacaggaggacggaggaagggaacgctgcaccagaaatgattttgcccattctgtctcccccaggaatatgagagcctggagcaagaaaacaccatgctgcggagagagatcgggaagctgacagaggagctgaagcacctgacagaggcactgaaggagcacgagaagatgtgcccgctgctgctctgccctatgaactttgtgccagtgcctccccggccggaccctgtggccggctgcttgccccgatgaagccggggacactcctctgcccagcaaggagccttggtcattttcatacctgggaggaaggcttttccttcacaattgtatacagggggcacctgtggccaggcctcctcctgggagctccaggaccagccagctgtgttccctgcagactgggctcagcccgacatccaacaggcgccaaactcacagagcccttgtgcagatccagcatggaggccaccctcaggagtgacttctcatccaccctggcagctagtaggttctgctgttatgcagagccatttcctctagaatttggataataaagatgcttattgtctctcccttc

SEQ ID NO: 380 - DNA, 2473 bp, Homo sapiens
acttgcacttgttggcctacagaggtgtggcaagcagagcacctcagaactcaggcgtactgcccgccgcccgagccctgcgagggccgatagcgagggtgtggcccttatctgcacccagcagagcgccggcggggtttccgcatgggccggaccgtggtcgtgctgggcggaggcatcagcggcttggccgccagttaccacctgagccgggccccctgcccccctaaggtggtcctagtggagagcagtgagcgtctgggaggctggattcgctccgttcgaggccctaatggtgctatctttgagcttggacctcggggaattaggccagcgggagccctaggggcccggaccttgctcctgtttctcctcttctgagggcatgtggagagcaggtttctgagcttggcttggattcagaagtgctgcctgtccggggagaccacccagctgcccagaacaggttcctctacgtgggcggtgccctgcatgccctacccactggcctcagtcctagtctcacccttaaggtggcgtctctagccatggacagtctctgccgtggagtgtttgcaggcaacagccgtgagctcagcatcaggtcctgctttcccagtctcttccaagctgagcaaacccatcgttccatattactgggcctgctgctgggggcagggcggaccccacagccagactcagcactcattcgccaggccttggctgagcgctggagccagtggtcacttcgtggaggtctagagatgttgcctcaggcccttgaaacccacctgactagtaggggggtcagtgttctcagaggccagccggtctgtgggctcagcctccaggcagaagggcgctggaaggtatctctaagggacagcagtctggaggctgaccacgttattagtgccattccagcttcagtgctcagtgagctgctccctgctgaggctgcccctctggctcgtgccctgagtgccatcactgcagtgtctgtagctgtggtgaatctgcagtaccaaggagcccatctgcctgtccagggatttggacatttggtgccatcttcagaagatccaggagtcctgggaatcgtgtatgactcagttgctttccctgagcaggacgggagcccccctggcctcagagtgactgtgatgctgggaggttcctggttacagacactggaggctagtggctgtgtcttatctcaggagctgtttcaacagcgggcccaggaagcagctgctacacaattaggactgaaggagatgccgagccactgcttggtccatctacacaagaccaagaaccagttgaagtggcgacagagtcatgacaggaccgtggagtggcctaaggagtacccagggcgaagtaggaaacaggctccttctattcttcatgtgcctgggtgccaactcctcaggtgcagggaccgtgaccacctgggggctgtaagcgaacagccccggagctcggcggagagtagggtgggggtggcgtcctctaccttttctacctttcccctcttctagcgggggtggggaggagggttactgctgaagagaaagggagagggagagcaggggcagagacagtcaggggtggctggaagggctcacctagaggggcgtggcccgcgctgtggagggggttaaaacccagctctttcggagcacgcccatcctatcccagtctcttgcttttgccctacctactagcaacgtgagcccgcccggcccccgtccatacttccacctaggaccccgtccctgctcaggctcgtctccaggcgttacccaaaacttctcactctctcgaatgcccaaacctttatcccaggcctccgtgtcgacgcattcccagcgcacatacctggtcttttgctgcctgtcgtcaccgccaccccgacagccgggcaggcatcgctgccgccatcttggaagcgggcgctgcgggggcggggtctcgcgtcatggggcggggcctcggggcggagccacccgggctgactaggcacccggtcccagacaccgcgtggccgggggcttgtgagggagcagcgcctgagcctgcccacctggaacgcgttgtaggcgaccccctggggagcgggtgctagggttcaactccactacgcagactgctagtgggatttcatttcctgcccctcagatttgtaaaagcagaagctcaagcccttcattttcctctgggccgagactgatcaggaggctagtgagccggtttctggtgctccgctgacctcgttatcaccttgtggttggctgagccctctcccagtgtgtcagtggcaccccctgcagcctagtgccacttagtatcaattgttccttacgcaggctacagcgttgcggaccgctctagcgcatttttgtattcccgttgtatcccgcaggcctggaaataaaaagcgattagttaataaaacaatgaaacattg

SEQ ID NO: 381 - DNA, 1692 bp, Homo sapiens
tggtgtgggggccccatcccccatggtcaagatccagctgcaggagcaagggaccgatgggggtgcttttgccagcatctcctgtgcccacgtcatcgccagcgcagggacaccagaggaggaagaagaggaggtgggcgccgcgacatttggggcaggctgggccctgcagaggaaggtcctctatggagggagaaaagcaaaggagttggacaaggtcgaggacggtgcccgggcctggaatggcagtgccgagggtccaggcaaggtggagcgtgaggacaggggccctgggacatcggggatcccagtgagaagccagggggcagagggactgctggccaggatccaccatggagaccgaggagggagccgcaccgcgctgcccattccctgccagaccttccccgcctgccaccgcaatggagacttcacgggaggctaccgcctggggcgctccgcctccacctccggagtccggcaggtcgtgctccacacaccccggccctgcagccagcccagggatgccctgagccagccccaccccgcgctgccgctgcctctgcccctgccgccccagccggcccgcgagcgtgacgggaagctgctggaggtgatcgagcgcaagcgctgcgtgtgcaaggagatcaaggcgcgccaccgcccggaccgaggcctctgcaagcaggagagcatgcccatcctccccagctggcggcggggacccgagccccgcaagtccggcaccccgccctgccgccggcagcacacggtcctctgggacaccgccatctgaggcgggcgggggggtaccggggcgcctggactggggagggggcgggcacgcctggctctcccgggagcctcgccttgagagacattgaaagactacgtgggagagtgccagggagaacccctgccctccaacctaccccccgggatggggagagtctgccaggcccattgggcttaggatgccaacagcgctgctgagaaacggaggaggaggagggtttgcttgaggttggggcgagagtcgctctggctgttcttcccgctgggcgctgtacacccctcctcctgaaccaagccagaggtcagcatggggaagggaggaaggaagggatgggaggaagaggggggtgggtgagctgaaagagagggactagagtgccagatggaggagctcttttctagagagccgggagttggggagggggtatttattttgttatttatttcagtctggagggcgattctgggcctttctgacctactcctgagctaggagtggagaatcagggccaagtttgcactctccccaatgccaatgcctaaaggccccgccgtccatgccaccccacagccaaggaggggtctgcatggggagtggaccgagagaagaaggggcccagggaagcagagggcccaagaccattcacagtatttacaatttgccagaatttggtagtcagtgtggcctgctctgaatcaggcatcttatttagttctggggtgagggtctagtgccagggatgggcaggatgatgggggaggaggagggaaattttagcgggtggggggggtgggcagggtatttatttaaattaaaaaacaaaacagaagagatgtcaggaacttttttttaattcctttcttttcagaataatatattaaaagactcatgatcct

SEQ ID NO: 382 - DNA, 1808 bp, Homo sapiens
ttgcttccccatgtctcaatttgttaaatcttattgttctatgtaatttgaattgctacatcctttctgttgactagctccttgctcagaataacttttccacacctggaactttggcgtaggagttcttttcacttttatgcatttcccgcgacattacagggtgagtacgtagcagatgagtgcttgtgagcctttcctctgggattcacacagatggctcactcctaactttggtgagtcattcagtggccagatgtttgcctctttcctcctccccactctacccccacaattcagtgtactgttctttgaatgacatcccctcttgtttttgcctctctttctcctgatgcaatggccaaaatgctggaaatggctgccttaaatgtagggaccattaggatctcgctcaacacagaacccaggccacctgtaataacacagctggctcccagtcctgaaaccctgcctttctgccctgaatggggtgcagagaaccagtccagacacctgaaactgccacccttcttcatctgtaggtgcaggggccctctgtatcaggaagagagcctctctgaaatccactgtcattctgggcttttcctggaccagctctccttacctacccccttctctagcctgtcagtttcactcattcattggacatttataagcactaagtatgtaccaggcatcatgctggcctttggtggtaccaacaaataaagagactgctaaatgcagaaaaataggcacagagtaaagacttgtaagtctgtaaaggagtgctcagtgagaagtcacacaagctaagtttccaaggaccatttgcagatcactgctgaacattctccatcctgcctactttgtattagaggacttcttgcagggagaaatataatcagcaggatcctcgctcagagacctggcagacaccaccttaacccagtgatcaaagttaacctccccagtacatgtccaactactgctgccctgaaaggatgcactgagaacatttctgtgtcatttctaccacagatgcgctacttgaatctaattatgaagagacaagagacaaacccagattgaggggcattcagcaaaataattgccctgtactctttaaaaaacggcaatgttgagaaagacaaagaaagactgaggagctattccagttaaagtaggctagagacactgggaaccaaatgtgatgcatgatccaggatattcttttattacagtgagcatcattgggacagttggtaaaatgtgaatattgtctgaagagtataatattgtatcaaagttaatttcctggtcttgaggattgtactgtggttatgtaagagaatgtccttgtttttaggaaatagatgttgaaatatcttgagataaagagcattatgtcggcgacttattatcaaatagtacaggaaaatgagtgtgtgtgtgtgtgtgtgtgtgtgtgtgtgtggagagagagagagaagggagggacagagggacagagagatataaaaccaatgcacctgggtgcggtggctcacgcctgtaatcccagcactttgggaggccagggtgggcagatcatgaggtcagaagttcgagaccagcctaaccaacatggtgaaaccccgtctctacaaaaatacaaaaatcagccaggcgtggtggcacgcgcctgtaatcccagctactcaggaggctgaggcaggagaattgcttgaacccaggaggcggaggttgcagtgagccaagatcacgccactgcactccagcctggtgacagagcaagactctgtctc

SEQ ID NO: 383 - DNA, 2970 bp, Homo sapiens
agaataattgggaggagtctggcaggaaggaagccaagtttcctgaggccctcaccagaagctcatcagaagcagatgctggcaccactcttcttatgctgtctgcgtaacttgttcagaaaactcattagcttccaacctcctcaattaggcagaacaaacatgcattactccaaattgccccgcactgcgatagagacagagttcaagcagaatgttggcccaccacccaaggatctgaccgctgaagtttacttcccttcaatcaaatcgagatcacatcttcctgcagttttctataatcagtatttcaagcatccaaaatgtgtaggagaatatggacccaagaacggagcagagagacaaatagaggaacggaaagttttgcctacaaccatgatgttctcaatgttagctgactgtgttctaaaatccactccaattcccattttgggagttgctatgtgatgaaggtctgcccctgtggtgttgggacaacttgctcatggagttgcagttcttgcctaacaggaacccaccatggtaagaaaaagactcaagctggtttatttgtttttaaggttgcaaggtaatcaagtccataaccacacttgctctcacatttaccaaaataggccaatctcagaactaaatgataaaaatgaaaattaatcagggactcccatgggcctcacatatatggcagttttgaatctgttctttttttcactatcataattgtttttttaaactcattttctctgcttgaatacacaactgtaaaaaaaagtgggggtagtggtggtgatagaaatgaataaacccatggaaacagtgagacatctacagagacaaaattaggaaggaaggaaacaaaagcaatttcagtatctctgtgcaaggcctgcatacctttccttgccaatacccgtggattgggcttgtctcaggaggtagcaggtgtttccttgactcacacagaaaacaagcccttgggcttcttgtgctgttagggcaagttacgttcagcacatgaacactggaccctgctttgcctgtccgtccttcccagaagagacacagatcacagatgatcaagtagttgagaaaacagttcaagaggaggctttgtatcttttctttcttttctttcctttttttttttttttgaaacggagtctcgctctgttgcccaggctggagtgcagtggcattatctcggctcactgcagcctttgcctcccgggttcaagtgattctcctgcctcagcctcctgagtagctgggtttacaggtgcctgccagcacgcccagctaatttttgtatttttagtagagacggggtttcactgtgttagccaggatggtctcgatctcctgacctcatgatccacccgcttcagcctcccaaagtgctgggattacaggcataagccacagcacccggccctgtgtcttttcttaatttgagcgaacttaaagtaaaaacgcttcttaacattataaagtaggactatgtcccctccattgaatttttgtaaaaaagtcgaatagggatagaaagcaagcaaccagatagaatatcatgccccagaacatcatttaccttggtagaacattaccactttaacacatagaaaccttttcacactagttaacaaatagcattaagcatgattcaagtcaagattttaaaaacttggctgatgcctctcattaagagttgaaaactatataagactcttgctccaggaaactgtgttctgacattttaatagtattgcgttagcaagagcagaaaatccatgaacttagattcacagaaagtaaatcaagaatccatccaaaatggagtgcctcttgctgagtgatgggatggttttcatgtgagatgtcagtgcagcttctatacttgacataaaagttcccattaaaaaaaacggaactgctgctcaattttttttttcatcaagcagagttacctaaagtgctttttggaagagactattaggaaaggaatggaaagtagtcattatgactaatctgctttaggagttggggtaaccagtattacaggagggactttcagagccatggggaccttttaggcaactcaaattccttcaattgtttgcagtggtcctctcgaggggatgtaatgagttgacatgcaccagaacagatagaatgcactgccagctggtagtttactcttgtacaggaaggctgcttttctaacacacaactctttgttgtgttaaagagaaataaatatataaaagcctaaaagtaagctttcaattctttatgtctggcaaaattgtcagtacaatgtgccttgaggatatatccatggtgctgtcttacaaggttattacgaaagaataagctcatactataataaccaccccatacactttacagtttatgaagaacttacatatacattttctcagttgaacctcacaacatcagtgggaggcaggggaggcagatattattatctcttgagagggagtgaccctgctgctgctgctgtatatgtgtggcttttggtttaggaagactaagttgattgtgttgtattttcaagtattttatatcgtacaaggatgtttattgcagcactgtttataacaaggaaaaattggaacctactcgaatgcttgctaataggggactcattaaactatggtacaagcttagatatgactctgtagtcattaagaattttgatgaggtattagaaagaaatgtattgatgttgaagtatatttattgatgaaggaaattgttcacaatatttcagccaataaacaatagtatatgcatttttttgtaataggaaaaaatgcacacagtaaaatagtggttatctttgtgtgcggtgaatatgtatgatacttgttttctttttcatgctcacctatcaattctaatcttagtgtcaataaatattaaaaatgtact

SEQ ID NO: 384 - DNA, 2136 bp, Homo sapiens
atttctagtcaggactctggtagaagagatcactgaagagcaatattacatgatgcggagatatgaaagctcagcctcacatcccccacctcgccctccgaaacacccctcagtagaggaaacaaagttaaccctgctaaccttagcagaagaaaggacggtagacctgcccaagtctcccaagcgtcatcacgtagacataaccaagaaacttcacccaaatcaagctggcctggattcaaaagtactgattggtagtcagaatgatttggtggatgaagagaaagaaaggagcaaccgtggggccacagcagtagcagaaacattcaaaaatgaaaaacatcaaaaataacaagatgtgacagaagccacttaggcagcaaacataaatgttgcagtgaaaaaagaagctagccttctagctgaaaaacgagtattccccaatggactccagaagaaacttgattcatcgctgcaaaggaaagaacaaccttaaaacttttaacagataaaacttacagaaaactatgatatagaattcatatagtctattctgttgtgtctaaatctgtaggcattgtgttgttgttctttaggacgtatttatttaacttgcacattttttcagattcttatttctactaccaacaactaagtaattgggaaataattctgtatttcagtttctgagtaaaaccagcctgaaataggataaaagccaccaaatattttcttttttttccagaatttgttttgccattttttagtgctatcatcattcctaacaagactaacttacaggaaaataattatatctgactgatttaaaatgttcaggtttcttatccaaatcccttggaactatggaaaggagtttgatttcacattcacagtgtatttacaaaatacgctgtgtcataaatatgtttgaattccaacagccaaagccattgagagtcataggagttttccataaccttctcttctatgacccaacaacaagctcatgactgaaatttcaccagatttctgagacgatgtcttaatattctatgtgctatgtaccagataattctttagatgaatgtttcttaggattgtaggaaaattatctagttaatcataatatttgatggaaagaaaaagacaataaaattgtaatataataaatttggctgacaagaaaccaaagtgattcttaattagtatacatcagaatgatgctcttatagttgtaccatctataaaaattactttaagggctctcacattttaataatttatcttattatgtattaagtatacaggaacaatattatttttcctttaacaaaatgaagagacaggctatctggttaatgttacataggaatttaatagtaatgcttgaacttcatccatagatcatactctgtacaaaatttgttagctaacatcctatctcataattattttatgttttgtggagaaatttgttgattttgtaccaaagtgtttctgaagacaataaattgtgagtcaactttagaacaaaaaaaattagagttttttcaatgtttatattctgattaagcttactttaccttacattttttctaagtaacaatgaatcctgatttctagtgtcctaaaaattgcttagtgatttgattgtggtaatatcatttcttatctacaatgtctaaagttttatgggacagtttttcttttatttattttgcctgtttgtgcagataagaacagaaacttttctaagacccacatttggttattgaaggccacagcgaatcttaacctaacagccttgacaaactgcaccataggtgtttttagactcatataatttgttatttttcaaacaatagtgaataattaatattcttgtttggaatttgagaacaattaaatttgtacttttagtaactaccattctttgattagaaaattaagagaatgcatatcttactttggttgtaaattatcaagggctttctaatagaaatcatatataacatttctaaatataagtcctttcacatactgtgtttccagttgtcttgatattgaaaagtgtaataaacttcatgctcacctattggagatttgggaaggttgaaaataaacttcctaattttt

SEQ ID NO: 385 - DNA, 2596 bp, Homo sapiens
aggccaagctgccccggggtatccaccaagtgcggccccacctgcagaacattgacaacgtgcccctgctagtgccccttttcaccgactgcaccccagagagtgagtgctgtggccatgggtacttgggcaacctggtcccgtcggctgagctctgcctgggcctgcgtaccccgtgggctctggagggatgtaggtttcccatgcagggagtaaaggaacctgggctgggatcagctggggaatcttgtgggttggagtcagaagtgccaatgttcacatgatcccgctgccgggggtgggattgtttcaaagaggggcccacctcccatcgcctcctgctctcctgtcccatgggtctctgcccagtgcccacttggtgctctgcctgcctgactctggtgcccttatacgctgtcctcagccatgtgtgagatgataaagatcatgcaagagtacggggaggtgacctgctgcctgggcagctctgccaacctgcggaacagctgcctcttcctccagagcgacatcaggtcagggcgggaccctggagccttcgggccagcctctacctcccagaccggaggatcagatgggcctgcgtggggctgggggtgtgtactatagccgacctcgccctggctgggaccaatgcacctgggcatggtgggagaagagggtggggtgcccagtcctgtgggagatacagctgaagtgtgtgtgtcccccaccctgagcagcattgccctggatcccctgtacccatcccgttgctcctgggagacctttggctacgccaccagcatcagcatggcccaggcctcggatggcctttctcccctgcagctgtcagggcagctcaacagcctgccctgttccctgacctttcgccaggaggagaccatcagcatcatccggcttatcgaacaggctcggcatgccacctatggcatccgtaagtgcttcctcttcctgctgcagtgccagctgactcttgtggtcatccagttcctttcttgcctggtccagctgccgccactcctgagtaccaccgacatcctgtggctgtcctgcttttgctaccctctgctcagcatctctctgctggggaagcccccccatagctccatcatgtctatggcaacggggaaaaacctccagtccattcccaagaagacccagcactacttcctgctctgcttcctgctcaagttcagcctcaccatcagctcctgcctcatctgctttggcttcacactgcagagcttctgtgacagctcccgggaccgcaacctcaccaactgctcctccgtcatgctgcccagcaacgacgacagggctccagcctggtttgaggactttgccaatggactgctgtcggctcagaagctcacggccgccctgattgtcctgcacactggtgagagggctccctgggagggcgtggatgatggtgggagaggagccccactgtggaagtctgacccccacatcgccccaccttccccagtcttcatttccatcacccatgtgcatcgcaccaagcccctgtggagaaagagccccttgaccaacctctggtgggccgtgacagtgcctgtggtgctgctgggtcaggtggtccagacggctgtggacctgcagctgtggacacacagggacagccacgtccactttggcctggaggacgtgcccctgctgacatggctcctgggctgcctgtccctggtccttgtggtggtgaccaatgagatcgtgaagctacatgagattcgggtccgagtccgctaccagaagcgacagaagctgcagtttgaaactaagctgggcatgaactctcccttctgagccactggctgtggtggctgtagttgcccccgtccctggggctaaagccagacccatttctgaacaggggagtttgtatcatgaatgtttccaggtttgctcctgcacccgtggcactggaaacccagctccccgtgtcagaccccgctgtcttcctgagccctggggctcactgtggaggagctgacggcctgggcccttggccagtcctggctcttccctgggcctcaccagggacactcttgaatgtatggcctcaggcgctccctagagggggcctaaaccccctcacctgtgagctaccccctttagggatcccttgcccccttggagatcccttgccccccagtgcctctgctcgtgggtccctggacacggccttgaagccaaccttctttgaaggagcaacagcagcagccttggccgacgcgtccaactcccaaggctgccgtggagggcaggggggtggtgcttgcctggatgtggccccgagtgcctcccctccctccctctgtgggggagtctcccgcctgaacctgaagatggagcagggcccccgcttcgccctggagcctcttcctgtgcctggctcaagctggctgcctgtcagtcttggggaatctggcccaggtctcctcagcctctgccccagttctgggagaagtttctactggtgtatattttttactggaaatgagccttttaggaatgaatgtagactggtttgtattaaaatgtgtcaattgct

SEQ ID NO: 386 - DNA, 3118 bp, Homo sapiens
actagaagcaaacagggccaaaaatcttgccataactttaaggaaagctggaaagactgctgatgaaatatgtaaagctattcatgtatttgacttgaagacactgcctgtggactttgtggaatgcttgatgcggttcctaccaactgagaatgaagtgaaagtgcttcggctctacgagcgggaaaggaagcctctggaaaacttgtcagatgaagatcggttcatgatgcagtttagtaaaatcgagaggctcatgcagaagatgaccatcatggccttcattgggaactttgctgaaagcattcagatgctgactcctcaactacatgcgattatagcagcatctgtctctataaagtcgtcccaaaaactcaagaaaattctggagatcatcttagcccttggaaactacatgaatagcagtaaaagaggagcagtttatggatttaaacttcagagtttagatctgctcttagatacaaagtcaacagacagaaagcaaacactgttgcactatatatccaatgtggtgaaagaaaaatatcaccaagtgtccctgttttataatgagcttcattatgtggaaaaagctgctgcagtctcccttgagaatgttttgctggatgtcaaggagctccagaggggaatggacttgaccaagagagagtacaccatgcatgaccataacacgctgctgaaggagttcatcctcaacaatgaggggaagctgaagaagctgcaggatgatgccaagatcgcacaggatgcctttgatgatgttgtgaagtattttggagaaaaccccaagacaacaccaccctctgtcttctttcctgtctttgtccggtttgtgaaagcatataagcaagcagaagaggaaaatgagctgaggaaaaagcaggaacaagctctcatggaaaaactcctagagcaagaagctctgatggagcagcaggatccaaagtctccttctcataaatcaaagaggcagcagcaagagttaattgcagaattaagaagacgacaagttaaagataacagacatgtatatgagggaaaagatggtgccattgaagatattatcacagatcttagaaaccaaccatacagacgagccgatgcggtgaggagaagcgtcaggcggcgctttgatgatcagaacttgcgttctgttaatggtgccgaaataacaatgtgaacctgagactggcctgcatgaatacagggtgtgcgtgaatgaaactgcccacatgaactttatgtgctacgatttaactgcagccttgaacacacacaaaaatattcttaagggctcagatttagcaaacacggaagaattttaaaatgagctctcctttcaacccttgttaacaagtgcctaaaaatggaagtacctgttcagattaatcaaagcaataggatttgatttgattaggtatctttttacaccagtatgttatttttaaccaaaatgtaaagttcttattaaactcattacctgccattgtgattgtcccatcatggcccacctggtttcctgatgttgtaaataacatcaatgcatctgctgtgggtcctttgctgagatgtcttcgaaggaattttgttttagccatatccatcaactttgtattttacttgcaatttggaagaaggaaagtcacatgatgaaactccttttgtctataaccaggccctggcaaagtgcaaacaggatgcaactgcagtggcacaaaggtcactcaatcctttgtttccagtttcacattctactacttctgtgctagagaacgatgctctgtgagaggcattcactagtatgaatgtggggatatagtgtataagacttatttgcagtactgtgttcttcagctagaggcagctttttaaataatgcaagtgtatttattagcattaaaattaacatctcagtaatcagcattagcatttctgaggaccattattaattctgagaacagaaattggtgccttgcaaggaagtttactagctctatcaacaagcattcaaggttacatctgctagcagagtagtgttaggaacctggccttactctcctctgacaatcgcaattttttcttattttttataaattcaagaagatacacttggcatcgtgtatcgaggctaagtttttcatgcatttcccagactacttatggagaattgcagtttaagttgctgaaaagtattaacatggtattaagcttaaataatacgtaatgggactagatggcccactaagccactgttattttccttcctctctggcagggcacttgatccattccaaagtcaaaaactggactgaagctaaatttgtacttttcataatatacattctgcttctggcttatcttcttggtacatcaatatattaattgtaaagtttattgtatagtatttaaccgctgaagttcctattttatgttgtgcttatgtgaaccccttggtgaaggtcccttttccttggatgtgtagttatatgatctttttaaatgtacagatattttgctataaaatcggtgcagttttttatggtttttacacttctctttaattcccacctaagcctctgggtaatattgtaaatattgttttaaaatgcatcagcctatgctatacaatctgaatgttattttaacttatagttttttttaatatatatatttaactataaggacagtttagggaacaagttacctaccacatttcactttagtgtacctatttacagaaagattaaactgccacctgcgggcacattcccataaatgtgtactttactttaaaaagaacatgccacgattttgtctttctgtggactcaacattcacttcgattaaaaatagcaatttgaccaagttggacttccactacaaagcagctgttttccaaagttcaatgctgacatatatgtatattaaaataattgcctatttattaatctacaaatagacaacgttggcatgttcttttctgtttgtctattaatgggcctgcttcttagcaatattagaatgttttataaaagcaattcatgttacttttctggtcttttcatggcatatgagcaaataataaactatttacact

SEQ ID NO: 387 - DNA, 2080 bp, Homo sapiens
gactcggctcctcgcggcgacatggatcggatggccagctccatgaagcaggtgcccaacccactgcccaaggtgctgagccggcgcggggtcggcgctgggctggaggcggcggagcgcgagagcttcgagcggactcaggtgaggacaggggaccccggggcatccctggggcaccctgagggacgcggtgtccgggaggggctttgaagggagtaggagtcttgcaggccccagttgaagacggggcgagggtgtagtgagcgggggcattgacgtgcagatctgggcgatcccaggaaggtcggggaccccagggtaccccagctggcctggggagaagggcagaggcgggctcggaggagatggcaggatgcgtggccaagaggagcctgatcggctgggtaccgggcaggagtcccaagatgaggtgagaggggaaggaactgaaaaggggcggaatggaagggttgcccctaaacaagggaagcgcacgggagccacttggaggctcaagtgtgggggcggagagtgggggcgccgggctgggaatgtgaagggtgaggggacctctcttcccctccgatcacttcttggttgcattgacatcccttcccaccccccaccccttagcatccccctttctcgatgtctcttgcttggctctggccagccccagctgtcagctctgaggccgggcggaaggggtcggagcagggaaaaggaatgtaggaaatgcaaagtgtggccactttgtgggaaaattactttgggggctaaagtggagaccatggtgcccctgggccctgacttggggtcttggttttatcccccaagatgtgcctgacagctaataggcagactgccctatttgtcctgcctgaccagggcttggggccaaaattcctcagtgtcatcaacaaaaagccacaatccatttttttctccgagtttttaatgcctggtgtattgattgggctgaattaagctgacatgttgatggtgttcatcaattcatttgtatgtaaaatccatttcaaagagtacaacgcttcttttaatcccagtgccaatgctggaggggcagatttcttctacactcttgtgctcagagtggaacctttgaagatccatttgggtccccctctccagaggctggtcccctgatgtgttatgcgaggaatacttcccccaaacacagttggagggaaagggctttgggattttagttagaaaagacagtgagaatctgactgaaggttctgtatatggaatctttcaaagaatagagcctttggccgggcgcggtacctcacacctgtgatcccagcactttgggaggccgaggcgggtggatcacctgacgtcaggagtttgagaccagcctggccaacatggtgaaaccctgtctctactgaaaatgcaaaaaattaactgggcgtggttgcagacgcttgtaatcccagctacttgggaggctgaggccagcagaattgcttgaatctgggaggtgaaggttgcggtgagccgagatggcgccactgcactccagcctgggcaacaagagcgaaactccgtctcaaaataataataataaaaaagaataaagcttttcacccccagagtacttcatcccctcttcttattctgaaaacctttggccccccacctgggcaacatagtgcgaccctgtctctacaaaaaataaaaaaattaggctgggtgcattggctcacacctgtaatccccgtactttgggaggccaaggtgggaggatcacttgatcccaggagttcgatacctgcctagacaacacactgagatcccgcctctattttgaaaaaattttaaaattatcctcgtgtggtggcatgcacctatagtcccagctgtttgagaggctgaggcatgagggtcacttgagccaggaggctgaggctgcagtgggctatgatcgtgccactgcactccagcctgggtgacagagtgagactctatctctacaaaaaagtgaaaaaaagaaagaaaaccgcgcgcaggtgtgtctggatagtgtgaagcagtgggaccctgtctctac

SEQ ID NO: 388 - DNA, 3446 bp, Homo sapiens
ttttgacctccttgtccctactgaggttgcaggacatagagcaacaactcccccatggggagtgtgaccaagtcaaggggacccactgactcatccgctttcttccagataaaccgagactactccttccttgactacatcctgggaggctgccagctcatgttcaccgtaaggctctccccgctggctccctctgcacccccatcccagtgagggtcctccctgaagacttgggccactagtgcagccagagggacttagggtagacttcaggaaggacttccctggggcaaagagtgtgtgcggcctagtgaggagggcataagtgggctgtctggtcctgctgggtgtgcctgagttggggcttaactacaggtcagagcacagctgcacagctttcagtctggtggctacactccttctgcgggtggaggaaaacaaattcctcctcactggccacaaggccttcagcgatccctgcctccttcatctgcagcctccttcctccttgctcactgggctctaaccacactcttcctctgtttgcccaacatgccaagctttgcttcatgttagaactttgcatttgctgttccttctgcatttgttgttccctctgcctgaaacacttccccagaacctttgcatggctgcctacctgccatttttcaggcctgaggaggtaacggaggtcaccttccagggagccctccctccctcaatgccttgctgctcctctgtcatatcttcctattttctttcttttcttttcttttcttttcttttttttttttgagacagcgtctcattctgtcacgtggtctagagtgcagtggcacgatctcagatcactgcagcctccaccttcagctctcagttgatcctcccacctcagcttcctgagtagctgggattacaggtgcatgccatcatgcccagctaatttttgcattttctgtagagatggggttttgctatgttgcccaggctggtctcaaactcctgggctcaagcgatctgcccaccttggcctctcaaagtgctaggattacaggcatgagtcactgggcctggccctcactattttcctattttctgggcacttgccgccccgagattcatatgcatttgtcgcttctccctgatcgtcgcacccactggaatgtgagtgcttttaagtgtgggcactttgtttattttgcttccactccaaccccagcatatcacacagtaactggcacatagcaggtgctccatcatttctcgttggaagaatgaactgccaccttgcctgtggcctggagtctttgccccacagactctgtgccactcatcctggctttgcttcctcaccccaagggagcctcaggcccagaagggaggaagctgctggggtgccacgctctgcccacctccccatgttgtctcaccgttccccatcaccacccctagatcctaatgagaaatggagggcatcacaggatgccatggagtcagaggattggccttgctgacttctgaccctgctgcccaccactgccccctcccctgcacagaggccaggccctcctgttcctcctgcacgagtttgttcattcagcgaactcacactgactgcctcctttgtgccgggctctaggctgtgtccctgcagcggtccctcaaggactaagacatgctgcccctgacttgggggagtgaccctctagccatgtgaggatttggatgggtggccccttctctcctaccccacagcaactgagttcccatgtagccaaatcttccccggggtcctacttctaaccctcccctgctgggcaggggttgttcttgcctacccctctgtgccctttctccagggattgggctgggattctctggggctgagagagcaggtagagccctagtccctgcctgcccatcagccccgagtccctgttaataagcacctgccttgtctgctgttcccagccctgggccaggcttctccagagtacgtgctgcggtgagctcccagctgatcggggagatgggcactgctctaccaggcaaccccaggtcccaggccccttggtggtctgagggataatggggagatggcttgggttgggggtgaggttatctgggaaggttgcagtggagcagtggcatctgagttgggcctggaagatggagcaaagttaggcgggaagaaacgatagcctggctctgcatgcagagcgaagcttatgaataaatgcctgcatatgggaacagatgaatgtgtggatagggatagtaaggagaaaaaggaatctgggactgtacgttagtctcttatgtcatcacatctaggcagtggactttatgcttgggcaatagagagccacagatggcattagagcagaggagtgatacaatcagagcatttctaggtttcagaccatcttattgtggggagggctgggagatgagtgggcttcccatgtcccatctacctctcctattccctgggagtgggatagggtgctggggtctctggccccactgggtggcctttttctccactctgcaggttggaatagactttacagcctccaacgggaatcccctcgacccttcctctttgcactatatcaaccctatgggcaccaacgaatatctgtcggccatctgggctgttgggcagatcattcaggactacgacagtgataagatgtttccagctctgggattcggggcccagttacccccagactggaaggtctcccatgagtttgccatcaacttcaaccccaccaaccccttctgctcagcagtacttcatcctcctcatcatcacggacggggtcatcagtgacatggaggagacacggcatgccgtggtgcaggcttccaagctgcccatgtccatcatcatcgtgggcgtgggcaatgcggacttcgctgccatggagttcctggatggggacagccgcatgctgcgctcccacacgggggaggaggcagcccgcgatattgtgcagttcgttccctttcgagagttccgcaacgcagcaaaagagaccttggccaaagctgtgctggcggagctgccccaacaagttgtgcagtatttcaagcataaaaacctgccccccaccaactcggagcccgcctgagctccagtgcccagcagcagcatgtcagctgagcctcctgccctcccccaggaacatgcacgctcactctgcttccttgtgggtggcctttttttaccgatccccttttttattttttacaaccggacctccacccccaacttcctccagcccagctgggcttcctttgttggagtcaactgttgatgcttccaggccaaactggcttcctctcctcctctccccacctttgccattcttaagtattgaatgtactttgtataattttagtggaattgttattgagaataaaatttttacaatcat

SEQ ID NO: 389 - DNA, 2059 bp, Homo sapiens
agaaaccttataaatgtaagcaatgttggaaggcctttgcttctgtttctgatttaatagacatcggaaaattcacactgatgagagactttacgaatgtacagaatgtgggaaggcatttaacaatcgctcaactcttattcagcatcagagaattcacactggtgagaagtcctttgaatgtaaggaatgtggcaaagcattcaataattgctcaacacttactcaacaccagagaactcatactaatgagaaatcttatgaatgtcaggaatgtaaaaaggcttttaggcaaagtgcacatcttactcaacatcaaagaattcatactggtgagaaaccatatgagtgtaagtaatgtgggaaggctttcacttgtgtttctgattttaatagacatcagagaattcacactggtgaaaaaccctatgaatgtaaagaatgtggtagagcttttaacaattgttcagctcttattcaacaccagagaattcacactggtgagaaggcttatgaatataaacagtgtgggaaggtttttgtctcctgtccaacacttgttcaacatcagagaacacatactaatgaaaaaccttatgaatgtcagtaatgcaagaaggccttcaagcataatgcacatctaatgagacatcagagaattcacagtggggagaaaccctatgaatgtaatgaatgtgggaatgccttcatttgtttttttgattttaatagacatcagagaattcacaaaggagagaaaccctatcagtgtaaagaatgtgggaaggtttttaataattatccaactcttactcaacatcaaagaattcataccagtgtgaaaccctatgaatgtaaggaatgtgtaaagacctttacttggctttcaaacttgaataaacatcagacaattcacactggtgacaaaccctatgaatgtaaagattgtaaaaaagcttttctttgttattcaacatttattcaacactatagaactcatactaatgagaaacctatgaatgtcaggaatgcagcaaggcctttaagcagagagcccatcttagtcaacatcaaaatattcatactggtgagaaaccctatgagtttaaggaatgtgggaaggcctttgcttgtttcctaccttaatagaaatcagagaattcacactagtgagaaaccatatcagtgtaaaaaatgtagaaaatcctttattgattgttcaactcttaacaccagagaattcacactggtgagaaaccctttgaatgtcaggaatgtaggaaggcctttaggcagagggcgcatcttactcaacatcaaagaattcctactggtgagaaaccctatgaatgtaatgaatgtgagaaggcctcttcttgtctttcataggtgaaaaagcaccagagaatacatacatgaagggacaaatcttatgtatttgaatagcgtctttttatttaacaatccttatctaacatcaccaaattcacattgcagagaaacttcagaaatataagaaatgtgggaaacacttttacctgtccctcagctatactttttcataacagaatttgtacaggtgagaagcctaatgaaagcccgatatgtgtaaagatctactctcacaatatactcaacattatataatgtatagtgtgattaatataggaaatccttgattttgaaattatcaattatggaatagcaaacaatttgtaagtgaagaaaatccagtgactgtaaatttttttacctcataattcacaatttattaagcatcagaatttatatggaaaaaatagaatatcaattattaataaaaacattaccactaaaattttatttgacttatagagaatagcatatagagaataatcatgttgactttgtgaatgtagaaaagcttttatctattacacgaatctttttcagcatcattatactttcaccagtttccacgtctgttttattaccaagtaatttaaactgtatacttcagattacaaatttcttacattgtgataaggttattgtgaagattaaatgagtttatccaaag

SEQ ID NO: 390 - DNA, 2552 bp, Homo sapiens
agtccgtctgtccatcccgccgcgccggggcagtctaggcggagcgggggctcaggcggcggcggcctcgacgcgagtgagtgtcgtggttggggtgctggacccagagtgcctaccctcgcctgcctgggcctcagtttccacatctgcacaatgggggtgaccatccctgccctgctggctgccaggagcggctgtgagtcttcaggcgtggatgcagcctgggggaagccatagggcgctttcacaggcctggccttcaccatggcgggagggagaccgcatctgaagaggagtttctccatcatcccctgctttgtcttcgtggagggattcttctgctatgacagtacctacgccaagccctacccagggcctgaggctgccagccgagtgcctcctgctcttgtctacgcactggtcactgccgggcccaccctcacgatcctgctgggagagctggcgcgtgcctttttccctgcaccaccttcagccgtcccagtcatcggggagagcaccatcgtgtctggggcctgctgccgcttcagccccccagtgcggaggctggtccgcttcctgggggtctactccttcggcctcttcaccacgaccatcttcgccaacgcggggcaggtggtgaccggcaatcccacgccacacttcctgtccgtgtgccgccccaactacacggccctgggctgcctgccaccttctccggatcggccaggtcccgaccgctttgtcactgaccagggtgcctgcgctggcagtcccagcctcgtggccgccgcgcgccgcgccttcccctgcaaggatgcggccctctgcgcctacgcggtcacctacacagcgatgtacgtgactctcgtgttccgcgtgaagggctcccgcctggtcaaaccctcgctctgcctggccttgctgtgcccggccttcctggtgggcgtggtccgcgtggccgagcaccgaaaccactggtcggacgtgctggctggcttcctgacaggggcggccatcgccacctttttggtcacctgcgttgtgcataactttcagagccggccaccctctggccgaaggctctctccctgggaggacctgggccaagcccccaccatggatagccccctcgaaaagttaagtgtggcgcaggaacccgaggtctgcaggccgcattcgacaccggcacggctcaccccatccaagtcgcagaactgcgcccgccgtggccacctgatccccagctgtgtctcctccagggccccagccatgtgttcgtcgccccgtgtgccccgtcctcgattgaggtctgagccgacgcccttgcccctgcccctacccctgccagcgcccacccccagccagggcccctcgccttcctcccctggacctggggggccaggcgggggtggtggacgtggccggaagctgctgctgcccacgcccctgctgcgggacctgtacaccctgagtggactctatccctcccccttccaccgggacaacttcagcccttacctgtttgccagccgtgaccacctgctgtgaggcccgaccacccacccagaatctgcccagtccccacttcttccctgccacgcgtgtgtgtgcgtgtgccacgtgagtgccaaagtcccctgccccccaagccagccagacccagacattagaagatggctagaaggacatttaggagacatctgcctctctggccctctgagatatcccgatgggcacaaatggaaggtgcgcacttgcccctactattgcccttttaagggccaaagcttgaccccattggccattgcctggctaatgagaacccctggttctcagaattttaaccaaaaggagttggctccaaccaatgggagccttcccctcacttcttagaatcctcctgcaagagggcaactccagccagtgttcagcgactgaacagccaataggagcccttggtttccagaatttctagagtgggtgggcatgattccagtcaatgggggaccgcccgtgtctaagcatgtgcaaaggagaggagggagatgaggtcattgtttgtcattgagtcttctctcagaatcagcgagcccagctgtagggtggggggcaggctcccccatggcagggtccttggggtaccccttttcctctcagcccctccctgtgtgcggcctctccacctctcacccactctctcctaatcccctacttaagtagggcttgccccacttcagaggttttggggttcagggtgctgtgtctccccttgcctgtgcccaggtcatcccaaacccttctgttatttattagggctgtgggaagggtttttcttctttttcttggaacctgcccctgttcttcacactgccccccatgcctcagcctcatacagatgtgccatcatggggggcatgggtggagcagaggggctccctcaccccgggcaggcaaaggcagtgggtagaggaggcactgcccccctttcctgccccctcctcatctttaataaagacctggcttctcatctttaataaagacctgtttgtaac

SEQ ID NO: 391 - DNA, 2046 bp, Homo sapiens
aaagacgcgggtgagtgtgtgatctgcctggaggagctgctgcagggggacacgatagccaggctgccctgcctgtgcatctatcacaaaaggtaggaggggttggcaaggtagcttagtgcaccccacctcccagaggggcggacccccatctccagccattctgtctcctttggttatgggatgacctctcccccgacctctggctccgagcgggtaagggcagaggccgtcagacaggtgtccactgtgccggcgggaaggtgcgagcatcccaagtgcagagcagagtggagttgccagaggtgtgctctggtttgagggctcaggtggtgggagctgatggggagacccgtagagcctcacaggttggaggagcttcggatcccactgggaaggttggttctccgtctgtctccctgcctcttcttcctctacgggtccctctgctccacaggggtagaacatcaatctgtgcgaggaaggccaggcagagggtgtacccactgccttgcactggccttctccctagagggccgggaggcaggaagagccatttcctgtggggccacagcactgggcacagttaaaagtagcagggcccagatatgccttgggactccagtgtgagcctcgtccttgtttccagctggaaggaaggcaccctcttgcccaagacaggacactgtgctgcctggggccagcacctgctgaatcctcgagcccagagcttcttcctgacactcaggcctttcaaagcctgactctcagggccactgctgcacagggtgacaaccgggcatggcacgcagtgtggctggtgcagaggaggcttaaggctggcctgggagagattcttggtctagctcccagcacggagccttgcttgtgtcccagggcggcactaaccagaaccagaaaaggaaatctttggccctcggggagaattatgccaattatctgtctggttcctgtctttgaaaatgcccagatgttggtttacaaatcaggaagctgtcttggggcaatctctgttccctctttgatgcagagagcctttctctgtaaacactggagagcagggcttcactgtctggctcccctcccgcctcttgcaggaaggactagatgctgctgatcagctgatcatggctgagccgggtagagcttggggctctcctaagaggtcacccactgggagggagcttcacagctgttcttttgacccaggaaggagctctttcaggactgtggcacccagagccgtggccctcctgccatgccattgttcccacttccctgcccttgggagtcttggagacagctgactagctgccctgaggggtccaccgctctcaccttctcactggtggctgctgccattctcctgggctctgcacagaaagctttggtccttctgaaagccactctgccccttcctgcagcaccagatccccctgagccggtactgctgcctccacctgggccaagactagtcttggtgttcacccttcttcgtgcttcagaaagtagggatatctggggacatgactgtgtttccctggggtcctttcagaagagacttaggaagctcctgctcaggaatctggccctctgaaagagccccttcaaagcagcctgggcagcaggtaacgtggtttcccttgcggccccctcctcccagctgcatagactcgtggtttgaagtgaacagatcttgtccggaacaccctgcggactgacctgcgggcttgcttgctgactcctctcaaagggacagagcgcccctgctccagggaggaggctcaccggaccctggggcagagctgagcttgggacaccagcgggaacagggcaccccttctgcactgacttccagatcatggttctcccttcctccctgaggacaccaaattggatgagagcaagtttgagagaagaatgaatcaactgctatccttcccctcacccctcagcccaggagggaaagggcattttctttttcatctttgaaaggcattgtgggtctgtctttaaagtgtttac

SEQ ID NO: 392 - DNA, 1993 bp, Homo sapiens
tatttaaggtatacaatttgatgatttgatatacacatgcattgtgaaataattacagtctctgattaattactgatgcctcccttgggatgggaagagatagcaaactgtacctcatttatggtgtttggttgtgttactcttgggaccattacattaccattattaagtgacagttaactttttaatgcattatttaagacaattctttacaagcataattcatattatctgatggtatttccactccagttattaacatacctgtcccttatatgcataatcaggatcacaatatgaatctgagtcacttcctgatttaatttatgtctttggtgcatttcaaattaggattgtactgcttttcaccctaaagactataaaatgaagcgatttggaagagaagtaaaatttaatgtttagtttcactggagtcttagtcatatatgaagttttgaaaaaatgcataggaaaattaatatccttaagagtttgttccatagagggctgtgtatgtgtatatgtgtttgtgcctggagggaaggagttccatgaaaaaaaactaaatattttccaccagactaacttaatttgcctttttttaaattcttctagaaacctgtggatttttgtatctaagtttactgaatttgatgcaagaaaattacataaattatataagcatgctattaaaaaacggcaggagtctcagcaaaacagtgatcaaaacagcaacttgaatcctcacgtgattagaaatccagatgtggaaagattaaaagagaatacaaatcacgatgatagcagcagggacagttattcctctgatagacacttaactcagtaccatgatcatcataaagaccgacatcagggagattcttacaaaaaaagtgattccaggaaaagaccctattcttcttttagtaatggtaaagaccatcgtgattgggatcactacaagcaagacagcagatattacagtgacagagagaaacacagaaaactggatgatcacaggagtagagatcacaggtcaaatttggaaggaagtttaaaagatagatctcattctgatcatcgttctcactcagatcatcggttacattcagaccaccggtcaagttctgaatatacgcaccataaatcttccagggattataggtatcactcagactggcaaatggaccacagagcttccagcagtggccctaggtcaccactagatcagagatctccttatggctccagatctccatttgaacattcagttgaacacaaaagtacaccggagcatacctggagtagtcggaaaacataacaaaaactgatacttcgtctttctggacttttcttttagccatatatcataaaccaacacagtaattgccttacatgacttgaaagatataaacagatcttctatcagtagcagtattgttacttctttccaggatgcaaggtctattatcccaacagaagagaaaatatttttatatttaaggattatgctgcactgtactacaaaattgtagtacttttttttgttttcttttttaaagaaatggaaaatgtttactattacagggacctcaacactgccctcccatacaggctggataaaactgtttttaagtcagtgattttagactgacctccatttaaattatgtttatatatgaactttactctgacctgtgatcatgtttcaggaaggaatgaaagagagttctttcttaataaagaaaaacactcaaggactttgttcatttccaaagctacttgtttacattgtacactgcgaccaccttgccgcttttcatcacaagcttgaatatttaaattctgtacttatatctgtaaaatagccaggaatttcctgtttgtgatctattatgcctttttacaaaaaaaatggctgtaaattattgtaaatattaaaggaactttccttacttccttccctttccctaccaactcaggccttcttatt

SEQ ID NO: 393 - DNA, 1712 bp, Homo sapiens
gaagcagggcctggaactgcaggatacactcccctcctgctacctaggcaggcgtgagggtgtgacggccgcgcattcgccagacgagagcgatggctgagaacgccgcaccaggtctgatctcagagctgaagctggctgtgccctggggccacatcgcagccaaagcctggggctccctgcagggccctccagttctctgcctgcacggctggctggacaatgccagctccttcgacagactcatccctcttctcccgcaagacttttattacgttgccatggatttcggaggtcatgggctctcgtcccattacagcccaggtgtcccatattacctccagacttttgtgagtgagatccgaagagttgtggcagccttgaaatggaatcgattctccattctgggccacagcttcggtgagtacagtggccaggagctgaccgggcccggagtagggctgggagggaaggataggagctgctgccccacccctttcccctgcacttatgagatctgcaaagagagatgagagggtcagtcagaggttgaccactgtaccctctgacctcaggcaactgccgcaagggacacagggatgagggaaatgtggtcttttgagtggtcaggtctgatgaaggggacatcatggcccagatgctgagcccccagccacccatatggtgccccccccccaactggtgggaagaagctttagggtatgcagctggggggggagtgagggaatgtcacccacagctcttttgtcccccaggtggcgtcgtgggcggaatgtttttctgtaccttccccgagatggtggataaacttatcttgctggacacgccgctctttctcctggaatcagatgaaatggagaacttgctgacctacaagcggagagccatagagcacgtgctgcaggtagaggcctcccaggagccctcgcacgtgttcagcctgaagcagctgctgcagaggcagagaacagcattgacttcgtcagcagggagctgtgtgcgcattccatcaggaagctgcaggcccatgtcctgttgatcaaagcagtccacggatattttgatccaagagagaattactctgacaaggagtccctgtcgttcatgatagacacaatgaaatccaccctcaaagaggactacttcggatacaatcacagcaaccctggcctcggccctgccctgtccctgccatgcaacttcacaactcagctggcctagacccctgggaggcctccaagtccctaagcggttccagtttgtggaagtcccaggcaatcactgtgtccacatgagcgaaccccagcacgtggccagtatcatcagctccttcttacagtgcacacacacgctcccagcccagctgtagctctgggcctggaactatgaagacctagtgctcccagactcaacactgggactctgagttcctgagccccacaacaaggccagggatggtggggacaggcctcactagtcttgaggcccagcctaggatggtagtcaggggaaggagcgagattccaacttcaacatctgtgacctcaagggggagacagagtctgggttccagggctgctgtctcctggctaataatctccagccagctggaggaaggaagggcgggctgggcccacctagcctttccctgctgcccaactggatggaaaataaaaggttcttgtattctc

SEQ ID NO: 394 - DNA, 2143 bp, Homo sapiens
ttttctcataatctcatcagaagctggcaagatcattactgttttcttagatttgtttctgtaagtgcaatcgttgaatcaccatgtccggcatccatgtttatgtacatttttaaagtcagtggtttaaactgtatactttttgggttttggagatggaggtttgctctgcccaggctggaatgcaatggcgcgatcttggctcactgcggcctccgcctcccgggttcaggtgattctcctgcctcagcctccttaggtagttgggattgcaggtgtgcaccaccatactcaggtaattttgcatttttagtagagacggggtttcaccatgttggtcgggctggtctcgaactcctgacctcaggtgtccgcacaccttggcctcccaaagtgctgggtgggattataggtgtgagcctccatgcctggcctaaactgcatactcctaacatcagtatatggaaatattttctctttagttctattaaaattttaaaaaatctttatcaatttagtaggcaaagactggaaaatgttttaatttgatcagccactttaatgtatgtctcatttcaaagcatataaagtatacaagtttcaggtcctagcttaaacctataagaggccttattatgggcttatttcctttgcagccctttaccataatgtgtttcttctacctcccctgcacaacattgtttatatgccccctaaaatgtaacttctttagattctattgttacgtgcaacactgtatatctctccatagcacttaatcagagtttgtaattaggcatctttttgtgtgattatttggtaaatgtccatatcccctactagcctataagctccatgacttctagggaccctgtctgactacgtgtatcactgtttctaccgcctaacattgcctagcacattcattgcttcacaggcatctgaatatggttttataaaatacattgctctagtgcacaggattttaagctaaggatttcatgaatgggatttggggtaggggcatctatgaaattcctgaaattgtgtagaattttgagaatatgtgttttcctggggatagagtatgtagtttctcagcaactcattacagtctgtcacatcatgccctaattctacttgcctgtagctaaacacctaataacattagaactgaaatgatagtgatatgcaagatagcacgtgtggtttccacatattctaagaggcatcttcaattagattccaaaaatttttaagaaaaaaagatataatgtgccatcattttgggtggttctgggcacttcaggtaaacccttactcaaagaatactttttcagttacaatgtgtatttttaaaatttccagaagatgagttgaatatcagcccacaaacactggtagtaagcaaactattttatttgctaaaggcataaataaatgtctcctttgcttttaggcaaagggaatgcttcttcagatttttttttccccagaagttcaaaataacttgctcatagtcttcccaaaataattttcaaacattctaacaccaaaaaaaaaaaaaaaaaaaaactgccaaaacgctttttgcaaagtggttgtaccattttatattctcaccaccatgaatgaaagttccagttgctatattcttgccctcatttgataatatttttagttttagccattctaatggatatatagtaataatttgatggttttaatttgcatttctctgatgatcaataacattaagttttgattcaggtacttgttgggcactcatatctttggtgaaatatctgttcaaatcatttgctcctttttttttcttagcacttagaaaagactttttgccaggcacagtggcacatgcctgtagacctagctactcgggaggctaagacaggaggatcgcttgagtccagaagttctgggttgtagtgagctatgtcaatcaggtgtttgcactaagttcagcataaatgtagtgacctcctgggtcactgggacccagagttgcctaaggagcgtcagaagtggagcaggtcaaaactcctgtgctgatcagtagtgggatcacacctgtgaatagccactgcactgcagcctgggcaacatagtgagatcctcatctcct

SEQ ID NO: 395 - DNA, 1756 bp, Homo sapiens
aggctttaaacgggtaccgagaaggatctactgccttcacacgcgctccttttaacttaaaacactgctttcaccttaaaagagaaacaagaggaacacacggacgccagaaagagaatgacggaaacggaggtgtcatctccagcagggtccgaatcctcagatggaaccacaggccaccaggccagcacaggggcctccgggagggtccgccctgctccacggccgcaggggtgtgtgtgcatcagtgagtgtgcctgtgtgcatgcatgccaacaggcacacatgcatgtgtccacacaaggacgtgtgtgcatgtgtgtgtgtgcatgtgtgtgcatgactgtgcatatatgtgcacgtgtgtgcgagtgtgcgtgtgcatgtgtatatgtgcgcatgagtgtgcatgagtgcaagtgtgcatgtgtgtatgtgtgcaagcgtgtgtgcacatgtgcttgtgtgtgcatgtgtgtgcaagtgtgcatgtgtgcgagtgtgcatatgtgcattgtgtgcgtgagtgtgcgtgtggtccgtgtacacatctgtccatacatgtgagcttgcatgcacatgtgagcatgtgagtgtgcatgcatgtgttgtgtgtgtacgtgtctgcacgttggtgtgtgtatgtgtgtgcctgtgagtgtgcagagaggccctggcgctcgaggagggcctacagctcatagtactcacccggcgggcccagttgacgaggtcatccagcttggccaccacatactcgccccggctgctgggtttgggagccacggctctggcctttggcagggcaggctgggtgctggcacagagacacacgggcacaggaggcgtcagccacgcaggtgcttcccagaggcggatgcgagcccccacggccgctgccagaggcctggacccacatgagcaggtcaacagtgtccaagcaaggacggtcccaggatcatccacagaaggaaactggcagcaggccctccacacatgaccaaggaatctgcagtccgctaagcggggagggcgctgcccacgtcaatctacacagaaaagcacccctagaggagccagcctcaaaggaagcgcagaggagggaacgcgcctgcacgaagtctcctgggagagccttcccgaggcgaagactaaggccagagcagggccttgccacgcccggggcactcagcgggaggaaacctggaggtgccaggaatcctggctcacaaggaagaatccagaaaggcaggcttggtgctggtgacggctgaactatgaccctccacccgacctgcatctgaagccctaaccccaggacctcagaatgtgactgcttttggagatggggtctttaaagggatcaccacgcccagctggtttgtttttgtttttgtttttgagacggagtttcactcttgttgcccaggatggagtgcagtggtgcagtcttagctcactgcaacctccgcctcccgggttcaagcgattctcttgccccagccccccagtagctgcgattgcaggcatgcgccaccacacccagctgattttgtgtttttggtagagacggggtttctccatgttggccaggctggtctcgaactccggacctcaggtgatccgcccgccttggccttccaaagtgctgggattacgggcgtgagccaccgcgcgtgggccaggcatttttaacaaggggcctggtgaggattcagaactgtgaatttgcttggaataaaaaaatatatatgtc

SEQ ID NO: 396 - DNA, 2354 bp, Homo sapiens
aaaaatctggcgccctgtggagatctttagactggtcagcaaatatcaaaacgagatctcagacaggaaaatctgtgcctctgcatcaggcagccgaccttgcctaccagctcctgggtgtcctggagtctttgaggagcaacgatttgaactatttcttctacttcacccacattgatgcaggcatgttcggcgtctttagcaacgggcatctgttcatccgggatgccagtgcagtgggcgtcatcgacaagcaggaaggcagccaagaagccaacagggcaggagagaataaagacatttttagctgcctggtttccggctgccaggcccagctgccctcctgcgaaagcatctctgagaagcagagcctggtgctggtgtgtcagaagttgctgcctcgacttctccaggggaggttcccctccccagtgcaagacgacatagactccatccttgttcagtgtggggacagcatccgcccagacccagaagtccttggggccgccagccagctgaaagacatcttgaggcccctgagaacgtgtgactccagatttgcctatcgttacccagattgcaaatataacgataagttctgaagggctggtgtctagctggccttggggacaacacgcttggctctccattctcccagtcgggttgctgcaaggtagaaagaagcagctcttttttaaagatgagaagaaaggcacactcatttcttagggactgagaggggagttgtgagataccacgtggctgtctctgctggctgggacgtcctggcaaagcccgcggtgggcatcagaagacctgggtgtggacgctcactcaatgtctttgagcctcagtttcctctattctccaccagactctcctgagggtgaaagaagacacagatggagccaccactgagcatatatcccaagcatgggtcttgggacacatgctcaccacctccatcccaggtggttacaaagtgtgttctggaaaagcacagaggcggggagcatgagaaagagctgctcaggtcaggaggctggagtggagggaaggcaggggaaggacaggctccctgccactaccactttagactcggacaagaggggcccccttcctgctccctatggccctgcgtcactccccacaccatcgcgggatgaggagactgcaggccaaggggacatgcctgccaccacctagagcctggtacctgaggctccatacacctgcgcatggggcttctcgtggtgtgggaagaagccaggggtaagaagataaaggggggccggcgggggaccaatgtgttagcccaagtcttccaagaatatgtgtcaagatagagtgaatggaacaaagatttgttaggggaaatgattgtgtgtaaggaaagaaggagggagccggagaagattgggaggaccagtaagtcgagctgcaagctgagccccggtgaaggagagaatgtctggcaggagcttgctaagctcaaaatcaaagaaaggttcagcaaggctgtcagggtgtcctcaaggcaaaggcagccatcagaagagccccgtgtctcccacaaatagaccccgttagcatccctgctgcactcagtggttggcggaaacagcaaagatagatttcagagcacagcagcaggggtccctggtcagccccgctccctagagcaggagatcttgagtgggagaacattcttgttgtagccacagctgaggccctggaccagctctctccacaccgcatgctccgagttgggactctaaggagtctaggaattttcattcaaacttggccttacaggtcactcatcagaaaaatacttttttcaaggtcaaccaatagaacatactttattcaacagtttgttagtttgctttttaaatatttagccacatggtatgtaggcttccatgtacactcttgccctggcccctgaaacataagcagggggctcttctgtacatttgcccagcttccctgccagcctttaaccccaggaacctctcagtctacctcctcttttctgcctctgaatccctacctttaaagtcagaacaggccaggcccggtggctcacgcctgtaatcccagcactttgggaggctgaggtgggtggatcacttgacatcagtagttcaagaccagcctggccaacatggtgaaaccccatccttactaaaaatacaaaaattagccaggtgtggtggcgggcacctgtaatcccagctactcaggaggctgaggcaggagaatcacttgaacccaggaggcagagtttgcagtcagccaagatcacgccactgtactccagcctggatgacacagcgagactccgtctc

SEQ ID NO: 397 - DNA, 2769 bp, Homo sapiens
ttggccatttgtacatcttggagaaatgcctattccattcgtttgccttttttcttttttgagacggagacttgctctgtcgcccaggctggagagcagtggcgcgatctcggctcactgcaacctccacctcccgggttcaagcgattctcctgcctcagcctcccgagtagctgggaccacacccaccaccacacccggctatttttttgtatttttagtagagatggggttttgccatgttggccaggatggtctggaactgacctcaggtgatccacccactggcctcccaaagtgctgggattacaggtgtgagccactgtgcccggcctctttttactttgttaatggtgtattttgatagataacagattgtcattttcatgaagcacagctggtcagtttattgttgctcatgtatttggcctcatgttcgagtccctgtttttaatcatgagctggacacagccctctttagagcaactgtgaccacttgtggtgagaagtgcagcccacaccatccacgtgaggctgccacacgccatccacgtgaggctcccacacgccatccacgtgaggctcccatgcagacatttagaaggcgttttcactgcagctcagaaaatggctccaggcccccatgggcacccccatgtcaccagcgcctctggttgctgcaggtacacagggataggcagccaggcctcgaaggtgctgggcatgggtttgggtgtctgcgttgggtagagacccggagcgcccttgctgggcgtgccctaacatcccggtaccctgtgcccctctgtgggccaggacgcctggtgctgccagctgggcgtaagccctgaggagctgagggtggctgtgacttggaggatgagtaggagctcaccaggagggcgtggagccggggcgtttaatatcatcaggagcaacactgggctcagaaggcaggcacacttgccgtccctccagagccatggctgacggccaggcctggtgggctctcatgaggacagtgcctgtggttgtcagatgctgtcccttcgagtaagggatgagagccatcctgaagacgggtcagctccgtggtgaccacccgttgggagcagtgacattcaggtgcgttgcactggtggctgtgtggctgtgtggtgcggccaccaggagccatgtgggcgaggacagctgtgggctgggcacagagctctctctgctgggagtcagtcggtgctggggcgaggggaggcagagctcacagagcccctctacagctcaccctgcagctcggccccgggcagtaaacccaccatccccctttctgccgcaggaggcagtggagaaggtgacacagcacatccacggcctgtctgggaagaaggatgggctggtgcccatgttcatcaatacccacagtggcctcttcacccacctgggcgtattcacgctgggcgccagggccgacagctactatgagtacctgctgaagcagtggatccagggcgggaagcaggagacacagctgctggaagactacgtggaagccatcgagggtgtcaggacgcacctgctgcagcactccgagcccagtaagctcacctttgtgggggagcttgcccacggccgcttcagtgccaagatggaccacctggtgtgcttcctgccagggacgctggctctgggcgtctaccacggcctgcccgccagccacatggagctggcccaggagctcatggagacttgttaccagatgaaccggcagatggagacggggctgagtcccgagatcgtgcacttcaacctttacccccagccgggccgtcgggacgtggaggtcaagccagcagacaggcacaacctgctgcggccagagaccgtggagagcctgttctacctgtaccgcgtcacaggggaccgcaaataccaggactggggctgggagattctgcagagcttcagccgattcacacgggtcccctcgggtggctattcttccatcaacaatgtccaggatcctcagaagcccgagcctagggacaagatggagagcttcttcctgggggagacgctcaagtatctgttcttgctcttctccgatgacccaaacctgctcagcctggacgcctacgtgttcaacaccgaagcccaccctctgcctatctggacccctgcctagggtggatggctgctggtgtggggacttcgggtgggcagaggcacctcgctgggtctgtggcattttccaagggcccacgtagcaccggcaaccgccaagtggcccaggctctgaactggctctgggctcctcctcgtctctgctttaatcaggacaccgtgaggacaagtgaggccgtcagtcttggtgtgatgcggggtgggctgggccgctggagcctccgcctgcttcctccagaagacacgaatcatgactcacgattgctgaagcctgagcaggtctctgtgggccgaccagaggggggcttcgaggtggtccctggtactggggtgaccgagtggacagcccagggtgcagctctgcccgggctcgtgaagcctcagatgtccccaatccaagggtctggaggggctgccgtgactccagaggcctgaggctccagggctggctctggtgtttacaagctggactcagggatcctcctggccgccccgcagggggcttggagggctggacggcaagtccgtctagctcacgggcccctccagtggaatgggtcttttcggtggagataaaagttgatttgctct

SEQ ID NO: 398 - DNA, 2035 bp, Homo sapiens
cactcggttcaaggcagcgcgactgcgggtggcgcacgaccagggcgcagaccttggggcgcgcggcccatggagtcggggctgctgcggccggcgccggtgagcgaggtcatcgtcctgcattacaactacaccggcaagctccgcggtgcgcgctaccagccgggtgccggcctgcgcgccgacgccgtggtgtgcctggcggtgtgcgccttcatcgtgctagagaatctagccgtgttgttggtgctcggacgccacccgcgcttccacgctgaaactgtcccccgcgctctggttcgcacgggagggaggcgtcttcgtggcactcactgcgtccgtgctgagcctcctggccatcgcgctggagcgcagcctcaccatggcgcgcagggggcccgcgcccgtctccagtcgggggcgcacgctggcgatggcagccgcggcctggggcgtgtcgctgctcctcgggctcctgccagcgctgggctggaattgcctgggtcgcctggacgcttgctccactgtcttgccgctctacgccaaggcctacgtgctcttctgcgtgctcgccttcgtgggcatcctggccgcgatctgtgcactctacgcgcgcatctactgccaggtacgcgccaacgcgcggcgcctgccggcacggcccgggactgcggggaccacctcgacccgggcgcgtcgcaagccgcgctcgctggccttgctgcgcacgctcagcgtggtgctcctggcctttgtggcatgttggggccccctcttcctgctgctgttgctcgacgtggcgtgcccggcgcgcacctgtcctgtactcctgcaggccgatcccttcctgggactggccatggccaactcacttctgaaccccatcatctacacgctcaccaaccgcgacctgcgccacgcgctcctgcgcctggtctgctgcggacgccactcctgcggcagagacccgagtggctcccagcagtcggcgagcgcggctgaggcttccgggggcctgcgccgctgcctgcccccgggccttgatgggagcttcagcggctcggagcgctcatcgccccagcgcgacgggctggacaccagcggctccacaggcagccccggtgcacccacagccgcccggactctggtatcagaaccggctgcagactgacaccctcggcccacgactgtcttcccaagttttacagacttgttctttttacataaaggaatttgtaggaaatgcagccaaaggtgcagtcggaaaagatgcaggggaaatgtatttatgcagcgacaccccacaatgtgaacaaacagacaaaaaatctgtgccctcgtggaattgacgttctgcttgggaacacagaaaagaactcggtgatgaaataatggagatgattccagtgacaaacgacagagatggtgatggtggtcagggaagacctctctgcagaggtagtgacttgtgatgtgagctgagacctctgtcctgggaagaccaaaagaaaagcatttcaggatgagggaatggcatgcgcaaaggccctgaggctgaaatgtgcccatgtgttctaagaaatgcagcgatgctggtgtgcctggagcagggacggagggggagaatgggaggagacaaggagctgaagtagttcccgaaggaccttgtgggtgatatagaggacttcgcttttgctctgagtgaggtgggagccatagaagcttctaagcagaagagggacttgccctaattcaggtgatcacaggtgtcttgtggcctccatgggaggttgaaaaccagagaaggtgaaggggggctgcactgagccacaggaacaatgatggagattccagctaagcccagaccccgtggattctagatagattttagaggcagcagacagaattactgaggaattgagtgtaagagtggaataaagttatcaaggacaatgccaagggtggggcacccccaaatttgactctgggagactcagccaaatcctatctggtaataaaatttcttttttatttt

SEQ ID NO: 399 - DNA, 1938 bp, Homo sapiens
gtgcgcggcggccgcggcgggtgctgggagccagcgcctgcctcgccgccgccctcgctgcctgccactccgtcttggcccgttctccgcaccgtgcagaggcggcgggctggggagggagcggcgccagcacgaggttcccagccgctgggaagcccctagacgcgccgaggggccgggctacgagcggctgagaaaatgatgcatcctgttgccagcagtaatccagctttctgtgggcctggcaagccttcctgcctcaatgaagatgccatgagagctgctgatcagtttgacatatattcctcccagcaaagcaaatacagccacacagtcaaccacaaaccaatggtttgtcagaggcaagacccattaaatgaaacacacttgcagactacaagtggcagaagcatagaaataaaagatgaactaaagaaaaagaagaatctcaaccgatctggtaagcgtggccggccttcgggaaccaccaaatcagcaggataccggaccagcacaggcagacccctgggaaccaccaaagcagctggatttaagacaagtccaggcagacctttggggacaactaaagctgcgggatacaaagtcagcccaggcagacctccaggtagcattaaagctctatcccgtcttgccgatcttggttatggctgtggcactgttgcttttccttaccctatgatgcatggcagagcagttcatggggtagaggaaactagcagtgaagtcaaaccacccaatgagtgaatgaggcaggaaaagagggccaggtttagaaggaagattgtgaataatcccaaagcttcttggttttattttgatatacataattttatggcctgggctttccaaatttgttttcctgtttggtttttttcctgcttttgctcaaaaactgccatatgctgacagatgcactcagggcatgagcagcggcattgtatttgtacataggttcaagtgtaacacctaactaaatcatttttccttttcctttagagttatggtcatgtctcatgtttcattactactttggggctgttctaaatagatgctttatgtgataaacaactgaaaccattatacctattagtttgtgaagtaagcctacagtataataaagacactaacgtatttttaactgatggagcaaaaaagcaaactaatgaatcaggattacttaaggtaatggctgtgtgagtttttgtaacatttattttcacaagatgggacacatatttgtatgctttggcatttacatccacttcaaatgttaaaaaacttatttttaatgttttaggtttaagcagcttgtaatttattgatctacatggcattaattgatttaaccattatacctgaaataattcttcagtgtttgcctttgagcagtgataggttgtgtattttttaattgcctaagagcatatataccaaacactacaaacaattcatatttacagaaaatttaaactattttataaaaactgcacattacatttttggtgaaatatagtgcattctgaggatagcatatttcatataatagaaaaagaagcattctctaggtttgcatgtagctatagtcactatattttgcctttcatatagaaagttttaaagtattatgtttaaaaacatttattggctgggtgtggtggctcacacccagcactttgggaggccgaggcaggcggatcacttgaggtcagcagttcaagactagcctggccaacatggtgaaaccccatctctactaaaaatataaaaattagccaggcgtggtggcgggcgcctgtaatccaagctactggggaggctgaggcaggagaattgcttaaatccaggaggcggaggttgcagtgagccaagattgtgccactgcactccagcctgggtgacagagtaagactccgtctc

SEQ ID NO: 400 - DNA, 2517 bp, Homo sapiens
gatagagcgaccggccgaccatggcgcccggagtggcccgcgggccgacgccgtactggaggttgcgcctcggtggcgccgcgctgctcctgctgctcatcccggtggccgccgcgcaggagcctcccggagctgcttgttctcagaacacaaacaaaacctgtgaagagtgcctgaagaacgtctcctgtctttggtgcaacactaacaaggcttgtctggactacccagttacaagcgtcttgccaccggcttccctttgtaaattgagctctgcacgctggggagtttgttgggtgaactttgaggcgctgatcatcaccatgtcggtagtcgggggaaccctcctcctgggcattgccatctgctgctgctgctgctgctgctgcaggagaaggccatgcgtgagcgggaggagaggcggatacggcaggaggaacggagagcagagatgaagacaagacatgatgaaatcagaaaaaaatatggcctgtttaaagaagaaaacccgtatgctagatttgaaaacaactaaagcgctccagcacatcagtcccgacgcttcctgtgaggtgcacgctccgcagcccagcccagccgggagaccacgtggccattgcggtctcctgaccttggccagtgaacctgccagccttccaggacaggcggccggagagctgcccctgaaggacagtcctctcgtcttgcagactggtgaccttctattccctgttcatctctgtttctagatttagtcacttgaaataagaaatctttggggtttgggcttttttatactcttctcagtttgtgaaacgctaactgcacacgaagccgcctgacggcacccagcgctgtggctgtcattctcccagggcagaaccctgcgtttctctctgtccactaacaagcttcacacgcaacacagggaagtcggtttgacttttgtcctgaggagaactgaccagccctcatcattccccataaaaccacggacagcgtctgtgtgcgcatcttgagtcttcacacctgttgactcacacggcttttgctgatgacacggggctccagtacacagtctgataaggacttaacgtcctaacctcaattgtattaaatagcattggggaatagctaaacctttttaaaaaaatttattggattttcctccctgcttaaaagatttcaccagaaaaccttcatataaaaattcaggccctttttggacaatttttaaaatttgtatctttactagaacatgagaatctttttcccttggaagcttgaattataaatgtggtgtttggcctgcctcagcagcaccagttgactgctcgtgtgccagcggtgtggggaggacggggcaggacgctgcagctctctccagccctgttggcatcctcagtgcctgcaggcctctcgctgcctgttgggctgtctggggggtggccatttagggatcgtggggacggggtccaccccaagaagaaagaaaggcccgtccacaggcccggctctgggccacgtgccccggaagcaggtgtgtccagagtcagctgagggctctccccacaccacccagcaggcgctggtgctccttctgcctcatgggaccagtccagcttccagccgctctggctcgagggtggtctgagcacttccttctgagtgggcttctctgggagctctccagtggcactgctggacctgcccacgtttctgtaaaatcaggatacgtggctttagtaagcagaccaagcgcttcgtggcagggaaagcagcgtgtggggaagtcactgaaaagtgctgcctaaggaagtttggaaatagtccccgttccagattgccttgaattttaaaacattttgctttgggaaagtaggtcagcagcacctaagatcaaggatgcgttccattttcacacttcacagtcatgaaaactgagaagactgtcttcagcgtgaactaaagttcacaggcagatcactgatccagaacacttcaagaactcgtcaaacagctcgataagcctttttgactgtgtacatctgtaccgggaataacattcctaggctgaaatttccacaaagaatagaacctgtacccagttcttcaggctgatttccctgacctcttgggcatttgtatttgtagtaaagtattgcagagattcctaagtattttatagcagccatcaaaattggactttgtattgtttattcataaaagacacttggtaatagacttcagtgaactctgtatgaatgcagtagtgtgcgtgcaaaatccgcttcctgagcgtagggtgctgagctggcgctagggctcggttgtgaaatacagcgtagtcagcccttgcgctcagtgtagaaacccacgtctgtaaggtcggtcttcgtccatctgcttttttctgaaatacactaagagcagccacaaaactgtaacctcaaggaaaccataaagcttggagtgccttaatttttaaccagtttccaataaaacggtttactacct

SEQ ID NO: 401 - DNA, 2490 bp, Homo sapiens
ttagatgccaggggatctttacttccagccaagaatgatatccagaaaacacttgatgacattgttgggagatatgaggatctgtccaagtctgttaatgaacgaaatgaaaaactccagataaccttgacccgttcactgagtgtgcaggatggcttggatgaaatgctggactggatgggaaatgtggaaagttctctgaaagaacaaggtcaagtgcctttaaactctactgctcttcaggatattatcagtaaaaacattatgttggaacaggatattgcaggtcgtcagagcagtataaatgccatgaatgaaaaagtgaagaaatttatggaaacaacagatccatccactgcatcctcactgcaagccaaaatgaaagacttgtctgctcggttttcagaagcaagtcataaacacaaagaaactcttgccaaaatggaggagctaaaaaccaaagtagaactgtttgagaacctctcagaaaagctccagacatttttagaaacaaaaactcaggctcttactgaagtagatgtgccaggaaaagatgttactgaattgtctcagtatatgcaggaatcaacttctgaatttttagaacacaagaaacatcttgaagttttgcatagtctcttgaaggagatatccagccatggcttaccaagtgataaggctttggtccttgaaaaaacaaataatttgtcaaagaaattcaaggaaatggaggataccatcaaagaaaaaaaagaagctgtaacttcttgtcaagaacagttggatgctttccaagttcttgttaaatcattgaagtcatggataaaagaaacaacaaaaaaagttcccattgtacagccttcttttggtgcagaggatttaggaaaatctttggaagacactaagaaattacaagaaaagtggagtttaaaaacaccagagattcagaaagtaaacaacagtgggatctcactatgtaacttaataagtgctgtgaccacccctgcaaaggcaatagcagcagttaaatcaggtggagcagtattaaatggtgaaggaacagccacaaatactgaggaattttgggcaaataaaggtttaacatccattaaaaaggacatgactgacataagtcatggttatgaagatcttggcctcttactcaaggacaaaatagcggaactgaacactaaactctccaaattgcaaaaggctcaggaagaatcaagtgcaatgatgcagtggttacagaaaatgaacaaaactgcaacaaaatggcagcagacacctgcacctacagatactgaagctgtgaagactcaagttgagcagaataagtcgtttgaggcagaactgaagcagaatgtaaacaaagtacaggagttgaaagacaaattgacagagctgttggaggagaacccagatactcctgaggcccccagatggaaacagatgttgacagaaatagattctaagtggcaagaactcaatcaattaacaattgatagacaacaaaaactggaagaatcctccaataatctaacccagttccagactgtagaggcccaattgaaacagtggcttgtggaaaaagaacttatggtcagtgttcttgggcccttgtcaattgacccaaatatgctaaacacacaaaggcagcaggtgcagattttgctgcaagaattcgccactcggaaacctcaatatgaacagctgacagcagctggtcagggcattctgagcaggcctggagaagacccttctttacatgggattgtgaaagagcaactggcagctgtgacccaaaaatgggatagcctaacagggcaattgagtgacagatgtgactggattgaccaagccattgttaaaagcacacagtatcaaagcctgctgagaagcctttctgataaactgagtgacttggataataaactcagcagcagtctggctgtgagcacgcaccctgatgctatgaaccaacagttggaaacagcccaaaaaatgaagcaggagatacagcaggaaaagaagcagataaaagtggcccaggcactctgtgaggatttgtcagcactggttaaagaagagtacttgaaagcagaacttagtaggcaactagaaggcatcttaaaatcatttaaggatgttgaacagaaagcagagaatcatgtccagcaccttcagtcggcctgtgcaagctctcatcaatttcagcaaatgtctagagattttcaggcttggctggatacaaagaaagaagagcaaaacaaatctcatccaatatctgccaaactcgatgtcttggagtcattaattaaagatcataaagactttagtaaaactttgaccgctcagtctcatatgtatgaaaaaaccattgcagaaggtgaaaatctgttattaaaaacacaagggtctgagaaggcagccttacagttacagcttaatacaattaaaaccagttgggatacatttaataagcaggtg

SEQ ID NO: 402 - DNA, 2854 bp, Homo sapiens
ctttcagtggtgttgttgaaagggcttggcagctcccaaatgtttgcagtgtccttagtcctatgagggctgccttcttcttcttcttcttcttttttttttttttttttttgctagcttttagctagtatctggaaacatctactggacatgttggactcattttctcaagaatccactttacccttcagggaagccaggaaaagaacaagcttccaaccggtacaagtctggaggaatttcacagcctctcaaactacggagtccccggcgtgcagtggagcctcgctgggggaaatgacagcttggaccatgggcgcccgcggtctggacaagcgaggaagtttctttaagctcattgacacaattgcctcggagatcggagaactgaaacaggagatggtgcggacagatgtcaacctggaaaatggcctggaacccgctgaaacccacagcatggtaagacacaaggatggtggctattccgaggaagaggacgtgaagacctgtgcccgggactcaggctatgacagcctctccaacaggctcagcatcttggaccggctcctccacacccaccccatatggctgcagctgagtctgagtgaggaggaggcagcagaggtcctgcaggcccagcctccggggatcttcctggttcataaatctaccaagatgcagaagaaagtcctctccctccgcctgccctgtgaatttggggccccactcaaggaatttgccataaaggaaagcacatacaccttttccctggaaggctcaggaatcagtttcgcagatttattccggctcattgctttctactgcatcagcagggatgttctaccatttaccttgaagttgccttatgccgtttcaacagccaagacggaggctcagcttgaagaactggcccagatgggactaaatttctggagctccccagctgacagcaaacccccgaaccttccacctccccataggcctctttcctccgacggtgtctgtcctgcctccctgcgtcagctctgccttataaatggagtgcattctatcaaaaccaggacgccttcagagctggagtgcagccagaccaacggggccctgtgctttattaatccccttttcttgaaagtgcacagccaggacctcagtggaggcctgaaacggccgagcacaaggactcccaacgcgaatggcacggagcggactcggtcccccccacccaggcccccgccacccgctattaatagtctccacacaagccctcggctggccaggactgaaacccagacgagcatgccagaaacagtcaaccataacaaacatgggaacgtagctctgcctggaacgaaaccaactcccatccctccaccccggctgaagaagcaggcttcttttctggaagcagagggcggtgcaaagaccttgagcggcggccggccgggcgcaggcccggagctggagctgggcacagctggcagcccaggtggggccccgcctgaggccgccccgggggattgcacaagggccccgccgcccagctctgaatcacggcccccgtgccatggaggccggcagcggctgagcgacatgagcatttctacttcctcctccgactcgctggagttcgaccggagcatgcctctgtttggctacgaggcggacaccaacagcagcctggaggactacgagggggaaagtgaccaagagaccatggcgccccccatcaagtccaaaaagaaaaggagcagctccttcgtgctgcccaagctcgtcaagtcccagctgcagaaggtgagcggggtgttcagctccttcatgaccccggagaagcggatggtccgcaggatcgccgagctttcccgggacaaatgcacctacttcgggtgcttagtgcaggactacgtgagcttcctgcaggagaacaaggagtgccacgtgtccagcaccgacatgctgcagaccatccggcagttcatgacccaggtcaagaactatttgtctcagagctcggagctggacccccccatcgagtcgctgatccctgaagaccaaatagatgtggtgctggaaaaagccatgcacaagtgcatcttgaagcccctcaaggggcacgtggaggccatgctgaaggactttcacatggccgatggctcatggaagcaactcaaggagaacctgcagcttgtgcggcagaggaatccgcaggagctgggggtcttcgccccgacccctgattttgtggatgtggagaaaatcaaagtcaagttcatgaccatgcagaagatgtattcgccggaaaagaaggtcatgctgctgctgcgggtctgcaagctcatttacacggtcatggagaacaactcagggaggatgtatggcgctgatgacttcttgccagtcctgacctatgtcatagcccagtgtgacatgcttgaattggacactgaaatcgagtacatgatggagctcctagacccatcgctgttacatggagaaggaggctattacttgacaagcgcatatggagcactttctctgataaagaatttccaagaagaacaagcagcgcgactgctcagctcagaaaccagagacaccctgaggcagtggcacaaacggagaaccaccaaccggaccatcccctctgtggacgacttccagaattacctccgagttgcatttcaggaggtcaacagtggttgcacaggaaagaccctccttgtgagaccttacatcaccactgaggatgtgtgtcagatctgcgctgagaagttcaaggtgggggaccctgaggagtacagcctctttctcttcgttgacgagacatggcagcagctggcagaggacacttacc

SEQ ID NO: 403 - DNA, 2847 bp, Homo sapiens
caaacaaaaaattcctacccgagaagactcatgactctggaacacagtgagtgcagctgttatggtaagtgaaacagctaatgatctggcagaaccttcaagatacaaggtaaagagaaaaaaagccaggcgcagggtagtccacttgctgtcttttgtgtgaatctatctgtgtttttaaatgcagagactaaaggaattggcagtaggtaggcatcgcctccagggagtggaattggattactgggaggcacagagagaggtgtactttcttttcactgcaaaccttttgtgcatccagccttctgccttaaaaaaaaaaaaaatctgcatatggatcattcttcaaacaacagaaaaaggaaaccaaataaaaaaaaatctacccaaagaaaattttttcgtaataaaaattgttccaagcctcagagctggctcccatgttttgagcaacatcagctattcatgtattcagctgaagctcatccttaggtttttgatcaagctgtgccatgtttttcatttcctttgatagggtttctcagttcccgtcttgtcagtgaagtggtttttagttgaactgttatttgcaatagatgaaagtaaacagtgcaagacattaattgtggtgtttctactttaaaaacaatcagataaaattctagaacaagatttgctgttcggtaggaagatcagattcttttccctatacacttaatgctacgtattcatgctccagtgcagactgctggcaaggtaaagaggctgacaaccagagttgtaattaggtcctgcttgtttcctttagagtttacagtccagaaagttcatggaaataatgagagtcttatagcattttgttatgcattgaaatgtattctcatatgttaaagtcctattccccagtactttagaatgtgacctgatttggaaataaggtcattacagatgtaagtaaagatgaggtcacactggagtaaggtgggctataatccaatatgagcatgtccttgtagaaagggaaaatatttacacagccacatacacagggagaactccatgtgaagatgaaggcagagaccagagtgatggttctaccagacaaggaatgctgaagattggcagcaaactaccacatgctaggagagggtaatgacacagattcttccttgcagcaatcagaagaaaggacccctgctaacactggatctctggcttctgggatccaaaacgactcagtggtcagcggaaacttgatgatagcatagtggtcaagcttgtttctcctgggagcgctcttccgaggatatttgggctgtctccggagtcgcagtgtcttcggccgccggaaggaagaagagtaagggggaatgtgtggaagtacccaacatggatggggagagctggaaacgtctgcctgctctgagctgtgttggaaacctgaggaggaagttgccattaatttctgcaagaaaaaaatgaaagtgtaccagtcagagttgttaaagcagaaaaggattttactgaaagaacataggattgctcccagagcttccaggagggctgatgaacaagccttgagaagccagcaggaagaatggcaggccaggcaggcagagccatggccaagactgtaccacagatcaacctcagggaagcacactgatgcctctacagggactcagacatctcagtttcaatcagtaccaccaatgccactgaacactggacttggctgctgctgctttcaccactgtaatggattctccactttgcctgtttctttgtccaaattcacagtgccagcctgctgcatttaattgaccaggtctgtttcagtcacccatgacttaaactgccaggggtgctggggaacaatcatcaggttttggggttcccatgctgggaagtgggcatgagcagtgaatggagttaatagagggatgatataccaggaagttaaaaaaaaagaaattacagtcatctacaatattgagagaaatgattttttataaaaagcagtttttcttctatgctgcctatgtgaaagcaataaatatccaaagcaatgttatgagtagtgtattaaaattaacatgggtattttaagacttctttgggaggtgagagcaggtccatatgtacatacaaatcatttttgagatggcccctggagggggttctgtggtaagaacctgaggagggcctcttagagtagtcctgattgatagttgtcaagaaaacagggactttacttgacaactacaagaatcttaatttttccaaccaccagtgaacttggaagaagacttcaagtttttgatgagatcatggcattgactgacatcttgatttcagcctcgtgagatgttgattagaggaccaagttatcctgctctggactccttacttaaagaaactcagatattagatttgtgttgtattaagttgctaaatttatggtaatttgttatgcagcaatagaaaactaatacagtgacaaataaaatattaccaaaatgttcttcaatagggacagattaagtaaatgatgatacattcacacaatggagtaatattagttttaataggaataaagaatatctgtgtgaggtgtttttatatgctaacttttgtataagaaagactatgaatacatacacaccaatgcttatattttcaatatgaaatagtaggatgataaatcaaattaaataaaaaatggttacttagaagaggagtcaaggaccaaagagaagaaaacaggattgacaagagaattttgtaaatataccttgttatgtttttgacttcggtactatgtaaaatgtttacataatgaaagct

SEQ ID NO: 404 - DNA, 2849 bp, Homo sapiens
attttcatttccttgtgacattccatttgtttaatcaaggctaaatgtattatttaagacaataattagtcttaatgcagaaggacaaatggaatgtcagttactttgctttttttttttttgagacagcatctcgctctgtcagccaggctggagtgcagtggcatgatcttgactcacggcaacctccacctcctgggttcaagcgattctcccacctcagcctccagagtagctgggactacaggcatgcgccaccacgcctggctaatatttgtatttttagtagagacggggtttcaccttgttggccaggctggtcttgaactcctgacctcaagtgatccatgtgcctcagcctcccaaagtgctggcgttacaggcgtgagtcactgtgcctggcctgctgtttgttttttatactgtattctgtaggtatttttatgtacattacactaatgttattcactctttggtgaccttgacaaaatggagctacagagtttggtataaaaagttctgggccaggaaacaggaagcctgaattctgatctctatcctgctgctaccaactctggacttcgagtagtcatttagcctctgagttctccttcttcagtccaagttattgataataatcaagccctttatcatttagggtcttattttgccatggcttttgcttagttttgtacagtgtatatgtcaacatgtaaaagccatttcatggtattaagtactgcccaatttaagtccaaacgcagtagaactgaaaactccgcattggttgctttgaaatggtctctctgatgatactggagtggcagagtcgttggagtccagtctgatgcaacgaatctcataaaataaatagtcctgtagtcccggctactcagggtgctgaggcaggagaggattgcttgagtccagaaatttgagaccaacctgggcaacatagcaagacctcatctcttaaaaaaaaaatggcaccaagtaaacattagctctttatatggcaccaagtaaacattagctttataagcccagtgtgagctagttagaatttcagatccttttcctgcctgccgaagtgaaaactctgcttggaatcttatgttttatgtgcagtatgttcagattttctagctgggattgtctgacgtctaacttgacttttactcctcttagccctcccaaaccgaaggaccctgtatctgcagctgtgccagcaccagggagaaacaacagtcagatagcatctggccaaaatcagccccaggcagctgctggctcccaccagctctccatgggccaacctcacaatgctgcagggcccagcccgcatacactgcgccgagctgttaaaaaacccgctccagcacccccgaaaccgggcaacccacctcctggccaccccgggggccagagttcttcaggaacatctcagcatccacccagtctgtcaccaaagccacccacccgaagcccctctcctcccacccagcacacgggccagcctccaggccagccctccgccccctcccagctctcagcaccccggaggtactccagcagcttgtctccaatccaagctcccaatcacccaccgccgcagccccctacgcaggccacgccactgatgcacaccaaacccaatagccagggccctcccaaccccatggcattgcccagtgagcatggacttgagcagccatctcacacccctccccagactccaacgccccccagtactccgcccctaggaaaacagaaccccagtctgccagctcctcagaccctggcagggggtaaccctgaaactgcacagccacatgctggaaccttaccgagaccgagaccagtaccaaagccaaggaaccggcccagcgtgcccccacccccccaacctcctggtgtccactcagctggggacagcagcctcaccaacacagcaccaacagcttccaagatagtaacagactccaattccagggtttcagaaccgcatcgcagcatctttcctgaaatgcactcagactcagccagcaaaggcgtgcctggccgcatcctgctggatatagacaatgataccgagagcactgccctgtgaagaaagccctttcccagccctccaccacttccaccctggcgagtggagcaggggcaggcgaacctctttctttgcagaccgaacagtgaaaagctttcagtggaggacaaaggagggcctcactgtgcgggacctggccttctgcacggcccaaggagaacctggaggccaccactaaagctgaatgacctgtgtcttgaagaagttggctttctttacatgggaaggaaatcatgccaaaaaaatccaaaacaaagaagtacctggagtggagagagtattcctgctgaaacgcgcataggaagcttttgttcctgctgttaatgcgggcagcacctacagcaacttggaatgagtaagaagcagtgcgttaactatctatttaataaaatgcgctcattatgcaagtcgcctactctctgctacctggacgttcattcttatgtattaggagggaggctgcgctccttcagacttgctgcagaatcattttgtatcatgtatggtctgtgtctccccagtcccctcagaaccatgcccatggatggtgactgctggctctgtcacctcatcaaactggatgtgacccatgccgcctcgttggattgtcggaatgtagacagaaatgtactgttcttttttttttttttttaaacaatgtaattgctacttgataaggaccgaacattattctagtctcatgtttaatttgaattaaatatattctgtggtttatatg

SEQ ID NO: 405 - DNA, 2243 bp, Homo sapiens
gatcagagaaaaacagaaagagatagagacatgaagagtacttcaaaaaatcaatgaatctggaagctggttttttgaaatgattaacaaaatagactgctagcaagactaataaagaagaaaagagaaaagaatcaaatagacacaataaaaaatgataaaggggatatcagcactgaccccatagaaatacaaactaccatcagagaatactataagcacctctacacaaataaactagaaaatctagaagaaatggataaattcctggacacatacaccctcccaaggctaaaccaggaagaagtcgaatccctgaatagaccaataacaggttctgaaattgagacagtaattaataacctaccaaccaaaaaaaagcccaggaccagatggattcagagttaaattctaccagaggtacaaggaggggctggtagcattccttctgaaactattccaaacaacagaaaaagggggactccgctctaactcattttatgaggccagcatcaccctgataccaaaaccaggcagaaacacaacaaaaaaaagaaaatttggggccaatatttcttatgaacattgatgtgaaaatctcaataaaatactggcaaattgaatccagccacacatcaaaaagcttatcatcacataaacagaaccaatgacaaaaaccacatgattatctcaatagatgcagaaaaagccttcaataaaattaagcaccccttcatgctaaaaactctcaataaactaggtattgatggaacacatatcaaaataataagagctatttatgacaaacccatagccaatatcatactgaatggacaaaagctggaaggattccttttgacaaccggcacaagacaaggatgccctctctcaccactcctattcaacatagtattggaagttctccccacagcaatcaggcaagagaaagaaataaagcgtattcacataggaagagaggaagtccaattgcctctgtttgcagatgacatgattgtatatctagaaaaccccatcgtctcagcccaaaatctccttaagctgataaacaacttcagcaaggtctcaggatacaaaatcaatgtgcaaaaatcacaagcattcctatacatcgaaaacgggcaggcagagagccaaatcatgagtgaactcccatttacagttgctacaaagagaataaaatacctaggaatacaacttacaagggatgtgaaggacctcttcaaggagaactgcaaaccactgctcaagaaaataagagaggacacaaacaaatgtaaaaaaattccatgttcatggataggaatgatcaatatcatgaaaatggccatcttgcccaaagtaatttatagattcagtgctatccccatcaagctaccattgactttcttcacagaattaaaaaactactttaaatttcatatggaaccaaaaaagagcctgtatagccaagacaatcctaagcaaaaagaagaaagctagaggtatcacgctacctgacttaaaactatactaaaaggctacagtaatcaaaacagcaaacagcatggtactggtaccagaacagatatatagacccatggaacagaacagaggtctcaaatagcaccacacagctacaaccatctgatctctggcaaacctgacagaaacaagcaatggggaaatgattccctatttaataaatggtgttgggaaaactggctacccatatgcagaaaactgaaattggaacccttccttacacctaatagaaaatataactcaagatggattaaatacttaaatgtaagatctaaaaccataaaaaccctagaagaaaacctaggcaataccattcaggacataggcatgggcaaagactttatgactaaaacaccaaaagcaatggcaacaaaagccaaaattgacaaatgggatctaattaaactaaagaacttctgcacgcaaaagaaactatcatcagagtgaacaggaaacctacagaatgggagaaaatttttgcaacctatccacctgacaaagggctgatattcagaatctacaaagcacttaaacaaatttacaagaaaaaaaaacccatcaaaaagtgggtgaaggatatgaacagacgcttctcaaaagaagacatttaactttgggaggctgatgtgggcagatcacaaggtcaggagatcaagaccatcctggcaaacatggtgaaaacctgtctctactaaaaatac

SEQ ID NO: 406 - DNA, 1962 bp, Homo sapiens
catcagacctctctcagatcagtcaatgtttaggctctttctcatcagaccccactaaatatatacaggaattccaatatctaactctgtcctacaacttaacctggagtgacttaaatgtcatcctgacttctactctctccccagatgaacgggaaagttttttctctagcccaatctcgtgctgataaccgccggcttcatgagccagacctccaggaaggcattagagcagttccccgagaggatccccaatggaactatcaggcagattccccaggtacagctaggcgagattacatggtttcctgcctagttgaagggcttaaaaaagcagcttacaaagctgttaattatgacaagcttaaagaaactacccgaggtaaagacgaaaacccagcccaggtcatggcccacttagcagcaaccattagatgctatactgccctagacccagaggggccagaaggccgccttattcttaatatgcatttttatcacccaatccactcctgacattaggaaaaaacttcaaaaattagaatctggccttcaaacccagcaggaattaatcaaccttgccttcaaggtgtacaataatagagaggaagcagccagacggcaacgcatttctgagttacaattacttgcctctgctgtgagacaaaacccagccacacctcctgcatacaggaacttcaaaatgcctaagccgcagcaatcagacactcctacaagacttcatcaggatcttgcttcaagtgccagaaatctggccactgggccaaggaatgcccacagcccaggattcctcccaagccatgtcccatctgtgcaggcacccactggaaatcagactgcccagctcgcccgacagccactcctggagcccctaaagctctagcccaaggctctctgactccttcccagatctattcggcttagcgactgaagattgacgctgcccgatcgcctcggaagtcccctggaccatcacagaagccgagcttcgggtaactctcacagtggagggtaagtccatcccctgtttaatcgatacgggggctacccactccacgttgccttcttttcaagggcctgtttcccttgcccccataactgttgtgggtattgacggccaagcttcaaaacccctgaaaactcccccactctggtgccaacttggacaacactcttttatgcactcttttttagttatccccacctgcccacttcccttattaggccgaaatattttaaccaaattatctgcttccctgactattcctggagtacagctacatctcattgctgcccttcttcccaatccaaagcctcctttgtgtcctctaacatccccacaatatcaccccttaccacaagacctcccttcagcttaatctctcccactctaggttcccacgccgcccctaatcccacttgaagcagccctgagaaacatcgcccattctctctccataccaccccccaaaaattttcgccgctccaacacttcaacactattttgttttatttgtcttattaatatcagaaggcaggaatgtcaggcctctgagcccaggccaggccatcgcatcccctgtgacttgcacgtgtacatccagatggcctgaagtaactgaagatccacaaaagaagtaaaaacagccttaactgatgacattccaccattgtgatttgttcctgccccaccctaactgatcaatgtactttgtaatctcccccacccttaagaaggttctttgtaattctccccacccttgagaatgtactttgtgagatccacccctgcccaccagagaacaaccccctttgattgtaattttttattaccttcccaaatcctataaaacagccccacccctatcttccttcactgactctcttttcggactcagcccaccggcacccaggtgaaataaacagctttattgctcacac

SEQ ID NO: 407 - DNA, 2647 bp, Homo sapiens
gatgacgtcacagggcgttcccgcccgggactaagccggggagcgcatcccggctactgcgggtcctgggtcttcacctgcggagccttacggcagctgagcggtgggaggcgagtccggggctccctgatcttccgtaggctcccagaggcgcctggcctccgcagagctgcaaaggcggcagggcttggtggtcgggctgtgtgttcttccgtttcttccttgtcgctcttgggtcgggccccaggagccagggatcggcgggagttgagagctggggcaggagccccagccgggaggccgaccgggtggactgggcggtgacagcagcgcttccttcccgcagggacctgagccgcggcgctaggatgggaaacagtgcgctccgcgctcatgtggaaacggcgcagaaaactggtgtctttcagcttaaggaccgagggctgaccgagttccccgcagacttgcagaagctgacgagcaatctcaggaccatcgacttgtccaacaacaagatcgaaagcctaccgcctttgctgataggaaagttcactctgctgaagagcctctccctgaacaacaacaaactgactgttctgcctgatgagatatgcaatctgaaaaaactagagacgctaagcctaaacaacaatcaccttagagagctgccgtctacctttgggcaactctctgccctcaagaccctgagcctctctgggaaccaactgggagcattacctccccaactttgtagcctacggcacctggatgtgatggatctctctaagaaccagattcgaagtatacctgactcagtgggagagctgcaagtcatcgaactcaacctcaaccagaatcagatatctcagatctcagtgaagatatcttgctgtccacgccttaaaattcttcgcctggaagagaattgtcttgagctcagcatgcttccccagagcatcctcagtgattcccagatctgtctgcttgctgtggaaggcaatctttttgaaataaagaaacttcgagaactggaaggctatgataagtacatggagaggttcacagccaccaagaagaattttgcgtgaagttctccaggactatggaaaccttacaggatactgacttagaacctctgttggaatgtggctgagtcaaagcctcctgttgttgttaggggtatctacagtaaggagatgatacttcaggagattatatttcactcaatgatcttttctcatttcagggctcttctcaaataagctaaaagaaaaaggatcaggagacaggaaaagtcttccgttttgagtcatgagtagggcaatagacaaggttctcttcaaaaccatcattagtttggctttaagaaaccagtagctagctgctatttatatggtgagggggtgctgcctggtaacagaatagctccacaccacagcttgagattttgtttagtttcactgtgtgagctttcataaagtctgttgccattccatctctgtgttaacacttcgtatttttatgaaattcagataatttgtgagaggctggcatggatctaaggatttattatttttattctagtccatcagttcagtcgcagtttttatactaggactttaggatgtacataaatgtgtgactgtttgtcttgattaaaagtgcactttggcctgggcatggtggctcatgcctataatcccagcactttgggaggccaaggcgggtggctcacttgaggctaggagttcaagactagcgtggccaacgtgaggaaaccctgtctctactaaaaatacaaaaattagctgggtgtgttggtgcatgcttataatcccagctacttgggaggctgaggcaggagaatcgcttgaacccaggaggtggaggttgcagtgagccgagattatgccactgtactccagcgtgggtgacagagtgagactctgtctcaaattaaaaaaataaaaaataattttttttttttaaagtacgctttgttggctgggcacggcgactcacgcctgtaatcccagcacattgggaggccaaggcaggcagatcacgaggttaggagttcgagaccagcctggccaacatggtgaaaccctgtctctactgaaaatacaaaaattagctgggcgtggtggtgggtacctgtaatcccagctacttgggaggctgaggcaggagaattgcttgaacccaggaggcagaggttgcagtgagccgagatcatgccattgcactccgactctgggcaacagagcaagactctgtctcgggggaaacaaaaaaaaagtgtgctttgtcaagagaagcaccagcagacctctaagaactgctctctaaggctgcggtagcaaattatctactattgcaggtgccttattggtagagggctctgaagagccaaaactgtatatgcaacacttgtaagataaaagggactttaataatcaagattttcttgaagatttgttagaaataatgtcttatttctggtaacctttccctttttgtatttataactctactaaccaaattacctatcaataaaccattactataatattttaaaacaacctatgtttatcaagcttactctctgagtgacagaatatactaaataaagaattttttaatg

SEQ ID NO: 408 - DNA, 1910 bp, Homo sapiens
atccaccgcctagcagagccgcgggccacagcgggacggcacagttccagcagggcagcggctgcgcacgccggctccggctcgcacacaggcgtaggccgccctctaccgcctgaaggccggaggctgagcggggcgcgagcggatcctggatcccgggaggagactcgcctccagagaatgctgtgctccctacagcgccgggaatggaccggcccgtgccagctcagtcggcggccctagggggcacccgcactagaggttttgaagctggctccttgctacttttaggggtgcgcgctgctgctgctcagcccctgcagcccgcatttggccgcttgactgctgcttccagcgcgatcctacaatggcatcgctcccccaggagactcagcgaagccctactttatcttgtaagagctgtttccacattcactcgaagagaaagaccccccccacgagggcctgagttcgatgcccggcctctcccgacccgcagctgcgacagcccctctgaggcggaagtttatttagtacgggaaagagaacagcacggggagaggggagaggctttgccctaggatgcgtcctacccgctcggactcggaaaattcccggcgcccgcgatgcagagcagtggaccgaagggctgccccagagcagcccagaccgccagctgagcgggaggaccggagcgcgccgccccagcacacaaagtagtcgcgggacgaggggtgccgccgaggccaatcagagctgcgcgccgcgtgagtggagtgcgagccggccaatcagagggccggaagatgagcttcccgttccaaactcttccctgtagccttgggacccagatcccaagcctggggcgctttacggtgggagagcgaaatggtgcccttaagacaagaaccatttctctaggcttgggcattttaaagtacataccggggatacttatcccaaagcaagtagcggcggccttttaggtgttaaatattaaaagatcacagaaaggagatttaagaggcagtggcctgtcaaggttgcaatctgcctaatattcataaattcacatatttattgagaccttatgtaccaggaactctatcacagatacacaaataaggtactgctgattcaaaagaaaatcccttgtcctcaagcagctcaggttgtgagggaggctttcctagaccttgagactcgtatttattgtcagctctttaaacaaaaagcactctatgaagtgctgtactttacagtcgtttttatgattatctccctgtgagaaaagaaaattgaaaggaaagtagagtgacttgtccaagatcacacagaagatgtactagcagagccagaattatgttctagctcagtttgggtgtcatcattcaataaaataattcaataacaatttgtaaatgcatggatgctctctcccatgagatttctgtactaaacgtataagcaggacaaaattctggtataaaagtgacacactttggttgttggaaatgaacacaaattttagacttatgtgggattaaaggtaaaaatcttaccagtcatactttagataatttttagaagtcagaggtggggtggatatttacttcttagtttaaacacagcattttaaaaatattttaacaagcaagcgtaactttttttttttaagatagaagaagcaggaaggatcacttaagcccaagagttccaggctgcagtgccacatcgtgcctgtcagtagccacttcagcctgggcaacatagcaagaccctcatgtctaaaattaaaaataaaatttaaaaaaaagaactacttctagttggttaataatcatgatagtttacactgtataatactttgagatacccaagtacaaagctttacatttgcctaaaaattc

SEQ ID NO: 409 - DNA, 2019 bp, Homo sapiens
gtgtgaccctgccgggccaggagccgggaagaagagccggtgttctctctgttcctcgctagcagcttgggacattagcgccgagatgtgccccatatctgagctgccttcagctccttggaaacggatccaggtttttcctaccccttccgactgccccatccctctccagagaatccttttctgccctggtgatcaaggcgcgtcaattcaactctccctagagtggccacagtactggagatccaaagatgacttaagacatggtacctacgctggctctagtggaggagacagacacgtagtcaactgaactattttacaaacctgaaatatgtgccacattgagataaatccaaaatgcctagaatctttgttcagctcccctttacttagttcttaagcccaaaagaggtcttcattctgcttacagctcctggtgctctaactccagagcattttgcatacatctttagggttattctcacattgaactgtatttttgtgaatgcctttctgtccgaatccaataccagtggtctaacaattcacaaaagaaaacagaaatattggaaactgtactatggagaaattagggacaaaaggtaacagtatattgatattaacattgctgctagtcctttgcactagtaaataactgctatttgataaatgatcacaatgtgtaaaacactgtagttacaagatctcatttaatccgcctaacaaccttgccaagtattaataaaacccgttttaggcgctgacactgacctacagcgcctcagctccagcgccatggcgccctccaggaagttcttcgtggggaggaactggaagatgaacgggcggaagaaatgtctgggggagctcatcggcactcagaacgcggccactgtgcctgccgacaccaaggtgatttgtgctctcgccactgcgtataacgagttggcccggcagaagctagctcccaagattgctgtggctccgcagaactgctacaaagtgactaatggggcctttactggggagatcagccctggcatggtcaaagacttaggagtcacgtgggtggtgtggtcctggggcactcagaaggcgtgtctttggggagtcagatgagctgattgggcagaaaagtggcccatgctctggcagagagactcggagtaatcgcctgcattggggagaagctagatgaaagggaagctggcatcactgagaaggttgtttttgagcagacaaaggtcatcgcagataatgtgaaggactggagcaaggtcatcttggcctatgatcccgtgtgggccactggtactggcaagactgcaacaccccaacaggcccaggaggtacacaagaagctccgaggatggcttaagtccaacatctctgatgcagtggctcagagcactggtatcatttatggaggctctgtgaccaaggcaacctgcaaggagctggccagccagcctgacgtggctgccttcctcatgagtggtgtttccctcaagcccgaattcgtagacatcatcaatgccaaacaatgagccccatccgtcttccctacccttcctgccaacccaggaactaagcagcccagaagctgagtgactgcccctcccctgcacatgcttctgatggtgtcatctgcaccctattgtggcctcatccaaactgtatcttcctttactatgtataccttcaccgtgtaatggtcgggaccagaccaatcccttctccacttactgtaattgttggaactaaatgtcaccaatgtggcttctccttggctgagaggtgaaagggatggaatttgctcctgggtcccctaggccctagtgaggggaggagagagaacccatcctctcccttcttacactgtgaggccaagcagaagccaggggtgctgccctctcccacggtgccaacgcctttgtgtgttgtgtatgtgagccatcccacatgtgagggaaataaacccctggcacttaaaaaacaaacaaaaaaacgcatttt

SEQ ID NO: 410 - DNA, 3003 bp, Homo sapiens
ttttggcttttgggaagtcatggggaaaagaagtaaagctgaggatggcgaaatacctttgctaaacccagagacactgcacctgaatcctgctcagtgttttgtaggcaaccaactgccttctgccactggtatccggaaggggaaatgagttaccttaagtgggccaaagtggggaaatactaacagtacagctagaaaccaagagctgtcgtgaaagccctgaatgggttcccactgctatttcagacaaaactgatgcagttaagcctgaatttcctggcaagcgcaagggtagatttttccaaaaggctttttagactgcaaatacacagcctttccatgtctaatcacaaaagcaaactgctggacacatgctctctgttcccagctggttgtgtatgttttcttcacacttcaacagaaacgtgccaaggtgtgacatttatgaatttcgccaactgggaactgtgcacacaaatcgttcttgcttgtggtgtgggaaaatgatgaatgggggctgttctgcctggggaggagggctgctgtcactctggcatgcctacagccttatttattacacaccaaagtataaaaccactccgccgctgcagctctcagctccagtcctggcatctgcccgaggagaccacgctcctggagctctgctgtcttctcagggagactctgaggctctgttgagaatcatgctttggaggcagctcatctattggcaactgctggctttgtttttcctccctttttgcctgtgtcaagatgaatacatggaggtgagcggaagaactaataaagtggtggcaagaatagtgcaaagccaccagcagactggccgtagcggctccaggagggagaaagtgagagagcggagccatcctaaaactgggactgtggataataacacttctacagacctaaaatccctgagaccagatgagctaccgcaccccgaggtagatgacctagcccagatcaccacattctggggccaggtactcagaattctcttctaaggatttttgtgaaagcttaatgagtgttgttgttgttgttgttttgttgttgttctttttttggctaagattcttagaatcaatgaatgctttcgagaagttcgctaagctgcttgtgaatctctttctggattgctcttgggtacaagagaaactgtcggtctctgttagaaaatcagcagaggcagcaatgatgtgatgggatagtggccgtagcatcaccccatcagaaaggggaacctggccagccagcttcctgctatgctgggacttgatttccttcttgctctgttggtccggaaaggagtgctgacccatgcagacagatcggtcactgtagacaatcatttgttgttcttaagagaattgggctttcttcatcccttccggcagggagaagctgccctttgagtttgtcaaaagcaatcaaagtttttttactttgatttgtgagtatactgtgacatttcatggcagtcttgtttatttgatttatagcattctagattgttaagcctctctgttcagcctgttttaaaaagaattaaagagttaaataaaaaataaactgtttgaaatgcataccttatagcatgatttgatgcctgataatcacagaggacttgatctatttctcaggttataaattcagctctaaggaaatatctttaactcttggtagtatgagagtgagttaagatttcagtatagtgaattgcaaattggtgaaactcaatgtaatttaaaatattaagtacaggaagagacatattttgaattaccctctagacatctagtatgctgaaaactgttagagggggcaagaagagttactttgagttatatgatatttgaacatacaggtttttactacaagatttgattactttaatgcattaaataggacctgaagaatttcttgtaattgaaatctaaatccttcctaccatggattcagaagtttgggttggttgtttggttatatggtcagaccaagatcacacacagaatcaattgcagatttgaaactaacccagaacttctaacttgaccacacaaggcagttgcccaaaccattctgtgggggatgcatccagagaaaattgcttctttaaggagccacggaagaaatgataatctctaaatatgatcctatcttttgaaaaccacttttagagattgtctattcatctgataatcttttggctaaagggtaatgattaacactaatttgtgtgtgggtttttgtttgtttttgttttgtggtgaagatattttcacttgtgtccaagacttgatctggactttccatttcacacatggtatccttcttggccaacagatggtatctttcctggccatgacagtgtgattcccccagaggaagcagaaggaagttaaaggttgtctttggtcattatgtcctgacaaccaacacccagcaggccactgaaattcaaatcacatttctccttcactctaccttctaggttcctgaagtattttcaaacaaaccaccaacaggagatattgaggatatttagagttactgacattctggaagttttcaatacaactcctctaccaacggctatggaaaccacagtttgcatttaggattgtgctatgttcttccttctttccctacttcccctgtccctcttctttgatcgtaattcaattttcctcttattcattcagttcccgtgtatttcttgtgcttctactttgtaccaaactttaaaaggggggccagggatatataaagataaatatgcctgagctcccatgtccaaaccatcctgaagggctgtagtagagataaatttttgttaattaaattaagtttaattaaatgccatgtgttaaataaagtcagtacatgaaaggcaattgggcaaaggtgtcaaagtactgatagtttttgagctggatcttaaaagatggtattaaaagaatgactatccacagc

SEQ ID NO: 411 - DNA, 2455 bp, Homo sapiens
agacctacttgactgcggtcatcctagctgaccataaaacaggaagtaaacagagatgggaactttgtccccataaggatggagctttaaaaagaacagataatgggggctgggcccatgaggtgtgtgctctgtatattccggaggtacaatttgccaatgattccacaatggaaccaattgttttacagtctgttccacatgatcattgtaataaggttgagactgagctaaagttaatctgcggcgatgttctggatgcactggacaaacacctcattccagcagctaccactggcaagtccaaggttttctattatgaaatgaaaggggtctaccacaggtatctggcagaatttgccacaggaaatgacaggaaggaggtggcagagaacagcttggtggcttacaaagctgctagtgatattgcaacgggtttctccatgttggccaggctgggctcgaactcctggtttcaagtgaacctcccaacttggcttcccaaagtgctgagattacaggcgtgagccaccatccccgccccctcaaaatctgttaggacgacagtctcgccaaggcaatgcagtcgcaatatgccgtttccattgcaatcacaatatgacatttccatttactttggattatacgtcattatgaatattaacaagacttaaaaaggacaccttcggatttcctgtctttgtgggctgatggactagaggaaagatgcctgttgacggtcaaaggcagagcctcttcggcagcttcttaaagcgccttctttaacagagaaacaatctgcatggggtctagaacggttctgaaatcctgctgaaggtttcgaaacttcctggggggggtctcctgccagagcgcctacgctgcctctgggctggctggccagtgagccccgtctcacagcctgacagtccccacatcagcccggaccgtctttcgggaccagccccatttgcacagcctgagctgtagagggccctggagttcggagttcttgtcccaactgtgcccctgcaggcctgttccacccactgaggctcagtttccccatgtgcctaatgaggaagtcatgctaggtggggcttacagcctcttgcagctttgccattgatcacttccgtgtcttcagagaggctgccaagtctcctctgaatgaagttccccaaaaagcaaacgtaagaaaatacacagagcttacccagacaccaggccctttagaaatagaccatttcttaccttaggcccccagaaggtcctcattctagctttgtggagaaaagaagagtctttgcctcagcccccagaggttggggtggggtggctgaattttgaggctgggattggcaactctggtgaagcccaaagtgacacggatggtttcaaagccacctagaggataaggtgtcaggacagtgacaagaccccaggttcctatcacacaccagagctcactgagcctccacctggggtctctgctgaatctctgacaggctaggagagaagggactggggttactgacccccagaaagtcagagaaagtggcagttggaggacctgggtttgagtcctggatcaccccttccccgccttggcaaactactcagactctggaaacctgtttcacctgtaagatggggatgacaatcaaacccaccttgcagggccgtgaagatgcttaagacaagtgcatgcaaaaactttcacacacacaaagccttcctaaagatggggagacaaggcctcatgagcagcaggtggccaggcactatgtgggggctggagtcctgttttcccttcaacctgggaaaggactgatgggcacttagtaggttttgaatcatgaccctggacctcaggtggcggtatgctttgtgtctgcagcagaaggccccagcctcgtgcctgtgagtcccactaccgatgttgaaggggtggacagcaggcgggtgagccccaggctggcagctagcaagacctctcacgtgtgagcccagcaccccacttcccctgaaatgtgatgtccagtgctccaggctgggggccgtggatcctgattccagctgtgtgagggctggaaggccctgggcaggtcacctgacctctctgggcctatttccatcacacacttgaggggctgagcacactggactctatagctgtacaactccttggctctgcttttgttcctgagggccccttagtaggcagggaaagtgagggcctcagggctgggccccaagactcagatgctctcaaccccttcctggagtgcctaactcaggggagcagacaggcccagcaggcagggtgcctctcttgctcaactcctggagctatatgtttttttagcttactattttacttaagaatagatcatgagcattgactattctaaaacatgactttcatgactatataaaagtccattgtatcaat

SEQ ID NO: 412 - DNA, 3614 bp, Homo sapiens
agttgctgccatggagtcagccgggctagagcagctcctacgggagctgctgctaccggacaccgagcgcatccgtcgggccacggaacagctccagatcgttcttcgggcccccgccgctttgccggctctctgcgacctgctagcctcggcggccgacccccaggtgagacccctgactctcccctccgagcttcccactgtacgccaccggtcaagccccagtattcgcccactgcggtccgctcagcaccttcctgcccggacccccacgtgcttgcttcctcgtcctagatccgccagtttgcggccgtgctgacccgcagacgactgaacacccgctggcgacggctggcggcggagcaacgggagagcctcaagtccctgatcctgacggccctgcagagagaaacagagcactgtgtgagcctcagcctggcccagctctcagccaccatttttcgaaaggaaggcttggaggcctggccacagcttttgcagctgcttcagcacagtacccacagcccccacagcccagagagagagatggggcttttgctgctaagtgtggtggtgacctcccggcccgaggccttccaaccccaccaccgggagcttcttcggcttctgaatgagactcttggtgaggtgggctctcctgggctgctcttctactccctgcgcactctgaccaccatggctccctacctcagcactgaagatgtgcctctcgctcggatgttggtgcccaagctgatcatggccatgcagactctgatccccatagatgaggcaaaggcctgtgaggcccttgaggctttggatgaactgttggagtcagaggtgccggtcatcaccccctacctctctgaagtcctcacattctgcctggaggtagctagaaatgtggccctgggcaatgcgatacgcatacgtattctctgctgcctcactttcttggtcaaagtcaagagcaaggccttactgaagaatcgtctcctgccacccttgctgcacacccttttccccattgtggctgctgagcccccaccaggccagttggatcccgaggaccaggattcagaagaggaagagttggagattgagctgatgggggagactcccaagcatttcgctgtacaagttgtggacatgctggcactacacctgccccccgagaagctctgtccccagctgatgcccatgttggaagaggctttgcggagcgagagcccataccagcgcaaagctggactcctggtgctggccgtgctgtctgacggagctggcgaccacatcaggcagagactgctgcccccactgctgcagattgtgtgcaagggcctggaggacccctcgcaagttgtacgcaatgctgcgctgtttgccctgggccagttctcagaaaacctacagccccatatcagcagctattcaagggaggtaatgccactgctcctcgcctacttgaagtcggtgcctcttggacacacacaccacctagccaaggcctgctatgccctggagaattttgtggagaacctagggcccaaggtgcagccctaccttccggagcttatggaatgcatgctgcagcttctgaggaaccccagcagtccccgggccaaggagctggctgtgagcgccctgggagccattgctacggctgcccaggcctcgctgctgccctacttccctgccatcatggagcacctgcgggaattcctgttaacaggccgtgaggaccttcagcctgtgcagatccagagcctggagacactgggggtgctggcacgagcagtgggggagcccatgaggccgctggctgaggaatgctgccagctgggtctgggcctctgcgaccaggtagacgaccctgacttgcggcgctgcacgtacagcctatttgcagccttatcgggtctgatgggtgagggcctggcgccccacttggaacagatcaccacgctcatgctgctgtcactgcgttccaccgagggcattgtgcctcagtatgacgggagcagctccttccttctgtttgacgatgagagtgatggggaagaagaggaggagctcatggatgaggatgtggaagaagaggatgactcagagatctcagggtacagcgtggagaatgccttcttcgatgagaaggaagacacctgtgctgccgtgggggagatctctgtgaacaccagtgtggccttccttccatacatggaaagtgtctttgaagaagtatttaaactgctggagtgccctcacctgaatgtgcggaaggcagcccatgaggctctgggtcagttttgctgtgcactgcacaaggcctgtcaaagctgcccctcggaacccaacactgctgctttgcaggctgccctggcccgagtcgtgccatcctacatgcaggcagtgaacagggagcgggaacgccaggtggtgatggccgtgctggaggccctgacaggggtgctccgcagctgtgggaccctcacactgaagccccctgggcgcctcgctgagctctgtggcgtgctcaaggctgtgctgcagaggaagacagcctgtcagggtactgacgaggaggaggaagaggaagatgatgatcaggctgaatacgacgccatgttgctggagcacgctggagaggccatccctgccctggcagccgcggctgggggagactcctttgccccattctttgccggtttcctgccattattggtgtgcaagacaaaacagggctgcacagtggcagagaagtcctttgcagtggggaccttggcagagactattcagggcctgggtgctgcctcagcccagtttgtgtctcggctgctccctgtgctgttgagcaccgcccaagaggcagaccccgaggtgcgaagcaatgccatcttcgggatgggcgtgctggcagagcatgggggccaccctgcccaggaacacttccccaagctgctggggctcctttttcccctcctggcgcgggagcgacatgatcgtgtccgtgacaacatctgtggggcacttgcccgcctgttgatggccagtcccaccaggaaaccagagccccaggtgctggctgccctactgcgtgccctgccactgaaggaggacttggaggagtgggtcaccattgggcgcctcttcagcttcctgtaccagagcagccctgaccaggttatagatgtggctcccgagcttctgcgtatctgcagcctcattctggctgacaacaagatcccaccagacaccaaggccgcactgttgctgctcctgacgttcctggccaaacagcacaccgacagctttcaagcagctctgggctcactgcctgttgacaaggctcaggagctccaggctgtactgggcctctcctagactgcaggctgcagccagtccagagagaatagagcctgcccaggccttaagaccacctctcagcccagttcagttctgccttaccaaagattctgagactcatacccatttggagccagccccacttgctgccttacagggctgtccctgaggctggatctgttacaaatgagtcatgacatcatactgtaataaaagcagcttgttttctgcttgaacaataaaaaaag

SEQ ID NO: 413 - DNA, 2658 bp, Homo sapiens
ccgtgtgtgctagtcagtctttcgtgtcaaccaggccaggctgtggggcccagtgatctcatcgagaggggccgaggtgttgctgtgatcgtgtgctgctggaatgtggtgaacacctacagtcgatttcacctaaagatcatccttgagaatgtgggtgggcctcatcctatcagctgaaagctttaagagcaaaacccgaggtgtcccagagagggaatcctgccttgagacggcggcttcccactcccactggatgtccagcccgcggccccacggctgggtgagcccgtcctctcctcgtttctgtctcctatttgttctgtctctggacccaccgtgtggccccagaccctccagtgaggacctcccgtatttcttcagagcagcccttgcgtgctggaggcctgggcttcagtgtgtccctgggtgccctggggcatgttctgtgacctcccagctcctcgcctcatggggccgctgtatcaagtgacacagtttgtgtgctgcgtaccatgcctggcacccatttgaggtgttgcaaggaggccatgtttgctcgatgagagcagcctaagatctacaaactgttgttcgagtggatgggaacttgatgctatttcaggctgaatgacaagactccgcgatgcttctcggcctgggctgcacaacggaatctaccagggaggttttaaaaacactggtacttgctggaggtggtggcgcctgtctgtaattgcagctgctccagaggctgaggcggaggattgcttgagcccaagagtttcggtttatttgctttttcagagtcttgctcttgcccaggctggagtgcagttccatgatctcggctcactgcctcagcctcccaagtagctgggattacaggtgcatacaaccaggcctggctgatcttcgtatttttagtagagatggggtttcaccatgatggtcaggctggtcaagatctcctgacctcaagtgatctgcccgcctcggcctcccaaagtgctgggattacagacatgaaccacaacacctgccgagcccaggtgttttgaatccagcacgggcaatggcaagaccctgtcccaacaaacaaaaaaacactggtgcctgaggcccaccccgagagattctgattgagttgatttggatttgaattatctttaaaattttggatgtgaattttttttttttttcttggaatggagtttcactcttgttccccaggctggagtgcaacgggacgatcttggctcaccgcaacctccgcctactgggttcaagccattctcctgcctcagcttcccaagtagctgggattacaggcatgtgctaccatgcccagctaattttgtatttttagtagagacagggtttctccatgttgctcaggctggtcttgaactcctgacctcaggtgatccgcccgcctcggactcccaaagtgctgggattacaggcatgagccaccatgcctggccggatgtgaattatcttaaaaattttcaggtaattctaatgggccaaggttgagaacccctgctctgggcccatccgagcaccaggctgtcacaaacgcatgcatgcactcatgcccgtgggcttggggggcttcagaaatgtgcttctgcttttttgagatggggtctttctgttgcccatcccggagcacagtggcacgatcacagctcactgcagcctcgacctcctgggctcaggtgatcctcccgcctcagcctcctgagtgtctgcttctggttttcatgatgacctggggcccaggcatactacacttgtgctgttcaggggccagtcctgcaccaggagcccatcagccacagctccgccgagaagcactgatatgcagagctaagcagctttgtttccacgtggatcctgcgtaggttttcttggtccatccgtagacaccgcactcctgcagaggatcttctcgggatgccccactgtctctgttttccctcttcactgaacactcagtcggggctcgccatgatgcctctgtgtctgctggcttctcccccattggaacagccttcttggcacgccacactgctagctgctgggcactgtgctttctgcctttaccgttctgccgtgatgttgccaaaatagcagcaacaacaacaacaacaaaggctgggcacctggctcatgcctgtattcccagcagttcgagatcagcctgggcaacatgccccaactggaccctaggcaaaagtgagtggcactcctctgccaggactccaggcaagccccggcatcttcttgctgccgtcccagacaacagaagttaccagatgaacagacttggatgggccacgggggtggagagctggaaagcttggctgtgcctctcgatgatgattaagatttcaatatttacagcaaaaccacaaagcaaatgatagaataaagcaaaacaatggaaaatctgagttcactcgtgagagagatacgtatgtgagctctgaggaaattacagagggaacgcatgcagcgggacagctctcccaatcgcagcgtgcaaagtagacatccatagtgtcttttgaaaaatgaaaaacacattactttgaacagccaagaaaaaaattgcaatttattaagattcaataaagcgttgtactttcg

SEQ ID NO: 414 - DNA, 2118 bp, Homo sapiens
cagtgtttcattgctgcaccttgcatgcccacatgattgaactattctttcggccagttactctttgtagggcagataatgtcttcttaaaatatctggcttttaaaatatctggtcatttgccctttactatttagcctttattttggagtcactttagggagtttttggtttgggtctgcatcgtcatcacttatcaccagatggcagcaaaggaccttggtcagatatgaatatggccagctgcagactgtcagggccttgtgctgctcctcaggctccaccgaggctgtccacactcccacttttccctccctacttccaaccaaaagggccatgggcgtttggctgtggccccaggcttacaccaggatgctgccgttgccttactgttgagctgctttggacagtaggctgctttgtagccctgctggccttgctgtggacacatagcagtttgcctgcttttgacatcctcccctgcccccatcacttccctgactcccagaaggggctactaggctcttctcagtagggattggaaccctggctgggtcacagccagttggtaacaccaccctatctgtctgccctcagtcccttgtaattaatgggtttgtgtgcccatcctgaccccagctgggctttggtacctggctggattgtagtccctgaaagcagtacttctgtaacatcgctgccctccaaaatggcctttgactcatttatgacaagcacagccatggcactatcagtctcatcagcttccagacagctacccccatagacagtgatgagagtggcttgttgtcctcttggtaaaacctgcttcactccagacttcaccttttcccgtatacaaccaaggaggagagttcaccctttttcctgcctcagagcttttgccatcatgtctagtggatcagcccctgcccaggcaccaagtcctgccagcaggtccttcctttcactctcttttttgtctcctgctcttgtggcatgttgagttgagagtctgaaaactaagtttactcccagcgccattctgctgcaccacagtctttaaccaccgcaggttttgggttcatctaggcagctacactcaaaagacacccatgggcttggctgatcctagttttttattcagctttttcagtggatataggatatgtagcccagtgtgttggcaggacagcttcgagtgtctctctcagcaggagttctcacagagtccggggctattcccccacttaccacctcccaggatggctcaggtttaagggaatgaagccacacaggtgggagcaggagctactggcttagagactgctgtctataatagtaaactgttctgggagccttttcaccagaagccatgaagtctggtcctatgtatttccggggaaacagaacacaaggaaaatacttacctgtgagtaaggagaaagggtgttgcacaccttttctctcagcttgtgatcttagcacatgggggcctttgctgttgacctgtgtagccagttgttaaagatgtggtggtgaataccgtgtctgtccttctcttccctgcagtgcgactggctcaacaattaccacctgacctgcagggatgtgattgggaaggaattgcagaaacagggccgccaggaagctctcgagtggctcatcagagagacgcaacccatctccaaacagcattaataaatacctccccggttttgtttttgtaaaatgctctggaggaaggaagaaacgtggcagatccctgacatctttcccctttcctttccttcttccctacctcccctttttactttagactttaagaagaacagaaaatcttcttatcctctttgatattttattgcaaacactcagtcttttatgattttttaattgttgagaacaagccaagaataaaattgctgcaccagaaggagggtccctccaaagttgaacacttggtgaaaggaagatgccccgacttctttggccagtgatggggaatcagtgagtgctccatgatggtcatgttccaggtgctagtacatcattcatgatcaccttaatgctcatgagactatatttatgatcagtgaataaaaatgtcagaactgt

SEQ ID NO: 415 - DNA, 2457 bp, Homo sapiens
agccagcgccgccgcgatggcggaggacagcgagtctgcggccagccagcagagcctggaactggacgaccaggacacgtgcgggatagacggggacaatgaggaggagacggagcacgccaaaggaagtcctggagggtatttgggagccaaaaagaaaaagaagaaacagaagagaaaaaaggagaaaccaaattccggaggcaccaagtcagactcggcatctgattcccaggagattaaaattcagcagccttcgaaacacaacaccatctggcagcagatttcagcgggagcagccatggaatcccagtgttccaatgcagaagttgcaggatatccagagagcaatggagctgctatccgcatgccagggcccagccaggaacattgatgaggctgcaaagcacagataccagttttgggacacacaaccggtaccaaaactagatgaagtcataacatctcatggtgcaattgaaccagataaagacaacgtacgccaagaaccgtattctttgccacagggttttatgtgggacactttagacttgagtgatgccgaagtgctcaaggagttatacacgttgttaaatgagaattacgtagaagatgatgacaatatgttccgatttgactattcacccgagttcctgttgtgggctctgcgtccaccaggctggctcctgcagtggcactgtggggtcagagtgtcttcaaataaaaaactggtcgggttcataagtgccatcccagcaaacattcggatttatgacagtgtgaagaagatggtagaaatcaactttctttgtgttcataagaagttgagatcgaaacgggtagccccagtgctaatccgagagatcactagaagagtgaacctggaagggatcttccaggctgtgtacaccgcgggagtggtttttcctaagcccatagccacatgcagatactggcatcgatcactaaaccccagaaaattggtagaagtgaaattttctcacttgagtagaaatatgactttacagagaacaatgaagctatacagacttccagatgttacaaagacttcaggtttgagaccaatggaaccaaaagatatcaaatcagttcgagaattaatcaacacttacctgaagcagtttcatctggctccagtgatggatgaagaggaagtagcccactggttcctcccccgggagcacattattgacacgtttgtagtggagagccccaacggtaaactgactgatttcctgagcttctatacgctcccctccacggtgatgcaccaccctgctcacaagagcctcaaagccgcctactcattctacaacatccacacagagacgcccctgctggacctcatgagcgacgcgctcatcctggctaaatcgaaaggatttgatgtattcaatgcactggatttgatggaaaataagacattcttggaaaaactcaagtttggtataggagatggcaatttgcagtattacctgtacaattggaggtgtccaggtacagattctgaaaaggttggactagtactacaatagatggatatttttatttctagaactctgacatcatcatttgttaatatttaatgatttctggaactgccattccaaagaagaataaaagcacaactcaagtgaaattgaagtagtcgataatcagaaaagatgacaaaagtccacatgtgacatttgtacgtttctagctagaatgttaaacttcatcctttttttactgttgacctatttgtgggagggatgaaaggctacaaagagcacattcttgtaattttcaaatttttgcctgtctcttgaagaggtattttttcacccttagaaaagggactgtttttctatggactaagtagaagttacagagtcatgtaagaaaatctttgctattgtgtggagagaaattgctgcatttctgtttcttaagtgatggtacatttgtccatgtaacagaacaaaagatccatttggaaattttttttactggtatcaccttacatggtatcactgggaacatttatggaatcaacacttctgtagctcagtgacaggtggtggttgtttaagtgcagagcaatattaaaatgtactggtgactagtacatgtatttctccataagcagagttgccgaatcaataaacatgcaagtttgtactttgatctttaccaggtcagtggattgcttcaaaagcagagttttgtgcaagcactcactgtgctctctgaaagagcctgaggccgggcgtggtggctcacgcctgtaatcccagcactttgggaggccaaggtgggcagatcatgaggtcaggagatcgagaccattctggccaacatagtgaaaccccatctctactaaaaatacaaaaattacccgggcgtggtggcgtgtgcctgtagtcccagctgcttgggaggctgaggcaggag

SEQ ID NO: 416 - DNA, 2224 bp, Homo sapiens
agcaaaaagttgggagaggatcaggttagctgctgtgactataaaatataaaatattaacactgtgcttgaaatcaaactgaattcagcagtgtttttttaaagcttcattttgatcgccacagccccagacagggagtgagtgaggcaagtggaaagaagtgtgttctccacacaggcatcagatctgctcaggaaaatgtgcgtgaggaacctggtgcagaagtactgccgcgggatcacagctgagcggaaagcaatgatgcagcaaaaggtagttacaagtgaaatcttcaggggaaggaaagacggctacacagaaagtttaaatcaaccctttgtcaacagtcggatagatgaaggagacattaatccgaaagtgcttcagctaattagccatgagaaaatccagtatggtgtcccggtcattaaatatgacagaaaaggcttcaaagcacggcagcggcaactcattcttactcagaaagcagcttacgtggtggaacttgccaaaatcaagcagaaaatagagtactcagctctcaaaggtaagaagtgggcaatctttaaaacaatgcactgagttgactcaactactggaaagcccagtaatgaagctcccaaatgggaaacacaagtgtagggtgcccataaaccccggggtagtgatgcacacctgtagtctcagctactcggaaggctgaggcaggaggatcacttgagcctgggaattcgaagctgcagtgagctatgattgtgccacacactccagcctgggtggcaaagtgagactctggctcaaaaaaaaaaaacaaaaaacaaaaccatctgccctcctcccctagcgttgcccagcctggactgcacccttattctggcataaatattaatagcaccactttactcaagtacccaggttgggcaatagtctgcttccacggtgatcagagcccactagcaggctaagatttctaaagtatgcccttcatccttctgggcccagctaggagaatgaagtgtggtgttgggcagcccctgggcgtatctcttcttcctctgtactaatgtcaagctctctagttcttggctcctaactctggatctgtcttaaggtgtctccactagcaatctgagtgatggaatcttagtcattcatgtttcaccagaggacagcaagcaaaaggtaattgacagccaccagtctctactaaaagacagaaacaatacactgccaaaatgttaagttgaccaccgtgaaacttctctattggagtgtctgtttctttaagctgtgaatactgaaattatgccttgtctcctccccaccccagggggatgccgttttgcagtgtggacacgtgtttgaagcagttactaaactcgtcatgctggttaagaaggagaacattgtcaatgttgttcaaggaagtttacagttttttattagtccgggaaaagaaggcacaatagttttcgacactggaccggaagaacaagtctataaaaataaaaatggacaattaacagtggtgtcagtccggaggaagtcctgatagaggatgacgtctgacctctaccatcgccatttttgctccaactgaggaaactacaggggaagtggggattggatccagttagctacctcttcaaggtaccaggcccgcagcactaacagatcacatctgcaaccctgaacgtgcaggttggagaacgaatgaatacaaattttattgtaaaataaaaatgtatataaagcatatgagcacacaaatggacaataaatgccacagcgcaaaagcgtgtagcgagcctgccacgcttgtgactggggaggggctccgtataatctcacctttgcaagcgtttatttactgatgtatgcggccaccactgtgaccaccatcacttaccgattcaccaaaacttaggtaatatggtcttatttttgatttaattaaatatacgtgtagctcatgtatttcacagtttaatatgagaagtgctttggtctttatttagaaattgggtgatgtttttgtgcccagcaacatgctgtaggaatttaactcttgtttacatccattagcctcatggttttgcttcaagtctcagcttccaagaacctatcgatgacttactgtgcatggtctgagactaagtaaaggaaatttcctaaagctgtgaaatttgaattttgctttaaataaatggaactcacatgtgtc

SEQ ID NO: 417 - DNA, 1918 bp, Homo sapiens
aggaaaaagatggtgcgaaatgatatgttttataaccattacccttacgtgccagaaactgagcaagagacaaatgtggcgaaacctgctcgatatagaagagccgtaagttatgacagtaaagagtactacatgcgactggcctctggcaatcccgccattgtccaagacgccattgtggagagttcagaaggtgaagctgctcagcaagaaccagagcatggggaagacactattgctaaagtcaaaggtttggtcaagcctcctctaaaacgctcccgatctgcacctgatggaggagatgaggagaaccaggagcagctacaagaccagattgctgagggcagctccatagaagaggaggagaaaacagataatgctaccttactgcgcctgttagaggaaggagaaaagatccaacacatgtaccgctgtgctcgagtccagggcctagataccagtgaggggctccttctttttggtaaagagcatttttatgtgattgatggatttaccatgacagcaaccagggaaataagagatattgaaaccttacctccaaatatgcatgagcctattattcctagaggagccaggcaaggccctagtcaactcaagagaacatgcagcatttttgcatatgaagatatcaaggaagttcataaaaggagatatctcctgcagcctattgctgtggaagttttctctggagatggacggaattacctccttgcttttcagaaaggaatcagaaacaaagtctatcaaaggtttttggctgtagtgccatctctaacggacagttcagaatctgtatctgggcaacgaccaaacacgagtgtggagcagggatctgggttacttagcactttggttggagagaagtctgtgactcagagatgggagagaggtgaaatcagcaacttccaatatttgatgcatttgaacactttggctggcagatcatataatgatctcatgcagtatcctgtcttcccctggatccttgcagattatgactcagaggaggtggatcttactaatcccaagacgtttagaaacctggctaagccaatgggagcacaaacagatgaacgattagctcagtataagaagcggtataaagactgggaggatcctaatggagaaactcctgcataccactatgggacccactattcatctgcaatgattgtggcctcataccttgtaaggatggagcctttcacacagatattcttaaggctacagggtggccactttgacctggctgaccggatgtttcacagtgtgcgcgaggcctggtattcagcgtcaaagcacaatatggcagatgtaaaagaacttatcccagagttcttttatttaccagaattcctgttcaattccaacaactttgatctaggctgtaaacaaaatggcaccaagcttggagatgttatccttccaccctgggcaaaaggggacccacgagaattcatcagagtccatcgtgaggctttggagtgtgattacgtgagtgcccatctacatgagtggattgacttaatcttcggttataaacagcaaggccctgctgcagtagaagctgtaaatgtcttccatcatcttttttatgagggtcaagtggatatctacaacatcaatgacccactaaaggagacagccacaattgggttcattaataacttcggtcagatccctaaacagttatttaaaaaacctcatccaccaaagcgagtgagaagtcgactcaatggagacaatgcaggaatctctgtcctaccaggatctacaagtgacaagatcttttttcatcatctagacaacttgaggccttctctaacacctgtaaaagaactcaaagaacctgtaggacaaatcgtatgtacagataaaggtattcttgcggtggaac

SEQ ID NO: 418 - DNA, 2420 bp, Homo sapiens
agcacagtgcctacacctaagaagtgctgtgtaaatagtagcttctattgttgttgctgttaaaattagaacagagcagagctggacacgtggggtgggctgagtcattgtttattgagagaatgaatgaatcaactgtgggagagagtggaagctcggggagccaggactggtgtcactctctctccctccgccaggtatgagcggctggaggagcagctcaacgacctgactgagcttcatcagaacgagatgacgaacctgaagcaggagctggccagcatggaggagaaggtggcctaccagtcctatgagagggcacgggacatccaggtatggccagggcaaccttgggaggccccagatgtgctggtagagctggcagcagccagagggttagggttcttgtcacgtggggcatgatagacacaggctggcctgttggccggggccgataggcacatggatgaagagggcagcgtagcgggagcggagtggagtgagcaagacaggcctgaggctgacagcgtgcactgtgcagaggcaagcccacagggcagaggccaccatgccccccacctctttgatggcagcttcgcaaatgagtaattggagtttccaggctccagcctgcctcaagagggagccagctgggattgggccagctcttttccttccctagtaatcaagactctcatttcctagcatcctccccaaagagtcatccttaaaggtctctgaccccagttgcagctggtcaacctccactcctcctggcctttggagaggagacttcgttataggcaccttctcagtggggtaggtaggttttcagcctaggggtcctgcccatcctgagcgcgcacatgccagcccctctgcccctgcaggaggccgtggagtcctgcctgacccgggtcaccaagctggagctgcagcagcaacagcagcaggtggtacagctggagggcgtggagaatgccaacgcgcgggcgctgctgggcaagttcatcaacgtgatcctggcgctcatggccgtgctgctggtgttcgtgtccaccatcgccaacttcatcacgcccctcatgaagacacgcctgcgcatcaccagcaccaccctcctggtcctcgtcctgttcctcctctggaagcactgggactccctcacctacctcctggagcacgtgttgctgcccagctgagtggccagccacaccaaccctgtgctctctggcccccagctggccacacttctccaggagggacccttggacttctttgtgtgtccagtttggcctcctgcccaaactgtccattccagcagctcctgcccccttctctgtacttgcttctgtctgacaccttctccctgttggcctgaagggagcttagaatgcagccctacctggagatagtgcgggcacctgtggccaagtggagcagaggtggacatggggttggattgttttgattatttatagttacacaaggacttctcccagctgaccctcaggatgccgcaagtcaggaagaccattaagaataggaggagagggctctgcctcaactttcctaggaaagagcccacctcggagatagctacggtttcctctggtggagatggtgaggatgaaggctggagagtgagggaggaggctctgctggccgcagagaacacagggatgggagggtccctagccttcgggcacctccagggccagagagcaggctcagagcagctagtgtggagctcagcatccccaccccacccctcctccctgtagagctgatttgaggcctccttctggggctgggctctgcaggccaggtgggtgtggcctgtgttttcccttctgttctttctgcctgtactggatctgttattttcagggaaacaggcctcagggcccccctgagcctcaccctaagcccttaggcctctgagagtgctgttgggttctatttatttatttatttgttcctttgttccctacccgtgcccccagtgtcttccctgctgagtaccaggagaggtcctgccccatcctctctctgaagccagggcccttccattccatttagcctttggatcatcctggctgggagaagtgggaccgagccacccagccccactatccccaagcagccctacagccgggatgggaggcacgtggcctctcttttatccgtctatttattttgtaagtgtattcgtgtggaggaggttgttgctttatttttttaaggctctggagtgttgtgtatggtttcttttcacatcccagcctcccatgggcacttctaagaagagaggggatttcttggaaaaggagagaggaatcccctagagcagggaaagcagtgcctgccagctgttgtgcaccttcctgagaaataaatatcctctaaattttcaaacc

SEQ ID NO: 419 - DNA, 3487 bp, Homo sapiens
ttgggtgggatgggtgtccctgtccccagcccaccatggcttggggtgggtcatctgtggccgttagggtgcgtccccctgctcccccgcccagggccagggaccactcgtctcccactgggggaaaaagggggtcccgggtgggcgactagtacgtgtgaagctgagctcagggccggacctggggagcgggggactccgctcgggcaggaggcagcggccagggctgggccagggcgagagtcggtcctcccggtgctgggctccccgtctgccttgaggggtgtgcatggatggagggtgcctgaggctgcaggcaggggatgaccgggacaggcctgggctggggcagttggaggtatgggcactggtaggggacagagggttagggatcatgttggggggccagggacagtggaggaagggcccatggaagatggggctgtttggtttgaggctggagtgcttcctttgaaatttaattactgttttttaagtggtagggctcacagactgtgtgaagtcctgtgtgaagtgctggtgtggccacctacccaggtgtccctcccttttgttttggaggcctgtgtccttgtccaggggcagccctccttcccaggtgtggccagaagaaccccccatcccaagacttgaaatgtctgttgctcacctctgtccctccagaactcggcttccccatcttcacttgcaaaacaagtgcagccctgcgcccatcagcaccccctccggtgtgcacacaggccagtgagcggtggccaaccagcgcaccccactcccccaacctccacaacccatcaagcggaggccgcctccgctaggggaggaccatgggctgcaccctggcctggggacctacagggtgtgggttagacgcattcccactgggcggctcctttctgccccgaagcccacccctgtggcgaggccctaggagacctcccgtggggccgcctctacagacagcactcagcctcctgggctgcctccagccaggcccagcacatgcctgccctccagaaaaatacgttgctttccagaaggaggtggggggccatgggcaggcactgtggacgctaacctcggcccctccacccgttcctcagggcccacgtccagggggaccaagacctgcattcctagggccgcaggtggctcagtggtgcagaggcatccagaccttctgctgaactaagaaccacccagcctagagggagcctttctctgcctcttcctcccctgtcttgggcacaggtggggttggagcccccatggggcccgctgggaacctggaccaagccttcctcggagatgggaggaagccgcggggtggagcaggggcaggtaggtgaggttgagctgcacttgagttccctctggagtttccttcatctgccccacacccaaatttgcactttaatttgaccatccctgggggcctggctgctgacagaagggctctctctgccctccactccaaagtgggtgcccccccacccttggccaggacagggagggagccgctggctgctgccggaggtggtggctgcacagaggacgcctgactgctgttcaggcccgcacaatgtcccgtgccccttcctcactcgtttgtaatcgccgtctgttttgttctgggtaaggaaggcaagagctatagataaaacttaaataataataatttaatgtgaatgggttctgagctctccctgcgccccgggcgggccaggccgagcattttgcactaatgtgtcccacggtgggcgtgagtcgggagtgtctgtggacgtgcgtggctgctgagcggacctgctgtgtgctccctccacgtcctgaatgtaccgtggggcgggggcggcggcccgggctcagaggggccttccagagtgccttagcatcctttgatcatttttcccaaggaaaccaattaagaaagccggacccttcccccctttgtttacaagatgactaattctagaatccggggttgtcctgtcctgtgagtgtgaccctgactcatccagaccctgtagagagagacgagccactcagtatttatgagatgtctgcacctttatccctaagcctgactattagcaatacgcatatcctatatagaatctattacagagctacgttatctccacaccttttgaggaggacagaagggactggaccgtgttggagctgccgcctggcaggtggtgggcctgggatctagccgcctctcctgccctgccttcctcttccccaaggggatgggcccaggaggcagctgggttgcatggagaggtccaggagggaccggaggtgtgacagatactgtgagcccggcgggccgcgcctggctgggtgcctcggtacttgaattctgtcttgttttccgcattgtgtctgtccacccgagttctctgtcgtcacttaactttgcattggatttggttgttgtactttgcccctgaatgtggacaaagctgtgggcaagaggtcagcaggacccgcctgggggtgccggcgttggtgactgcgggtcggggctcctagaacataggagccggctgcctggcctcctttctcctccaggaagagtcattctttggcatttgtgtttagagccaggaggaaggcggaaggtagggagggagggctggtccccctctgagggggctctagtgcctgaccctgacctgtcctcattcgacagctgaaactgttaagcgctggcccagtccccccaccccacccagccgtgtactgcctgggctcccctcaaagggaaatttttacggaaacatcttggcagcaagtggaaaaagatctatggcccatgaaccaactgaaaactccaagaaccctctgtctgcctctgccagcagcgagtcctaagcgcagaatccagagctcgtagctgtcctcagctgtaactactgtttcagaatgttgctgctgcatacatttgtcatgtcagccagccagctccgtgggtgagagtgtgcgtgtgcgcgtgtctgtgtgtgtgtgcgtgtctgtgtgtgtgcacgtctgtgcgtgcgcgtctgtgcatgtgtgtgtctgtgcgtgtgtgcgtctgtgtgtgtgcgtctgtgtgcgcgtgtgtgtgcgcgtctgtatgtgtgcacgcgcgtctgtgtgtgcacgtgcgtgtctctgcacgcgtgtctgtgtatgtgtgcacgcgtgtgtctgtgtgtgtgcacgcgcgtgcacgtcaccaccggagcatttagggtttggtacaagatggttctaaaatggcaaaggtttttcgtgtttgtttgttttgtttctttggaaaaagaaaaggaaaggaaaatcatgcagaatcgcaagcattcagactggacgaccggctcgtattccgatcagtcgcttccattgttagcatcgtacacgattgtgatttttatgtcaaaagaagccaaaacttgcaatactatttttagcagac

SEQ ID NO: 420 - DNA, 2888 bp, Homo sapiens
ggcctttttttttttttttttttttttgacgaaaacgttggatttttattacgtttcattacaaaggatgcaaaggtacaaagacaaaagcagccctgccagaggatggggcagggacggccgagtgtgccctgagccgcctgcccccgcccgctgcggccgcccacaatcatggcccacgggacgtccgtggcagagtatacatgctagggttgggggagagccagcctgggcacagaggagcacaggcaggaacagggctcggaccggcgggtttgcatatatcagtggggccacccagcccctaggggacagtttcctactcaggggcacggcagggccagtggactttggctgccaaagccctccctccccaggcctactggccaagtccatggctaagtcccctcctggtgggcaggagatcagaagttcttgatggctgggctgggcaagggttgcccccaaattccagaacacttcgagatgggggccatcccccgaccccaacacatgccacctgtccctggctcctgggggtggggtgctggccaggagcccagaaggtggatacaggctctggaatcatcagagccagcaccaccccaaggcccagcccctgccccccatcctgcccaggaggagcccggggccctgagacctgcaggtttgagaaagtgacaagagagaaactgaggctgggatcacgaggcactcactcctgccccacccatgccctcaggaactccccagcacccaggcctgggggtacaacttactccacctcctgctcccagggggagaatggtgtctgtggccagtgggggtgggtggacacctgtgccacacggaagagtatggggtgcctgacccctgcctggccaggaccctggaaggccaagggccgcagggaacaggacacttggctcaggtggagctgacgggagaatgtcccagggacccccaaatcacatgccgcaagagcccccaggaaatggaggcccctggtccatggtgaatgggggtagaaagagacccaggtgtccatgtagcccaggcaggcctcccagggtgagtgaggggccgagtcttgcccctgctcttaggctgtgtagggaaggctctggcgcccgcacgccctggcccagggcaccacatgtgggtgacgggccaggcccaggggcacatctgtgccatcggctttgtggcccttgctctgagagcccctgcgtcccacccccaaacagagggcccctcggcctctgagacggctccatcgggacccagtgaaggtgatgggagctgctgttttcagggcgaggtgacagaggacccccgaataccgctggaccttactccaccagcctctccctggtcggagggctccttggaaatacagaaaactcaggaagcaggtcgcagcccgagtttggaaggatgtttggttaaaaaccagctcaaggcccacctaagggaggcaccagagccccctctagggacgggtcctgccaaggctgttcaggcctgggatgctgggcagaagtggctcacacctgtagccccagaactttgggaggccgaggagggaggactgcttgagcccaggagtccgagaccagcctgggcaacacagcaagaccccatctctaaaaaaataaaatagaagccacccggcctggccccccatgggcttctggcaggctcctgtcccacctgaccgggctcaggcgaggtcccagctcacagcccccaagcctgacatccaagccccagcaggagggatggatggacatggggggccctcctggctaggggtcctcccgggagcttggccccctgaagaaatcaggccaaacacactgatgccaacactctcctccccagagccgaaaacccacaagcagggccctgatgagggcaaagaaccctcttctctggaggacacagagagaggctgaacttgggctacaccctctgcctgcaagacttgccaccctgggtagtgacgtcggcgaaacaggaaggtggggacgccatgctctcaggagggagagccctggctgaacttcgccgtaggggaccgatgtacccagcagagggtctgcagaagccatgagcacatgggtgcgtggggagagcagcctctaacccagtgtagaccaagcatccgggcctgaccaaggacacagacggcgggtctatgtacacggcgcaacctccccacgtgggcctgcccctcaggaagcggctcgtcaaatcacagtattttcacatcacaaagcaaaaggctgattcccttaagctgtcttgtttcagaaagtcttggcaattcaagaatatgtagtagtgatatttaaaaaaaccacacgtacgcacacacaaaaggccgtgatacagaccccctgggaggcccgcccaggtccaggaggggcgtgaatccttctggaacacagggacgcctggctgctggctcctggctgggccccgggtactcgcgtgggccccactgtccctggcaagctcggacctcggtccaccaggttcttattggaaaaagaactccataatggaccaaggtcgtcacgttaacacaatgtcactgtgaatctggcttcaggatgctgaaaatgggccacgggcctgggatgctccgaggtgggcatccctcctctcctatctgtccacaccgaagaccagaggacaagcagtggcgcccgccggaggttggacggatggggtatgaggtttcctagcatggtcctcaatgccttcttttgaaaaccgcatccaggcgggttgcttgtaattttattaaggccatttttttttaagtcctacatacaagtctaatggtaatgaaactctcctatgtacatgtagtttttctt

SEQ ID NO: 421 - DNA, 2634 bp, Homo sapiens
agaggtcacccgagatggtgagtgagcagggcgtttccagcctgggatgtcacaggcccagcctggcctctgcagacagcacagggtcagtagctcctaagggttaagacaaatgcgcttgatgaaggcgccggaggggccagcgtgccgtgaagaccggcatcgagtgcatggcgacgcagtgctaagttgcgtatcacatccatcgagttcttcaaggggagcactgagcgggagtgggtggggggtcaaggaaagccccctgggaggaggaacagctgcagctttcccacatgtgctgaggcttcacttgagaagctttagtttctttgcttccaattttgacacttcagtcttcccagcgaggaagggcaaaggtatcctggcatgcacccactccacagccctgggtctaggagcagaaacgtcaggagactggaactggccatgggcagggggcaggggcccaggggagcatccctcaaggaatccagcgacatttcatgtgagccatagtcctttcccgacagacccagcatctctgcatgtgatggccgtggagcgagaagggcggggcagccgctgggcgaggccgtaccctggcagctctgtggggagatctgagcaagcgaggggcttgggttagcctgggggccgtgtgagggcggcgtcttcactgggggccgtgtgagtgtgagggcagtgtcttcactgggggccctgtgagggcagcgtcttcagaggatttgtctcagggtcccagtgggttggggacagctctttgtccctcatgtgcagcgtgagggccctctggttcggggatgagctggaaggaggcccagatcaccccagggccttgctgcgcgaggacccaggtggaagcgctgcccagctggagccctggtgcactgaggggtgtgcacagcagcagaggcagaggagcctttggaccagcccccgaggctgccccaggagcgcgctgtggatgtggggcagcttctccggggggcgttcaagccactggctctgtgggcagagacgggctcagggccgggctcaggctgtgcacacaggaagggagcccaggggagggccccagagtgttccaggcaagtctttagccaaggccgtcagcccctgggagctgctggctgtcccgtcggcctcacgctcttgtcctccttgccacagtgatcgtccgtgccgctgactgtaagaaggtacaccagatcgagcttgctcccagggagaagatcgtaatcctcctctgtggccggaaccaccatgtgcacctctatccgtggtcgtcccttgatggagcggaaggcagctttgacatcaagcttccggaaaccaaaggctgccagctcatggccacggccacactcaagaggaactctggcacctgcctgtttgtggccgtgaaacggctgatcctttgctatgagatccagagaacgaagccattccacagaaagttcaatgagattgtggctcccggcagcgtgcagtgcctggcggtgctcagggacaggctctgtgtgggctacccttctgggttctgcctgctgagcatccagggggacgggcagcctctaaacctggtaaatcccaatgacccctcgcttgcgttcctctcacaacagtcttttgatgccctttgtgctgtggagctcgaaagcgaggagtacctgctttgcttcagccacatgggactgtacgtggacccgcaaggccggagggcacgcgcgcaggagctcatgtggcctgcggctcctgtcgcctgtagtatgtatatgttttctgttgcatatccctgttgctgcttttcccaccgacagtcagcatgtgttcgattttgctttggtttgtcttccagtcccttagttgagtagtcacagagcatcgggagaggtgggccccatgccagcccgcagcagagagcatggttcagatctcacgtctcagaccagcagtaggcgggctcagcaacctctctccctgagcacatggggccggttcttccagaggcctcagcagaggaccccgtcggcgggcataggcccctgggcagaagggctcggcgaaccgagaacggggcgtggcattcatctctcatttaaaaggccttcctcgtgataatacagaaacttacacagtagtaaagacaagcttgaggggttttggtggccagaaaataattcacctctggtgtcttaagttacagtccctctaaggacaagtattttctgaaagtggtaggggctgtttttcaaacagttgggtcactgaattcgcctagttggcatgactttctctatgaatggtggcactggggaacaggtaggaccagtggacacttcccgactggcccgctgtccgattgcttttaaaaccttaaaccgggtggagagcggtggctcacacctgtaatcccagcactgtgcgagactgaggcaggaggctcacttgagctcagaagttcaataccagcctcatctctactaaataacaaaatatggctcacacctgtaatcccagcactttgggagcccaaggcagggcggatcacgaggttaggagatcgagaccatcctggctaatagggtgaaaccccatctctactaaaaatac

SEQ ID NO: 422 - DNA, 2684 bp, Homo sapiens
aaagccgaagaacccgggctgagctgcgcgggatgctgagctgcgcgggatgctgagctgcgcgggatgctgagctgcggggggatgctgagctgcgggggatgctgagctgcgggggatgctgagctgcgggggatgctgagctgcgggggatgctgagctgcgggggatgctgagctgcgggggatgctgagctgcgggggatgagcagcgtgagtgagcggtcccccagggagggatgctccgagggcgagtgcaggaggtcccttgcattcctccttcggaatggcctccccagccccagcaggactgcgggttggaggggagagcaaggggcctcttggacagtggaagcactttcagcaacagaatggctggacagaggctgcgtccccccaccagctgccggtcctgggatccctgcccgcctgggcagcgctggggcagagccacacggagccttgggccaggaacaaccccttgccggtggggcctgtgggactgcagggcctggggtctgggaggcggccttgtccctgccgctgcagccacgagctgaggtctgtgttgggagggtgagccccagctgaggtctgtggggggagggtgagccccagcacctgcgaacggccaccgttctctgctcggctccttttcctgcccgtctctttctccctctgagcaaggaccaccatcccgtcagccgaccggtcctctggccccaccgggccttggcgtttgctcctccctcgccgggagctgctgcctctgctcctccaggcccaggcagtgcatccgttctggcaggagactgtggtgggactcacctgagctgcaagttctgcttcccaagggagggctgtccccggcctgccagctgccctccccagaagctgagctcaggaagacgggtaccagcgtgtgaggaaggggccccagaaggagcgcgtgtctgcggggagagggagcgctaagccaccacaccaggtgggcagcagtgctgaaggggcacccggcttcccctgatcgtttcttttccctgtggcccaatctcccacccccatctcaccctgtcctggagccagccttcggggaggctgggcagggagcagggtcagaaggcgtctgccccaggcctgggtcctagggcctgtccttggagggaccacacatgcctggagagaggctccagtggccggctccaggtgggcgctgatgcagaaggcccaaggaggaccctgccacatgttgcagggacccgtgggtgctgtgcacaacctgcctcatccatccccgccgaagaagagggggtgctcatggctggctgatttgtgagggggccacgtaagcagctcttgcagggcgtggcttgtgggtttgggagacagacaaatgggcagtcagacagaggcgtggacaggatgccctctctgctgtctgccgcccaggcctctggaggtgttctgggatgggtctaaggaaaactcaacaattcttgagcgaataatgcccgggcaaccagctccctgcatttcataagggccggaattgccatccaaaaggttattttgggtgactgtggtcagtcatcattccaaagcttttccctaaactcagagccaggtgtggcctccagggctgaggagcctgagaggtgggactggcaggcagggctgtggccccagcgtggcacggaagcagccaggaaacactggctctggggggctgtggtgggaggaggtcctctgcagggacccctgtggaccgaggcttttggaggcaagtggacagtaggtgtctcttagacccctgcgggggcacacgaccaggaccacaaggggcccacacacgcacagtggcccggagccaaccagcaaaccccaggaccttagatacagcccggcgagtgagttaggattgctccggctagctgtgtgatcatccacagtgccagagaacagtgcctcgagaccacagtggcagctggcttacttctcgtgtgaacaggaaacccagaggtgggcgaccctccagtggtgtgacgactccatctgtcaccacagccccgggctcccgccttcctgctccttgggctcacagctctgtgcttgaggcaggtctaagacaggctggagtgcggccatcatcccagcactgatggatagaagaaaatgaagctgggatgagaagcgcggggctttccctggcagtctggccctgtatggaggccccttcccagagtgcgtcccactggcttcctcttctatcttgcagtcacacctagctgcaaggcgggaagatgtcacaggtttgaaagggccgaaaagaaggttcagaaatgaaaactatgacaaggcgcttgccagcattagctgcagagtcgacagagacgaggagataatgtgtgaagtggtagaaaaatgagaagagattgttcagtgtgcagggcagagagatggcgagatgggagctgtgaggagagccgggtggccgggagcctcccgggggcagatctgtgctgaggttttgcagggatcagctggctgtctccgcccctgcacgtcccggctccttctcagctcaccctttcttgttgtgccatgacaggtggctgccacgcacagcaatgctgtgtgctccagcctcttcctatgtgtgtaacttcaataaaaccaagcaaagcc

SEQ ID NO: 423 - DNA, 1972 bp, Homo sapiens
atgcatctggttctttccatggctctgaaaacagtcttctttttttcccttgatgaaatcctgcagtccgctcccatgtaccagtacctggataggaaactgttcaaggaagcctaccagattgcttgcttgggtgtcacagacactgattggcgtgaactggccatggaagcgctagaaggtttagattttgaaacagcaaagaaggagaggaagaagcggggagagaccaacaatgacctgtttctggcagatgtgttttcctaccaggggaagttccatgaggccgccaaactgtacaagaggagtgggcacgagaacctcgcgcttgaaatgtacaccgacctctgcatgtttgagtatgccaaggatttccttggatctggagaccccaaagaaacaaagatgctaatcaccaaacaggctgactgggccagaaatatcaaggagcccaaagccgccgtggagatgtacatctcagcaggagagcacgtcaaggccatcgagatctgtggtgaccatggctgggttgacatgttgatcgacatcgcccgcaaactggacaaggctgagcgcgagcccctgctgctgtgcgctacctacctcaagaagctggacagccctggctatgctgctgagacctacctgaagatgggtgacctcaagtccctggtgcagctgcacgtggagacccagcgctgggatgaggcctttgctttgggtgagaagcatcctgagtttaaggatgacatctacatgccgtatgctcagtggctagcagagaacgatcgctttgaggaagcccagaaagcgttccacaaggctgggcgacagagagaagcggtccaggtgctggagcagctcacaaacaatgccgtggcggagagcaggtttaatgatgctgcctattattactggatgctgtccatgcagtgcctcgatatagctcaagcagatcctgcccagaaggacacaatgcttggcaagttctaccacttccagcgtttggcagagctgtaccatggttaccatgccatccatcgccacacggaagatccgttcagtgtccatcgtcctgaaactcttttcaacatctccaggttcctgctgcacagcctgcccaaggacaccccctcgggcatctctaaagtgaaaatactcttcaccttggccaagcagagcaaggccctcggtgcctacaggctggcccggcacgcctatgacaagctgcgtggcctgtacatccctgccagattccaaaagtccattgagctgggtaccctgaccatccgcgccaagcccttccacgacagtgaggagttggtgcccttgtgctaccgctgctccaccaacaacccgctgctcaacaacctgggcaacgtctgcatcaactgccgccagcccttcatcttctccgcctcttcctacgacgtgctacacctggttgagttctacctggaggaagggatcactgatgaagaagccatctccctcatcgacctggaggtgctgagacccaagcgggatgacagacagctagagattgcaaacaacagctcccagattctgcggctagtggagaccaaggactccatcggagatgaggacccgttcacagctaagctgagctttgagcaaggtggctcagagttcgtgccagtggtggtgagccggctggtgctgcgctccatgagccgccgggatgtcctcatcaagcgatggcccccacccctgaggtggcaatacttccgctcactgctgcctgacgcctccattaccatgtgcccctcctgcttccagatgttccattttgaggactatgagttgctggtgcttcagcatggctgctgcccctactgccgcaggtgcaaggatgaccctggcccatgaccagcatcctggggacggcctgcgccctctgcccgccttggggtctgctgggctgtgaaggagaataaagagttaaactgtc

SEQ ID NO: 424 - DNA, 3161 bp, Homo sapiens
gtacgcgcccggccgccgcctccaggcagcccggagcaacccggcgcccggccccgctgggcgcagcactccgtcggcggcggcggcggcgcgatgctgtgcttcctgaggggaatggctttcgtccccttcctcttggtgacctggtcgtcagccgccttcattatctcctacgtggtcgccgtgctctccgggcacgtcaaccccttcctcccgtatatcagtgatacgggaacaacacctccagagagtggtatttttggatttatgataaacttctctgcatttcttggtgcagccacgatgtatacaagatacaaaatagtacagaagcaaaatcaaacctgctatttcagcactcctgtttttaacttggtgtctttagtgcttggattggtgggatgtttcggaatgggcattgtcgccaattttcaggagttagctgtgccagtggttcatgacgggggcgctcttttggcctttgtctgtggtgtcgtgtacacgctcctacagtccatcatctcttacaaatcatgtccccagtggaacagtctctcgacatgccacatacggatggtcatctctgccgtttcttgcgcagctgtcatccccatgattgtctgtgcttcactaatttccataaccaagctggagtggaatccaagagaaaaggattatgtatatcacgtagtgagtgcgatctgtgaatggacagtggcctttggttttattttctacttcctaactttcatccaagatttccagagtgtcaccctaaggatatccacagaaatcaattgtgatatttgaagaaagaagaattcagtctcactcagtgaatgtcgcaggccatttctaaaagtgctacagaggacagacagggttttgaggccaccctgattattgggatgcatctgcagcacatccaggacttgaatttcattacgagttcctaatagttgtatttctaaagatgtgtttcctagagaatgtacagccttatgacactgtagtgatgtttttataattttctaagtaggtttttttatattaacaaattcatatacagaaaaaataaggtgttacaaaaaatggagagctcttatttttgtacagattctgtcgttttttttttatttgtgtgagatttatggaaatacactaaatgagtaattcaggttcagtacatttattacaaagtgaaatcaggggatattcatttgtaaattttattcttagtgaatgaactgtataattttttttatcaggagagcacttataaaattcaatttataaagatcatatacccaaatcataaagatttagttgatacattaacactaagatactctgatttttagccaaactaaacaaagtgcttctactgagaggcctttataccaccatgtacagtaactctaagtgaatacggaagaccttggttttgaaattctgccaccttgtttctccctgctcatgaggtcgcaccttttgctcttgctgctaattgcccattcgtagtgggtgtaatgccaggtggaatggtttcaacaagtcaggtgaaaaccatcctttattgttgctggcacaacttgatatatagtctgactcagaactgaagctcacatctcaaattcatttcatgccagtaaatgtggcaaagagaagaaaggcccaagagcgagacaagaagaatggagaagggggcagccaagaagaacttctgggttcagggtactgtttatttgctccttctcttcatgcctgtggctggatgtcccacaacactataagaaatataagtcaagccctttgtgttaagcaagaactacagactccatcttttcacccaaatcatgaatgaccaataaaaagcaagttattccagaggaagaagcagcccttgaaatgttaaggcttaggcttgaaaggtgaagagcaggaattctctctttcaaatcctagagcataaacccatgtgtggccaagtgagatcagccctcaagggcacatgccaagggcagagcagcccatgtagacagcttcggagggcatgggggtgtagggagttcggggtagctcctcattaactatttgttgggtgagtaaaggggtgaggctcagtggcaggtacctctgcaatgacaagctgtctcccctctatgtgtttagcatatgttattagaacatgtccgacacccctaccgctgccatttgggccctttaataaagccaagtagagaaatctggcaataaaaggcaaatgtaagcatgctttctttaagacgcatcataaatggttttctttaagtgaatggaagagtttgacagagatacacctttgtaagaaaacattaagaatgctggctggctgtggtggctcacacctgtattcccagcactttgggaggcctaggcaggaggattgcttgagcctgggacttcgagaccagactgggaaacatggcaaaatcccatctctacaacaaaaatacaaaaattagccaagtgcggtggtgtgcctgtagtcctagttacttgggaggctgaggtgggagaatcacctgagcccaggaggtggaggctgcagtgagccatgccaatgcactccagtctgggcaacagagtgagaccctgtctcaaaaataaataaataaataaatgaataaagagaatgctaatcatttctgggttcactgcgactcactgtagtgctggggatcccccttgtaacactggaactgaaagacagtgatgaaagctatgtcaagcattcattattctgaagaggaggagaaatgccacatacctttcccatgggacctgtggtggaatgaatccatacttctgcctcacttcgagcagacttttgttctcggcgctcctcacgatggagtttcatgcttcatttttacatctctctgcacaattagattgggagctccttgagggcagagtacgtgccttaatctttatctttgtaatgccacaatgaacagagtgactcctggtacactgtaggagcttaagaaatactcactgaatgcatgaatgaatgaatgaacaaatgaaggaatgactaaggatgtttgtagtgctataatatagaatgggatttactctgctttaccagttagtttcataataaacaaatagtctgt

SEQ ID NO: 425 - DNA, 3121 bp, Homo sapiens
atttgcaggtggagatggaaggagaaacagcatccggtcagcacaaaccgtaaacagcaggtgctcgggtgtggagctggagccatgtgtctctgtggggaggaacaggggtttgaggggaacatggggactggggctcaaggcacctggatttaatcttagagacgaaggggtggggagggagtgcccacgtgggatctgagaggagactcgctggcagagactgggcagatgtgagccctccctgcgatggtcagccctgctcctgatggccatggaaggaacatttttctccaccccactaaggtgggctttgaccacgtggacgctggtggatgtccgcaggccctgcaatgtgttccagggaatcggcttcaggaaaaacatgcctggagctcagcagagtgaggggcacacagagcagacctgacttgagcctcagcctggacccccacctgacactcagagccctggggagagaggccgtggaaccgcccggcagcatcactgcctcagcacctgccaagatggaaatgggcacgttcaggtcagataggaggctggggcacactcctccctcgcccccgaccacccaccctccaagccttagtttagatgttccctcctcagatcagcattctctgccctgagccacggtggcgcctcactccggggcctgcgtgcctcctgcctgtctgagtccaacctcagcttcccagccagcagctcaggaacccacaaggtcgtgcagctgccgagccgaaaaacgaatgagcagctctcgcgtgcaggtcggctgggtgggtgtacggcttcatggcgaggcatctggagtgagggaggcttgcttctcctgcggggcccttgctttgtgtgtctggacaggcgccgtcctcgtggctgcctgggactggggcctctctccatcatcacagtccaggaagaggggtggccagtcctagagcttgagctgagctgcccttggtggctgtggagatgaggaactgatgttgatggtgcagtcgggaagggagatgtgacggatgaaaaggagaccccgatttagcaggaagtgtggaattctgtgatcctgtgctgctggtccctgcagaggttttggcagtccccagacactgctgtcttgagaggaagaggagtccaggcagccacagcagaacgctgacccctcactggtctgctgactcctcactggtctgctgaccacacagcacggccttggtctccaggctggccccctggagtcctcaaccagccccagagggaaaggaggtttgccagagggaccttgcagccacacgtgtggccccaggatggcaaggacaaggcccctggcgaggtggtgctcattccataaggagtggttagagtcactcagcaaatccatcccacgcctgccacgggcttccccctcccctgggcaccaccggccaccctaagctcagagacgtggtggaacccctcccgtgtggcgtggtgccgagactgagggatgtgcaagctgtgaggagcatgtggccacagccaggtctgaaagacagcactccgaaccaagcagatcgtgtgaaactgcaggccgatgtgatacggagaccagggtgcaacttgctctgttttcaagaggagagactttggagaactgttataaaaaatggttgctgtgtctgcaggctcacacgggaactctgctgtaaatatttctgtgccaaggcagcacagtgttgcatgggggcctgagggcctgtgggtttgattcatcctttctaggatgtctgcaacatttcttggatgtgaaagtttgttctgagcacgacagttggaaaatcaccgtccgtgtcctctgagctaggactcacctgctgcagggaaggagctttgcttagcagaccacgtcacactcccaggatgatgaagaggggatctcctgcagggtcctggggacaaaccctgctggcatctggccatgggggaaagagcatccggagtgaaggggacgacaatagtcaccacagtggctggagatgagcccacacggtcgtcttccccagcggagacgttccctcccgtaggagggtgggtcagaggatacagaaggcgccggcagtgaccaggagcaatgtgcagcctcctctcccccagctcctggaagcagattccgtccgggcacaggaagctttcccggtaattggctaacgcgccgcatgactgctgtctgccaggctctaggaggtgagaattcctcctcaaattaacctcatacccagaaacccatcattgccacttaccaggatgggaaagcacagtgtcctctaaagaaacttacattcaagctgatgatcatactcagacagctaattaagagctaattattcaaatgacggatcaaagaaccgtgcatgcacccagctttccccggagactcgggtcccctggcacttgcatcctgagtcggggaagaatcctcagccacataagtgaggacacatgtttgccaagaaacctcaagtctacattcatagcggtgtctactcagaggacacaggaaaacacacacacacacacacacacacacacacacacacacacacacccgggagtccttgcaaatggtcccaggcttcatgagaagtccgtgctggtgacagttggaacgtgttactctggggatagcctaatcactacgaaattaattttctgagctcctgagaaacttgccttcctaaaaaccaagatggatgcaaatgaacaaggactgagcagcccgaagcgggtccatgggggtggcagcggcacccctaactctggccgggtgaggggccccgtccaggcagcctcagtccaggctctaagcaaacgccgtggcccacaggtgctgcttctgggatggcgtcgggacactcctgcgggggtagcagagagctcggcccaccgactagccgctctgcccgctgacctgagtgcttctccgacctccgcagtggacgttcacctctaaaccttccttcatgtaaatgtttggttcccatagctgaggcaaatgcccttgaaaatgcttccatcaggaaacattcagacacctaaatatatactttgtatcaagttt

SEQ ID NO: 426 - DNA, 2949 bp, Homo sapiens
tttcagtagagatgggatttcaccatgttggccaggctggtctcgaactctggtcctcaagtaatctgcctgccttgggctcccaaagtgctgggattataaggcatgagccaccacgcccagccaacacccaatttatttatttatttatttattttttgagacggagtctcgctctgtttcccaggctggaatgcagtggctagatcttggctcactgcaacctctgcctcccgggttcaggcaattcttgtgcctcagcctcccgagtagctgggactacaggtgtgtgccagtatggccggttaatttttgtatttttggtagagatggggtttcaccatgttggccaggcttgtcttgaactcttgacctcaggtgatccgcccgcctcggcctcccaaagtgctgggattgtaggcatgagccaccatgcctggcctaacacccaaaatttttattgggagctggtcacttagtaccgtctgcttagcacataccagaattccaaaccctgcaaagcaaagcctgtgttcagcataaaccacgttgtttgcatagtctatgcacagggagccacccatatcagctaactgttgactgggagcgaagttggccaagggtcaacattgcaaggagacctttctatagatagtagtctctcaggccttcagtgttaactcttttctgcacagggtgaaaaaagaaatgacactccctgctccagaatcagatcatagttattctatggtactggatatggaggttgtggttggtgattcagggatcttcatttttgctgtttttcttttccagaatggctttgactacttactaacatacagtgacaatccccaaacggtgtttcctcgctactgtgttagttggatggtttccagtggcatgccagatttcctggagaagctgcacatggccactctgaaagccaagaatatggagattaaagtaaaggactacatctcagctaagcctctggaaatgagtagtgaagccaaggccaccagccagtcctctgagcgaaagaacgagggcagctgtggccctgctcggattgagtatgcttgacaggctttgggataagaagggacaaggtgcttctagccctgtctcagtccgttatcactctgctgtagaagggggacatgccacatgtattagaaggcatctgctgtaacttccagtgcaagataattcaataactgatgtcccatttcattcagagcccttattgctcttatcaaaacagaagaaggctacatttgtgggagtgttgtcatattctcaggccaactgttttgaaattcggtatctcactgagctaatctggaacaaacctctcacctcaggccagaaggggatgacctccatttgcttctctgagtagtttcctctgctgacattccaaatcccaccatcgattgtgcagcgctttggatttccttcagttctccaggtccacctggaaagtatagttggccagttgagtctctcaaatgaggggctactgggagtgctcttggtaacaatcatgatgtgaatgggtgtgaacgatacttggctatgttaagtgccttgtccgcaccttgcttttatctctagagacatgaagttattattaattttttttttttttaagtagagatggagtttcactctgtttcccaggctggtcttgaactcctgggccatgcctggccagggacatgaatttgtacaaagaaatttccctccctgcctgcacaatatcacccattgactcaccttatccaaagcaagtttcctgtgaatcggccagttcttctatattcattggatcattgcctccttcctaaccttccccatttaccaagaacactgggagactaatccttttagatagtagctttttgatgctcaaaacatcacatttaaatttagtttaaaaattttttaacttttgtgtcaaataggagttgaggaattgagcaggattctaccctagtccgattgtatagaaaacaccattttgattcaggtattatttttcatatttcaggtttgacttgttcttttcagaaggctaaagtcagaggaatgggggctgggccactcccttggagctctcagatctacagacaagctgtgtgaatgcatagatgtaatcttgtctcaaatactaatacagtggagatttggtttatgttaccattaagttcctctaaaaagtttttcttcctctcttcagagccaaaataaaagtgaactacactgttcagataaggtcacaatctgatgctgtcagtttgaccgagctggttttgcttatggtcatgctgcaatttgttagaataatagggatcaagttttaaatcctcctccttcccttttttctggagtcttgagggccagagtttttgtttttgtttttgttttttttttcctgcttgctactgttttgtggtgttgaaaagtggtttaaacctgagactaacttaaacacttccttgaccttcttgttgcctgttcatttttgtgccaaggaagtagctgccccagtgtatgtcttgccttctccgcgtcattgttggaagaggagagatgcatcgagcagtcccagctgcttttcatttattacttcttctttccaggacctgacagaagtcagggaagagtccctgggttatgtccaaacttagcacctgcaattgttgggatgtggatggatgtgtgcataagagagagagagaatatgtgtgtgtgtgtgtgcgtctgcgagcgcacacacatgcacaagtgcgaaggagttgcggttgctccatgttctgacttagggcaatttgattctgcacttggggtctgtctgtacagttactcatgtcattgtaatgatttcactcctaactgtgacatttttatcaaatgtgtgaataaatacataaagattggtac

SEQ ID NO: 427 - DNA, 2521 bp, Homo sapiens
tctccaatgggaggctagccatacctgaaatcttggcccccagatttgcaaaacagttccaaggaactcacatgagaaaaacggtgctagagacatgattagggtgtcatttctatgtgcaatggctcaccgctattacttgagccatttgtaaacagcgtttaacttgtgcccaaaacaacccctgaaaagggcccactcagcccccgggaattcaggaaaaaggagctatgccctgtgaaaacctgcttatggacttctccgaattgccccaagcaggggtctataggtacattttggtgcttgtctgtaccttttcaggatgggtcatggccttctccgtcaggacagagaaggcatgagagttgatgaaggtattgttaagagacattattcccagatttggactgcccctaactttgggttcagataatggactggcatttgtggctgaaatcgttcaggacttaactcgactgttaaaaataaaatggaagttgcatccagtctaccagcctcagtgctcagtaaagatggagcacatgaaccagatactcaagcagctgctgaagaaattttgtcaggaaactcatctgaggtgggaccaggtcttgcccatggtctttctccaagtcaggtgcacccccacaaaacaaaccacactgggtatttgcccaatgagattttgttcagccagccacccccaatcataagtcagattaaaggtaatctccgtgagctacaaaaactaactttaagaaggcaaatgcaggctttagatatggccatgcaaaaggtatatggctaagcgcaggaaagaatgcctataagtctggcagacccagtacaccctttcaaacctgaagactttgtttaggttaagaaatagactccaactattctgagccccatatgggacgggccccatattgtgatcttgtccactcccactgttgttaaaattgcaggtatcgtgccttggatccaccacagtcagctgaaattatcagcccaggaccagtggaccaaccagcaggacatagaccatctgacccgaatgatcctgcaatgagaccacattgccagtggagatgacaacagcactgctctggtcactctggaagatgaccagtctatgcatggtggaagcttgagaaaatagcaagccctgctctagtcacaccaagaactgactagtctatgcacggccgaagcttgaagaatcgtcatcagatgaataaatgtggccagaaatcttaggcccagtaatcttctttgtattattcattatattgctcttgtgctattgtttaaccaaccccctaaatgcctttactgttcatgctggctgtaagaatgctactgtttgctttgtttgtgctgatccccatatctatgctagaaggaggacccgtattaggatgccgtcactgcatgcacactacatggataagaaacacagtaattgctcacgcctgtaatcccagcactttgggaggccgaggcgggcggatcacgaggtcaggagatcgagaccatcccggctaaaacggtgaaaccccgtctctactaaaaatacaaaaaattagccgggcgtagtggcgggcgcctgtagtcccagctacttgggaggctgaggcaggagaatggcgtgaacccggaaggcggagcttgcagtgagccgagatcgtgccactgtactccagcctgggcgacagagcgagactccgtctcaaaaaaaaaaaaaaaaaaaagaaacacagtaattaagactttattataccatacatactataggtacctgggcacaagataggtcagggggtactgtacccctatttacatgcttaatcacatcataaggttgcaggtggtacttgaaatcatcactaatgagacagcaaatatgttagacttgctggcccagcaagccacagaaataaggatcaccatctattagaatagactggcttcagactgcctcctagcccaaaaagaaggattatgtggaaagttgagcctgatgaattgctgcctagaaattaatgataacaggaaagccatcatagaaatagctgccaggatgtggaagatagctcatgtcccagttcagacctggaacccagatggtctccagattccctcttaggaggttggttttcatcctttggtggttttaaaacagtaggggtagtgttggctatattaaaaggttgcttaatgttcccttgcctcttaggcctcctcatcagaaacatccaatcaatcacagaatccatcgttaacagaaccacctccactccactgatggctctaaacaagtatcaacccgtaccaaacagagaagaactgacttgtaatgaggaattaaatgatagtgatgccttctattgaattccatttacaggaggcatcagaggggaagatgagatgggaaagaaagaaagaaagaaagaaagaaagaaagaaagaaagaaagaaagaaagaaagaaagaaagaaagaaagaaagaaagagaaag

SEQ ID NO: 428 - DNA, 2330 bp, Homo sapiens
gtgctgtgggcgccccgagtctgggcggggtcccgggtgcgcagcctgctggcggcgtgggcgctgtcctccgggaggggggccgtgctgctcgcccggagcccctttccccatcacttcttcggcggtccctgaggcggagccccggagtcccgctgggcgtgagatgcagagagcggccgcagagatgtggtatggtgtattcctgtgggcactggtgtcttctctcttctttcatgtccctgctggattactggccctcttcaccctcagacatcacaaatatggtaggttcatgtctgtaagcatcctgttgatgggcatcgtgggaccaattactgctggaatcttgacaagtgcagctattgctggagtttaccgagcagcagggaaggaaatgataccatttgaagccctcacactgggcactggacagacattttgcgtcttggtggtctcctttttacggattttagctactctatagcatacatccttatgctgagatgttgaacttaaactttatggaatcctccaaaagaatacattatggagtgtagtgttttcttagttcttcaaagggaagcaacttggatgaacaggaacatgaaggacaacacatctcagccttttcttcattttgaagctcctagaattgaagacttatgtggactcctattgttctcaaccaaaacaagtcttttggctttcttttttgtagatatttaatttaagcagttttcatgtgtacctttacgcaagccaagtcaacagtgtctctggggtggcatcctttgcactgaaatttacagtattctgtgagatgtcgcatattttgaagaaaccgtggaagatactggtttatttcaaatgagcagagtatgttgtattaaaatcttatctaatcttgattaaaatttggcaaactcttttctttgctacatcttagtgacaataaatgccaaataggttttggttgagtatagttttgaaaacaaatttggtgaaataaagcaggaaaaaaaatttaagtataactcaagtagtggctttggttccactgtttataaataaaaagtagataacaatgaataatgtgacattttctggacaactgtcttgacttctgattaagatattttaagagatgtgaatttgttattttgtatgttttatcaaaataagctagctaatttagactttttagattttctgtaccacctttccctatcacttttaattctcttaattttatttcatttaattggaaacatacataccctattaaatggcttgagttggaaattttaagccagatttgtttggacattgagacacacataagatactttaggcattctgtcatagtttttcttagtgactttggtatactaatgacccttgagaaactatagaagtgcatctgaaactagagttagtggttattgattttttagcttaatgtgtttacctagtggtaactcttcagcccacttttacagtattgggtatcaactcccagaaagtgcctaaagtttaatgttcagatatgtacccactctcccctttacatttttattcaaaagaatttatatctttaaagagatttaaatatcaagagtttttttaaaacttaattttagctatttaaatttttattctactgcctaactttctttttcattaaaaggcctgaaaactgtgactctttgagagggaaagaatcgcagaaattaagtatttaatgtgatcctttccacctaaactgttttgtatggaatacaatcagtgtggtggtagtggtggtggttatctgcaaaatagtttctggtgattaaatctgactttttttttttttttcttttaaatgagacgtagcctcactgtgttgcccaggctggagtgcagtggtgcaatctcggctcactccaacctctgccacccgggttcaagcgattctcctgcctcagtttcctgagtggctgggattacaggcacctgccaccgtgcccggctaatttttgtatttttagtggagataggtttcaccatcttgcccaggctggtcttgaactcctgaccttgtgatccacccgcctcggcctcccagggtgctgggattacaggcgtgagccaccgcgcctggccataaatctgacatctttaaaggaaagttttcattgtgagattaaggcttaacagcccatgaggtcatatacacatgaacgtatctattccatttaaagcaatacacactctggcttctgattaaaaatagccaggaggagagtctctgaatctactgtgattctggagtctgcccaatttgg

SEQ ID NO: 429 - DNA, 3204 bp, Homo sapiens
aaaagggacttggacgcgaaagccctggtggcgctcagccggttgggagttgtagctttctggctgctacagcaggagatacaggtggccaatgggtgagctggctggagggtcatggatgggctaaaatgagatcactcctggccaacgcatggaaggacacctggcgtgcatcagctctcagccgttcttaccgtctgtctcgatctctcagcagtattcagcacaagtctacatggctgaccccaataacaaccctggacaccaaggcccaaatgaggacaccgaggcacacacggcttcagttgcttgcctggagtcacccatgcgatttgcaataccaggtaagcagtgtcatgtgacttgctttggccaatcaagtgtgagtgggagggagctgcggcatcgcatccaaggagaagccttcgcagccaccgctgccagatatggatggagtctcactctgtcgcccaggctggagtgcagtagcacgatcttggctcgctgcaagctacgcctcctgagttcacaccattctcctgcctcagcctcccgagtagctgggactgcagagacaggtgctcgttatgttggccaggctggtcttgaactcctgggctcaggtgatcctctcgcttcggcctcccaaggtgctgagattgcagctcccagaagctggcagcctggccctggcagcctggccttcaccccccgccaggaggccagaggagttttctcagggggatttgaccagccccagaggaggaacgaaagatggtgacatctggcactccccaacgtataaagcaagatgcaaaacagcatgtacaggccgggtgtggtggccccgacctgtaatcccagcacttcaggaggccaagttcctcagtgtactggacacatttcaagtgctcagtagccacttgtggctgggggtgcagaatcacagaacgtttccatcctggaagaaagttctactgggcagcactaccctagaaggtaagctctctgcggacagagaccacgtgggtctggtttgctgctgcatccccaatgcctcggtaagtacttattgaatgaatgaacggatgaatggaggaaaggagtgaagggatgagagggcggatgaaggcatgaatgacccacgagtcttcagcgcggctttcccccgccccctcccccggcctgcctctctcgagaccccaccttggcctcggggtcggtgcggaagaggccctcgagcacgtgcagggcgtccaggacgccgtggtcgcggcccttgcagtaggacagcaggcggcgcacgtcggctggggccacgaactgcttggagatcttgttggtggtgcgcaccggcaggcaggcgttggccagcaggtggcccgggcggaagtagtaggcgaactccagcgggcaggccgggtgtgagtgggtcagctggcactccgtcaccacgaggcggtcccgcagcgggctcagcttgacgatgatgaaggcggggcagccgggctggggaggcctgtgggaggaaccaccaccgccctggtcacatcactctgctgccctcttcttcctttccactcacctttttttttttttaaactaagaattgtttcaggcatagagaagagtagagggccctaagaatatgccagctgtgtgacctggggcaagtcacttcaagtctctatgcctcagtttcctcataggttacaaggaaggtcctactcatcataccttcctcataggatcgtcatgagcatgaaaagagttaatataggtaaagcacctacacagtgtctggaatatggcaagcagtaagtgttcactaaaattctatacctaccacccttagttctgtcaaaagtgagtgaatgttttattgtatttaccttaacttttttttagaaataaaaaatttcagatagtcctgtatctgcttctggtttagtaataacatcaaaagttgaggccttctgtgaacgctgccctaacagattatcttccttccctctgtccccagaggcagccactatcaaaattatctattagcattccatgtatatttttatgcacccataaacaatgggaggtatgtttctgtgtgttaaaagcattgtatacgtgaaaaaggactcaaactcattagtcatcaaagacataacaaattaaaaccctaaggaaatgccactacacatcagcagaatggtcaaacaaaagagactgataacatcaagtgttgatgaggacgtggagcaactggaactctcacccatcactgatgggaacgtgaaatggcacaagcactttggaaaacttcatggcagtatctactaaagcaaattttatgtctctcctgtgacccagtggtgccactcaagacaaatgggcatctaaagctgtgtacgagaatgttcatagcagcactatgtgtattcgccaaatacttgaaacctaaatatccaacaatagagtgagaaaataagttgtggtatattcctaaaataaaacactaatcagcaccaagaatgaacacaccattacaacctccaacaacacggatgaatctcacaaacctaccaagtgaaagaagccagacatgaaagagaaactgatataattcccatttatataaagttcaacagcaggcaaagttaacctctatcgttaggaggctagatagtggttacccttaagtggttaaccctgtgagggggcaccaggaggtttcttgggactggacatattctgtttcttgttctgggtgctggttacctctgattttttttttgggaaaattcattcagtttcacacatatgatgtgtgtacttttctggatgtgtgttacattttttaaaagtctacttcgaaaaaactttgtttttggccaggcatggtggctcacgcctgtaatcccagcactttgggaggctgaggggggacggatcacccgagatcaggagtttgagaccagcctggccaacatggtgaaaccctgtctctactaaaaaaaaatatatatatatatattagccaggcgtgctggctaataataggctaatgggattacacctgcaattccagctacttgggaggctgaggaaggagaatggctttaacccgggaggcagagattgcagtgagccgagatcgcactactgcactccagcctggggtgacagagcgagaccctgtctcaaagc

SEQ ID NO: 430 - DNA, 3162 bp, Homo sapiens
cccaaacctctctcgcacgcggggactgagcacggcccgaaaagccgaggacagccggactcaccctgtagttatagtagtgcgtctgcacaagatgccggtggcgcgacttgtggttgccgaagttggatttctcgcaaaccaagatggggtcttgctgtgttgcccagactggtctcaaactcctgagctcaagtgatccacccaccgtggcctcccaaagtgctgagattaaagacagagtttcactctcgttgcccaggctggagttcaatggcacgatctcggctcactgcaacctctgcagtgtggtagaacgcagatgtggtagaaatagccaccgcatcggcccacatcaaagttttaaacaaagatatgctaagctgtgtctgttggatgtgccaaggacctgcaattttggttacctgcaaaatgctttcctactgtggccttgtgctaccagccaacgtgacaggatgccagaagcacaggccctttgaaactgttgtacttatgctgaggatgctgcccttcattgaaagagcataagagaatgtcttccgctttagcaccagaaagagttacaattcttctaagaaagtggctgcttcggtatcacagacactctgactcacattactaatcatggtcctctccctgcataggctgctgggaagctcagaaccagacctgaggccgtgctcctggctgcttactgtcctgccttctaaccacccttttgcttggaaacctcatcccaggacttattttggttttcctattcttattttcctgatttttcttacttaacacacccacaaacaattctgatctgtggttaaaaatatatcgaaattcagaataaaattaaatgcaacttgttttcaaataaactatgggagtataaactatatactgagagacatgatagggttctaaaatttcttactgagaatttggaacaacaatgttaaatgatggtaaggttcacagggcagtccaagtaaatttaatttaaccatgctgcagcaaaatgacagtgttaagagaagtcactcccagcgtaattctatactcatgttaaaaaagaaattcttattagaggatttgtgtttaaagagacatcattgattatctgaatttgtataggcactggatatattaagtcaactaacaaatcataagcatttaaataggagtaagtccaggggccttgtaaataacccatagtttattcagtcagttgacttgttcttttttccttacataaacaagtaacggggtgatttaattcagtgagagtggtgaagtgaatacagatctgtgaagaacaataaaatgttaattttatgatcctgtttattttgctgaagtttctacatgataggaaacaaatgcaaattttgacccagggtcagtccttactatttccagcagcagaaaatgaatctactaggatacctgaattttataagcaaatccaacctatttcatataaacataataaggtcttggacacagttattcatagtccgagactattaactgggctctcattcagcatttatgcatttgaaatctacctagtcaaattttcttgacaaaatgttagcctctagaggaagaattctgcttctgataacccattatgctacttttacacgcatgtgttaagcaagcagcagaatcagatttggaatttagaaagatattctttccggtggcaataggcaggatgcctggcagagcaaagaacaggaggtagatagacccggagggggctgtacaaaatgcagacagaaactgatgaaccaacaaaaagcaatcaactcgtgagacataaagaaggtccggcaagggaaataagtgagagaacctgctgggcataaggacctactgactacggtaaagtaaggggagaaagtgaagtgacttccagcttgcacaaggaaatactgggatgatgagaggcaatgctggagtgttgagtttgcctgaaggattaggttggggatgggttagggatgatgtggagttttagtttagatacgaggtgttggtagcataaccagaaaatgcccaggaggcccctggaaaggacaaatggaggggaatcactagagcacacaaggttggagccatgagttgtgggcatctagggagggtgtgggaaggtcaagatggagtgcaaggggcctccaatgtcaagcggagccaagagaggagcagacaaggagaaggtggtgtcccgcacgctagggaaggaagaaagaagctggagactggttaattgggccaaagatacaatgaaggaaagtgacaagaaggaaggtggcaggccagactgcagcagagtgaggagtgagggcagctgacagccgggagagtgcacagaccattcccaccagctgcaggctgtcagggtatcactgacttcctaatcggcacaggccacattggtcttttcccaaggctcttccagacctgcagaatctgggtttctgctctatgagggtccctgagcataggcccttaaaaacattctcaccacccccatagggaacagtacctggccatggcgcagaacaagtgcatgagaggacagagagagaagggaagctgatgcccccggcagggatgctcatgctgcctgccgcagccaatcaggtggaacccagggcctgtggtctaggatctttccttccattaaggtaaacagggcaaaataagactcaaaacaccacaggcttcgaagacatcacctttcagtactccacctagctctgccaaacctagcctcagctgtatcctattgctgaaaactctccttacagtacatccaacctttccaggccttctctacgtctgcttgttccctgactcactctggtaaaatctcacctcctatctttcctttctcttcattttttctgccatccattattactactctgcagaagtatttacattaacactactccccctcctctgctgacactttggaatatggcatgtacccaagttaatttattttcaatgtataaaactgtaccctttgtgataatattaccttaggatactcaaacacaatacaaaaatatttacttaagaaatctaaaacaatagcagctgggagaaatatctattaaaataccaactgtg

SEQ ID NO: 431 - DNA, 3450 bp, Homo sapiens
gacgcgcggtggggctggggtggcaatggcggtttggtccctcttatccgcccgggccgtgaccgcgttccttctgttgttcctccctcgcttcttacaggcccagaccttctctttccctttccagcagccggagaagtgcgacaacaaccagtactttgatatctccgccctctcgtgtgttccttgtggagctaaccagaggcaagatgcccgaggaacttcatgtgtatgtctaccaggatttcagatgatctctaataatggaggacctgctattatttgtaaaaagtgcccagaaaacatgaaaggtgttacagaagatggctggaactgcatttcttgccctagtgacttaactgccgaaggaaaatgtcactgtcccattggccatattttagtggaaagagacattaatggaacattgttgtctcaagcaacttgtgagctctgtgatggaaatgaaaactcttttatggtagtaaatgctttaggagacaggtgcgtccgatgtgagccaacatttgttaataccagcaggtcctgtgcatgttcagaacctaacattttaacagggggattatgtttcagcagcacagggaattttcctctacgtagaatttcagctgcacgttatggagaagttggcatgtctttaacttcagaatggtttgcaaagtatttgcaatcatcagcagctgcatgttgggtatatgccaatctaacatcttgtcaagctcttggaaatatgtgtgtgatgaacatgaattcttacgactttgccacatttgatgcatgtggactatttcagtttatctttgaaaatactgctggactgagcactgttcattctatttcattttggagacagaatcttccttggctgttttatggagaccagttaggattagcacctcaagtgctcagttctacctctcttcctacaaatttcagttttaaaggagaaaaccagaatacaaaactgaagtttgttgctgcttcctatgatataagaggaaattttctcaagtggcaaactttagaaggaggtgttttacagctttgtccagacacagagacaaggctaaatgctgcttattcatttggaacaacctaccaacaaaattgtgagattcctatctctaagatcttaattgactttcccactcctatattttatgatgtgtaccttgaatatactgatgaaaatcaacatcaatatattttggctgtgcctgtgttaaacctaaatcttcaacataataagatatttgtgaaccaagacagcaactctggaaagtggcttctaactcggcgcattttcttagtggatgcagtaagtggacgagaaaatgacttaggaactcagccaagagtaattcgagttgctactcaaatatcactgagtgtccaccttgtacccaacacaataaatggaaacatctaccctcccttaatcaccattgcctacagtgacattgatatcaaagatgccaacagccagtctgtgaaggtttctttctcagtcacatatgaaatggatcatggagaagcacatgtccagacagatattgctttgggtgtattgggtgggctagctgttttagcatctcttttgaagacagcaggatggaagaggcgcattgggagtcccatgattgatttacagacagttgtgaaattcttggtgtactatgctggtgatctggccaatgttttctttatcatcacagtgggaacaggtctttactggcttattttcttcaaagcacagaagtctgtgtctgttttgctgccaatgccagttcaggaagaacgttttgtcacttatgttggatgtgcctttgctctgaaggcactacaatttttgcataagctcatatcccagattacaatagatgtattctttattgattgggagcgacctaaaggaaaggttcttaaagctgttgaaggtgagggtggtgtacgaagtgccactgttcctgtaagcatatggagaacatattttgtagcaaatgaatggaatgaaattcagactgtgagaaaaattaattcactctttcaagtacttactgtcctcttctttttggaggttgtgggattcaagaacttagcattaatggactcatcttctagtctttctagaaacccacctagctacatagctccttatagctgcattttgagatatgcagtgtctgctgctctttggctagccattggaattatacaggtcgtgttctttgctgtcttttatgagagatttatagaagataaaattcgacagttcgttgatttatgctctatgagtaatatatcagtgtttctgttatcccacaaatgttttggatattacattcatggtagatcagtacatgggcatgcagatactaatatggaagaaatgaatatgaaccttaaaagagaagcggaaaatttgtgtagccagagaggtttggtacccaacacagatggtcagacttttgagattgcaatttctaaccagatgagacaacattatgacagaattcatgagacactaataaggaaaaatggtcctgctagactactgagttcatcagcaagtacttttgagcagagtataaaagcatatcatatgatgaataaatttcttggctccttcattgaccatgttcataaggaaatggattactttataaaagataagttgcttcttgaaagaattcttggaatggaattcatggaaccaatggaaaaaagcatcttttacaatgatgaaggttattctttcagcagtgtcctgtattatggaaatgaagctactcttcttatttttgatctgctgttcttctgtgttgtggatttggcttgccaaaattttattttagcatccttccttacatatctacaacaagagatttttagatatatccgtaatacagtaggacaaaagaatttggcatccaaaacattggtggatcaaagatttttgatttaacttcctgaataaataacttaaagactcagtataatcatggccaaaaaaaagtcatgatatcaggttagtttgccatattttttaaaacttataatgcagactattctgtttttgttttttatttgcagaaagatttatttttataacttgggaatatataacctgatataatagaaaatactgttttcccattgtgtgtagtatttaatgcagtaaataataaattaatactgacagtgaggccaaaaaaaaatctaaatgttgctttcagcataatactttttaatgctaattaaaacagtccccatcatttgtctctgtagattattttataaactgagagctgcctgaatcttctcacattgacaaagtaatttgattccaagtttaagactagttttcagtttgatattttcatgttttgtgtgcttatggttaaataaatgttgaaagatattttcaagttt

SEQ ID NO: 432 - DNA, 3186 bp, Homo sapiens
aattggatatgggtattgtagctgaaacgtcttgcgagctgagtcagggtcggggaagctgtgatggcaatgagaagtcaacacactgaggatggagagaaagaagatgagtctgggagagaaagagaatgattcttctggccgagggaaagcaagaatatctgttcctgcaactgcactgattctagaaacactctctattcgaactctcatgagatggaccgaaaatgctgacgccaatgccaaggaaaaaagtgtcttgaaaaagcagccgtggacgtggagttaccaaatcatccgaagtggctcctggaccgggtggaggagccaggctgcagaaatgcagttcatcgcaggagttttcctgaacagagaaaagtctccacagaatagcaaaaatagcagaaactcgaagtcaagggtcttgaggtctaaattttctgtgtgaccccagggaaatcgtttcatctttctaggtcttcacatcctcacctgaaaaataaagtgcttggctaagaaaggcttgaggttttatttggctcattctgtggttctctaggtcagtgtttttaaagcttcctcacgtatctgctgcgttcaggagcctcagtcccaaagagtcagtattgggtggtaactgcacttttcagtgagactctcatgttccacactaggcccccaaggattcttctgcaggtaatccatgctgagaaaatctgcaaagtctttccagcctggtccagtccacacttgttttgccctttccaactctagactattgattcctggaggacgaagaactatttttagccttctttttctgcactgagtctcaggcagtgtcagacttacttattttaggaaatctttattgagacctcctggatgccaggtattggggtcacaaagacaaaagttcccttaaggattactgtccaattggaaggacatacatgcaaatgaatatatgcctggaaatttgttgattgattaaatgggcatttaatatatttttttcaaacccagagacctaaatatttactgatctttccctaccatcccattaaataacagttctccaggatctttgaaggaatataagctcatggaagggcagagatcatatcagtcattctcatccttttataggtacttttgttaagagtcaactgtggcacagatcattactttacctagatcttaatcctaacaacaatatttttatggagaaggaaactgaggctcagtgaggctaagccatctggccaaggtcatacaataagaggcagagctcagagtggaacccagtgtgatatatcaaaatacagtctacacatctttcttccaaagcatttttcctgtagcaattaagtgtgcctgtaacttttcagctaacctccagaaagttaagatggctgtgtcttttataagatgtaattatttgagaaacaagtgactaaaacttgcaaaatctgcagggaagaacttctaggctctttggagtttttttgccctgcaccaacatcctctcaaaggcaaggaacagcaattatgataaaagagaccagaaagtgaaaggaataaacaatgtagcgattgctctgggaaaactatagctcatttttattttgataatgacctctaatcttcccaggggaattttgagcatgtatcttatcttaaaacatttttttgaactttggcacttttattgcctttacaagaacagctatgattaagggatgactctcttagttgcaatggatgaaacaattaaatgtgtttacctgctgacattccaaaccacttcttgataggaaacaaaggtgtgaaacagctctggtgtttatgtgaacataatttttttctaaatattatttttttttgttttgcaccctgcttagaatgtacttttgattttcttgagtttagatgaagttgacaatcatgatgtaaagccagatcgaaatagaattcctgttgccattttaagtttataatgtttaactacctaataatggctggaaattaagtctggaatcacacccaagttatactacatattcaatcaggctgaatttgacgttaatgatatgactaggaggagctaggaaacaaattcttttttttttttttttttttttttctcatttcatgaggcaccctataccagcagtaaaatgtttcttaaatcagaggaaagaattgaccttacagtttccttttttttctgagatggagtctcactctgtctcccaggctggagtgcagtggtgcaatctcggctcactgcaacctccgcctcccgggttcaagcgattctcctacttcagcctcccaagtagctgggattacatgtgtgtgccaccacagccagctactttttgtattcttagtagagacagggtttcgccatgttggctatgctggtctcaaactcctaacctcaggtgatccgccagtcttggcctcccaaagtgctggcattacaggtatgagccactgcgcccggtcagttacttttaaaacttgatctagaacgctcttgattttggaattataatgcttaatattttcctcaattatgactgcccagatttagccaagggcaattagaagaggaaagactgacttcatcttgacccctggggccagagctactatagcaaggccaacttcaacccgtatggaagatgtggctgctgagagcttcctatagagcccctgacataggataaagggaaaatatgtctgttttaaatcatactaacattgtgataaagtaatattatgtcctttgaaggacctaaaatagtgctaaattgtatcatgaccaagaaacatttgtttagcatttactctgtgccaggcactaaactaggtatgaaggatataaaactaaataaggtgtaatgtttgtcttcaaagagtttctttatcctgcaagaaattagagatggctaaatttaaaaaaatttttattaatgtatttttaattttttttttaattcataaaatccagatcctgcacaagatagctggacttctctaaggaatcagaattacaaggaaaacatattgattttatccctttgttagtgaaaataatacattcagatttgaaatggtcaattgttcacagtgatttttggctgttatgaataaagttgttatgaacatatgtgt

SEQ ID NO: 433 - DNA, 2688 bp, Homo sapiens
ggcggcggcgcggaggtgcgctcgccggtgctgtgtttggcgggtggtggcggcggcggcggcgacggcgacgcgcacagaggcggactgtggcttccttggtgctcgctgcgggcggcgccgaggccgaggagcgctcgctgcagcacatgctgcgtgccatagcggaggagcgcggccgtcttagcctgcgccgcgaggtctgcggcctcgggtgcttcaaggatgaccgcatcgtcttctggacttggatgttctccacctacttcatggagaaatgggctccccggcaggacgacatgcttttctatgtgcgccggaagctggcgtactccggcagcgaaagcggtgcagacgggaggaaggcagctgagcctgaggtggaggtggaggtgtaccggcgggactccaagaagctgccaggcctgggagaccctgacatcgactgggaggagagcgtctgcctgaatctcatcctgcagaagctggactacatggtgacctgtgcggtgtgcacacgtgctgacggcggggacattcacatccataagaagaaatctcagcaagtgttcgcgtcccccagtaaacaccccatggacagcaagggggaggagtccaagatcagctaccccaacatcttcttcatgattgacagcttcgaggaggtgttcagcgacatgaccgtaggggaaggagagatggtctgtgtggagctggtggctagtgacaaaaccaacacgttccagggggtcatctttcagggctccatccgctacgaggcgctcaagaaggtgtatgacaaccgggtgagcgtggccgcccgcatggcacagaagatgtcgtttggcttctacaagtacagcaacatggagtttgtgcgcatgaagggcccccagggcaagggccacgccgagatggcggtcagccgagtgtctacaggtgacacatccccctgtgggactgaagaggactccagcccagcttcgcccatgcacgagcgggtgacctccttcagcacaccccccaccccagaacggaacaaccggcctgccttcttctccccatccctcaagaggaaggtgccccggaaccggatcgctgagatgaagaagtcgcactcggccaacgacagcgaggagttcttccgggaggacgacggtggagccgatctgcacaatgcaaccaacctgcggtctcggtccctgtcgggcacaggacggtccctggtcgggtcctggctgaagctgaacagagcagatggaaacttccttctctatgcacacttaacctacgtcacgttgccgctgcatcggattttaacagacatcctggaagttcggcagaagcccatcctgatgacctagccgcgtgcggagcctgcgcagagccccggccgggcccagccctcggagtgctgccaagtgcctacctgtccaccgccaccggggtctgcgatggcacgccagtgctggagccgcagccaggcgaggccactcgactcccggggccggggccgactccacgaacaccagcccaaactgaagtgcctcttccctcccctgctggcgctgctccgccctgtgccccccgcccatcgccccccacccatctctggagagccctctgcacccaaagaggactagagatgccgagcggccatgagagagagcggaaggagcagctgatgcccagagcggggccagagcggcgggtctatgttcacgtccccccagcagcaggcggaaccacccagccagggcactcagtgcattggactgtccacatgttcttgaggaaagccggtggaagattctggaatgccgtgcggatgaacctcagcacccgagtcagtcccagctcatcctccccagtttaccactttgttctaataggagatgggaacacgagaagtttgatggctttgccctgggctgggaatacctcacccacgcccagttccagaaaggcctccagctgagcagacggccccgatccagccaaagaacaccgccaacacgcacacctccaacctgggacatcccacgttgggcctcgcacggaggaacctgcagaatttggattctgagggtagtcgggaggcctcggtagccaggcagaacaggatatctgccaaagggtgtctgatgtggggtggggctggcatcctcccaggaaggttctaggtgggaccccgtcttctgggggcgggggtgtcttttcatcttccctggtttcctagaactcacttcctttgacggcgtgtgttggtcccatctctcagaccagctcactgaggcagaggagttgctcagaggctcacatgggcacccccattggttcgtgtgagcagctgcccagccccaggcctgccctcggcctggtccagcatgaaggcgtttccatctgcaaggatgcacggtaccctccccgagagcaggcctgtcccctacccaactgggaataaactggaagctgggtctctttgttgctatgtttttttgtttgaagttcccaggaatatttgaggggttccggtgatgtgtttagggatcttctctgtgggggaaaaggaagaggagggtcttgttctcccatctgtttattctttgggctctgggaacaggggactactttggggctttctccagacttttgtatgttgttattaaaagcgagctattgcatttc

SEQ ID NO: 434 - DNA, 2841 bp, Homo sapiens
actgggagtgctgccacctcgtggtgcaagagttctgagggacggcaattctgaagacattgaatggtgggtgctgggcctcatggctgttccccagcccctctcattggctctgctccaggtggagaagggggatgatgtctctgtcagttctgctgttttagcctagaaggaaaagaagcagagcccagaagcagggcctggtacccagcctgcctaacaagggagaatttgtaggctttgtggacagaaagatctgggactccatgtcacccactaacttgctgagacattagtaaaatcagttttcttttctgaactatgtttctgtcatctgtacattgagaggaatttcttttactccacgaggctgcttggagaattagtgacagtgtgtgtagagcatgtgccacccagcaggcatttggtgtcgagaccacacctcctcccccttcattttcagcctaaatttgcattttgttcttaagactttcactcgccttaattttactctttcctctgattcccaccttatcgtctatcccatggagtcactaggatctaagtgggtaacagtcatgtatgcatgtatgtgtatgtacgtatatactttgttggtgttggagtgtggtgtgtgaatgtgtgtgtgtgtgtgtgttggagttactgggtgactgaaactgtacacatcaggctgtggttctgcccattgctggaagcgctgtcaggggtcctgccctcaaccccaggtctgacccttgcagcgcaggcaggacattctggaggaatcatgcccttgggaggatccctgaggagtgactggtgggtattggtggataaatacccctggtcccttgctctgggtatgatgactctgaagcacatgttctgtgctgtctctcagaggtacctggcagggctgagtcctggctgccacagtggaaactttcttgatgaaggtccctttaactgctgcattcctttcctgtctcagttccccactcctccactgatgtttcctgggattagcaccctaaggaagaactggcagtcgaattaatatcctagcgttatctccaaacaaaatttttgtatttgaatctttgcctcaggatctacttccaggaaattcagactaagacatacatttttcttgtggccccttgaatccccataggcctgacattttgctgtttttatcaaaaaggaacatgaggatcagagagggaaagtcacttgcccaaagtcacccagctgaacagtggtagagttcaactttgatcatgagatgtctggcccccaggtggaggcttgctcctctcccatgagactccttccttatcagggtcaaatgaatgaatggaggatgttaaaagtggggtctctgatgcctttgccagataaaccccaggctcatggctggcgcctgttttctcattcttacctcattaagagtagtaatgaaaaacatgctcagtgctgaccgtgtgcctgggggtgttgtaggcactccacttactttaattcatttaattttcacaataaccttgtttttacttctagttgttatatgaaaaaactgaggcaaagagcaatacagagagttgcaaaaattcataccgctggtccaggtttgaaccaaacagtctgcacctggagtccttgtttgtaaccatggcaccctgtcttcacacatatctcatcgtggagttccatcttgtgttaggcatggcactgagcagcttcttttaagaacataatttgtagccaggcgcagtggcttatgcctgtaatcccagcactttgggaggccgaggcgggcagatcacgaggtcaggagatccagaccatcctggctaacttggtgaaaccccgtctctaataaaaacacaaaaaattagctgggcatgatgattggcgcctatagtcccagctacttgggaggctgaggcaggagactggcatgaacccgggaggtggaacttgcagtgagccgagatggcgcgactgcactccagcctgggcgagagagcaagactccatctaaaaaaaaagaaaaaaaacatgatttgtaattatgtaaattactaattctacttcaaagtgccacacagccttcatgtgataaaatgaagcaattggtaagtctaagcattgagaaaaaacattatttttcccagctccattgcaacagttgggacagtgttttctctgtgcctatagaaacctcagctagtgtgccgaggagtctggtccctttggggaatgtggcagtcaggttctggcagggacctcgaagtggctggtaatgtctttcattaccaccaccacgtgacctggtcttacgacctgttagcttccttcatcaggcatgagcaccaggatggcaggggcctcatctgtcctgttcctcctgtggcctgggtcctagcaccatgtctggtacagtgtaggtgctcaagggaagtttactttatagaactgtctacctgggagatgttgctgttagtctaacctgtaccattttgtaaacctgcagccgttttgcacaccctggtcagaatgaaacattccttgggaactcgggccgtgagaagcatccttcctgatcacctgactgtagaaacatccttatcgcaccctcccgggcaaaggcccaacagcctgactgcaggaacatccttgccatatcctgccgggcagcaagctctaccgcccacacccctccttcccagtcccatgatcaccccagcctgtgagaggcagttggtgctggcagtaagctggtttcctcctctgcagggttttgctagtaataaaggtgttgctgttgaagccgtc

SEQ ID NO: 435 - DNA, 2076 bp, Homo sapiens
ctcttcaccgcctcagcctccagcctcgtcccggcccctgttgcctctcccatgccctgacacctagtactgcgcttcctcatagaagaggctctgtgagcagttggaggggctctcctgcactgaacgacacatccttctgactgtgtccttcagggcttgggctgtatctgcagacagatgtctgtgatttctctgcctctgttgccgtggtgccgttcaactctgagatgccacccagacccaggaggttcccacgggctcactctgccaggatgtctgtgcctcctcctcctcagagtcatcacttccatttgttttattcttttaaaatttatttcagatttgggggacacatgcgggtttgtcacatgggtatattgagtgatactgaggtttgggcttctgatgaccccttaacccaaacagtgaacatagtacctgataggtggtttttcaacacacactgcccaccctcttgtagatcccagtgtctgttgatcccatctccatgtccatgtgtacctggtgtttacctcccacttgtaagtgagaatatgtggtatttggttttctgttttggtgttaattcccttaggatatagcctccagctgcatccacgttgctgcaaaggacacaatttcattcttttttatggctgcatagtattccatgcactatcacttattgagtacctactgtgtacctgacagagaggaggtgtgcaattaagtgtttcttagattaacaagtgaatgaaggcatacatatattaacttaccctataagaaagttactatcaccattctcaccttgcacatgaaagtctaagttctagagctattttgtaaaataatcaaaagacgtgatgctggtccacagtgcagttgattctgagcctgtcccaccagccaggagaggccacatcagagctgtccagggtcccccctcagcgtgatcttggtctcctccaccttctctccccattggagcatttcccctcttagcgcctcaagttagggactgtgtagacactgccattaggttagtcagtgcagactctggtgagcaactggataattattcccaaaaatattgacttgtgatgtgaagaagctcctctccatgccacccatcagcagaaaattgcctttggtattaacatttcatcaaccgcataatgtgaattgatgtaaatgcgtaattagaaataatagcctgggaaaatttgctcttatttataaaattgggcttcttaaattaaaatggaagctaatgacttccacgtactgttacaacatgtctgaggcttggcccgctctgctcttggaggctcttcatcacgtcggagggcgctgggggcatcaacagctctgtggggtgaccctggagcagggacgtcccccgaggcggcatggacaccacctgtcctaaagatggctctccagcaacgtgaataggcctcgcaaacacctcttcatcaacacgacaaaaggcagtctcccaggaaggaaggcgcagtgacaattttctgggctctcattcttccctagagtggaacggggaccagcctgccggctcacctgtgtgccagggaggtcatgggctttctgtgtggaggtaagcccctgctcgcctgtctcactgggcccatcccacaacctcagacagggaaccatgagtcaggcctccccaatcaggacactctggcccctgactgcagtaatagggtcaagggtgcacggtgtcccggctggacctgcgtgcatcatgatggtgagcttggccagagtcaccaggaaagtggcactcctttgtccccagcaaggcgggctgtgaggatggccagagccggctctgcaccatttggggacaagccggagcagagatcccgagagctgactcccgcgatgcagccgtgctgggagagaggtgcaccctgcattcctcaattccgtggaccttactaccttcctgttgcattccacactccagttggagctcagttttctgaaacagaaagagtcctggcagtctctatccaggtctttatctcccattaaaaatcactcatt

SEQ ID NO: 436 - DNA, 3786 bp, Homo sapiens
ttttttttttttttttttctgaatgaaagctaattccattcttttatttcctcataccacaaacatttcaatttatctgcctttttacaacctgatttacacaagcaaattgcaaacgaaaaccaggcattctttaatcatccaaaatgcatgtataaaatatagaacaaaccctagtatttaaacataaacagggttagctgaagcagctttattgcaatctcttcaagttagcatattacagtttaaatatttatgcctgtaaagatctgcataatctacaatacagagttatttcagaagcagttgacttaactagttgagaaaaaaaaaacaacaaacttcaacgcaaagctataataattatctgaaacttatttacaattaaacatttagggtcctgatttacaaaactcagtgcctttcatgatttattgatgagttttatagagaaagtaagcagtatgtagaatattccccaggtaaaatctggagtgaatggcttttagaggaaagtctatcagtatgcttaactaaaaactaaagagtgacaaaactgtatacagcagcaatcagaataacaggccacaagagaagaacgccatttttgacaatatcctttgtatgtataggaagaaaaatgattgccaccccccacccctgccgccaacttttttagttaaaaaaaaaattgtccttaataatcactacatgtgaattctgggtaataatctcctttctttctatagagttgtgtttaaacttaattcctgcatcagcaaatttaaacaaagaaaagttcctttgataacagccatcagagttcaatgggtatttattcagaggggaaagcttggggcaaggtgaccaagtgattattccaattgcaaaagaaacatcatagataaggtgctagaaacccaagattacccttgaagcactttcaatggattcaagtgatttaatgtagacaacaaaggaaatgacaaaggaaaattaacgagagaaaatgtttttaaagagaaaaatttcaataaatcaggtcccaggtagtctttaaaagaacaaaaatttacagtaaacattttaactctggaatgcaagtattgtacaattaccagtacatttacaaaactgcttagacagtaggttgctccagagtaagaatttaaaaatgtacaagccagttcatgatgactttagatatgttattaaaatacattgttaatcaaaaatactttactatgtacatgtacactgtataaactctagatttacctaccaaagaaagccttaatcaatttctggctcactggcccagaaaacagtacagttctatcatttggtcttcatattatacacacgggctgagaggcatggtactgtagccagttcgtcaataatgcatttttctttctgtagaatgtctagttggatgagtcagttttacttccactatattttactttcctaaatgctgatccaagtaactctgggcattcacataattcatttgcaatttggttacacttcaaaataaggctataattcatttcatcagttatgacactgtcttgcttgtagtcaggatggtttgcgataaactccctcatccatctggcaactgtcattagttctccagatgctctcttcttaattagctttaggtagttcagaatactacatctggtgtccacatccacttccatgttttcaaggtaagagttcagaattgggatcagtccaggaaacacaccttccttcccattgatgatggtgtctatgctcatgagggtgtactcctctgcagcgagctccgtgctgttctgggccttgccacaaccatccaccactgcattgccacctttgcaaatatctttcctgaaataaaacattccctgcaagacagcatctcttttctgtgctaccttcatgttctcatcaacctttgacagtggaatgagaaaatccaatttgtaggaaaggatcactctggtgagcagtaccacaaacaccacataggcagagttctcaaagtctgttaattgcacctccatgggtcgaaattctactctccatccaatgtctgagtttggaggagggggcttaaatctcattgtctgccaatttgtggactgaatattctcaaaatggtcagactcattagcatcatccaggtgtattttctcttcaaacagtgtcagtgggtctctaataaagagatgagcaacatgctgggccaggagatgatcaatgccttcctgcaacagctgttcgtagatctctttatctatcgtcaagtcgatgtcattatatttctcaccacacttagataaatagctgtctattgagtcatatcgggatttactgatcctatagttattgttcttcaatggctccagtcctcgctcctcccgagttctatcatctacaggtgcagaaatcactccccagcgacaatcaatgtctgacacatagcctcggtaaaagggagatgcagcactcaaagccataacaattggacagatagtagccaactgatcataaaggtatctggcctcagatatactgcaggcttggaatgtcacctgtttaagaattgcaaagttattaacaccaaggaatcattagcatgctccccaagcagtgaagtcagagaaggaaggtgctgggcagagaggggcaagttaacaacgcttcattaatggcaacatttaacgcaagagttttgtttaaaagttgtcttaggtgaatttaactagaaaatggtatttaattatgttccactgcctatagacaactaatataaataaccaaggtcctaagtgaaataagattaaatagtcaaaaaagaaaaataagacacagacatacgatgatgtttagcaaagcattttctcttctactggcttgttgccttcctatcccttcagtcagtgagggatgcaaaagggatttggacatgttaactattgttttctttctttcttccttttatttttttgagatggagtctcactctgtcgcccaggctggggtgcagtggcgcgctctcggctcactgaaagctccacctcctgggttcacgccattcttccgcctcagcctcccgagtagctgggactacaggtgcccaccaccacgactggctaattttgtttttgtatttttagtagagatggggtttcaccgtgttagccaggatggtctcgatctcctgacctcatgatctgcttgcctcggcctcccaaaatgctgggattacaggcgtgagccaccgcgtccggccaactattgttttcaaacttcactggtggcagtatggtgaagagcttggaagggggaaagactagaaagacagggaagcagttaaaatactgcacctgtcaaggaaaaggctgaggaaagatgtggggagagtgatactaaagtcaaagtagcaggcactggtgaccaaggggagactgagagtaggggatggcttaggttttggcttgggtgttcagaggttagagataaagaggtgtcatgacatgatggacttacgaggccaagagaacagacagaaaaagaggccctctaagtggctaggtcttcagggctggtgcccagaagaaaaacccgagttgtagaaagacctggggagtaggctcagagaatgtcctgaagatggggagatcacccaggaagcctgcacaaggatggtaggtaggacacttaagagttaggcagagaaaagatcatataacttggtgagcataaattctttgttacccaacagaaacc

SEQ ID NO: 437 - DNA, 2335 bp, Homo sapiens
ctcgttttctcaacgtggcaagatgtattagatattatttcaaaagctcttactgacaacaacatggaatttgcacaaatcagtcgtgttaagacatttcaggagaacctttcagcatttaaacgtgatccccaaatcaatattttgctgctgcccctgcacacaggttctaatggattaactatcattgaagcaactcatgttctcttggtggagcccatattgaaccctgcccatgagcttcaggccatagggagggtgcaccgaattggacagacaaaacctactattgtacacagattcttaattaaagcaacaatagaagaaagaatgcaggcaatgctgaaaactgctgagagaagtcacacgaactcatcagcaaagcattcagaggcctctgtcttgactgtggctgacctggcagacctatttaccaaagaaactgaagagcttgaatgaactacacttgattcattccatggactttagtgtattaataaactttcatagctgtagagcaaagttacaagttttaaaaacccagtagataacagtaacactgttcctagttgaatgaatttgtttattgttctggttatacagtggcttagtacttattgagtccttttcaatatactgtttccaaaagatctataaagattcttaattttacactcctaataaaacatttattttttgtcccaaatagtatctatatctgatgatgcaagggaattaagagaggtaatgtgtacttttcttatgataagatcactcataaaacagttggaataagaaagtaaactagtctagttttatatgacctggtatattgaacaaacatagatctcagttttggaagggccttcagtatctttagcacatgattcaccaatatcttgttagtaatattttaagtagatggtgaattatattaacccattttttgagtaggcttataccataactttacacctagtaattttgcagtaatacaactccttacaataagttaatgttagacagttatttgtttcttctgcatcttgctactgaaaacaaaaacaatgaaaatattcatatttctattatgtgtaaagtggtgttagtgtaaacagttaactccaaatagattttttaatgtattaatgattaccttaaaattatctgctttccctactcttagtttttcttattgttaaagtttttatatgttgtaagattgatgtatctgtaaatattgcagtttttatgattttgttttattataacatggaaatatggcagggtttttttttttaatcattattatactgatgtcttggattctttttctttcccatgttcttgtgtaactagactttttagccagtgatatctgaattcatggtagagttgttatttcactccagttgttcctcccttaagcacgagtctttgaccttttgaacaagagaatgccatgttcacataagcaaatcgttgcaagtgataataacgaagtgtttcttcttctgtgaggaattaatggactttgaaattgctgaataaggagtagcttgttacatcctagccatttgatgtaatacaaatgttcttatttggcttccttttctttgagccttcagagttttaaaggaccctctttgaccctcaggacttattagctcccagttagctgcctggaaaactcatagaaccattccctagatcccatttgtccgagaggctttggtgcttagttaaggtgcattttcttactctaggtttatagagtgatgtaattcaactgaagaaaacacacacatgcttttggtgcttattcttcagttaaaaggaggtatccattgattcttttatatgaaattaaatcaaactgttatttttatagctcttcacatattaaaaagagctttcatgtacatttacgtgtttaatttacccaacaatcttgtgaagttgatataattaatatctttactgttttaaaggtagagaactgaagttcagatatattgaaactttcttaggacatgtagcaagtaaacagtggagcccaggtcccctgactccatatcttacattcttttactaataacatgtcatgctgagattcagaaggcccatgcttataatttaaaaatgagactatttcagtatttctttgtgtttgttttctactattcctttctgagctatgttttagagaaaacaatttgatatgcttcaattttgtaaaatcaaattacatatatataaaaaaacctatctgtattagacaaaaactgtttttatttatttctgtaagatatccattaaataaatattttagtgg

SEQ ID NO: 438 - DNA, 2160 bp, Homo sapiens
agaggagggcgtggtccccagctagggcttcatccctgggcctgggcccacctaggtgaagacaggcatttttgttttcctgcccggatgttgcatttcccaagaccaccctggcctgccatgccctcatcctgtgcctttaaaaacccccgagaccctggcaggcagacgcacaagcagctggacattgagaggagcatataggcagagaatacaggggctgctggatgtcgaaaggaacgcaccagcataggagcacaccggcatgctggcaggccattgaccagcggaagaatgcagagtttgtcgcgggaggtcagagaagagtcaggccgccatacctgactccaggagaaaaccgtctcccttctggttcccccgtctgccgagagctacttccactcaataaaactttccactcattcttcaagcccacgtgtgatccaattcttcccgtacaccaaggtctcgctgtgtttcccaggctgggtgcagtggctattcaaaggtacaatgatagctcactgcagcctggaactcctggactcaagcgatcctcctgcctcagctgcgactaacagtgctggtaatgatgtatacctggcagctgaccgtcaaatcttatgaaggattaaaacataaagtttgcattaaaggtcaaaacagtcacaagcctgctcaaattcggaaagaggggacggaaatggaacctcttcatgggaggaagaaacagggtcttgctctgttgccctggctggagtgcaatggtatgatcatagctcacagtagccttgaactcctgggcccaagccatcctcctgcctcagcaaccagagtagctgggattacaggcgaatgccaccacacctggaattggaaaaatgaatgtaatttgacatatgtcttgagtctggttggcttctgaggaacttgtgtgcatctcatcagtatgcatcttaagaactgaaatgaccctacttcagcattgtgagaagacatgcattctcttcgtataaataatgtggatcttacatgtaaagtattataaagattagctgtttaacaacttaaataagcttgtgaataataaattaataacaatgttatgctaatacgtaactatgatatttgctgaacaaaataaatttgcctactttggaagcagattgggtggtttaatatatcagcaaaagagtgtttttaaaaaatatcaaagttctgttaatcaaaacgtttattgtaggacagttagtaatgttttgtttgccaacttatattacaaagtctctgtcttaagtgtttccttgcaaataaaatgacaatactgccttacattttattactttagagtttgcaaaatatcttcattataatatttcatttagtagacatgcctatgggaacattacttccagaattaaaaacattatttttgttttggtatatttttaaactacaaatgatagaaaggcaagtaaatgtaagtttttctctagttatttgttcaaatgctaatttaaaacatttgtacatttctaatacaaacattccttatttgagaaaaaatggatttcttaaaaacaaaatgcattttaaagcagagagacagggcattgagctgaaaatggtggctggaagttgggatctgtaagagaagttgaatgtgccccgaggcataaagctgctaattttgttttattggattttactgtagctattaatatattttgctggagatttatgtgatcaatttatcttatggccagaactaattcccttagtatattttattagaatatgtgactttttctaaatttagctttatttttcatattttccataaatggcaaagattctatgtttccagacatgttaagtattgcaagaattattggagcacctaaagataaataatatcaaaatagtgtcattgtttcccttagtttctccttctcccccacaaataaaccaagaggtatttagttatactattgcatgtctctagctttattggattcttccatgaaagaaaaatggattacatttttggttgtgtggccctcgttgccctattgcacttttgataatgttgcctgtgacaagtagttatttttcattaccacattcaatcatgggtaataaaatattttaataatggtg

SEQ ID NO: 439 - DNA, 2854 bp, Homo sapiens
ctgcttgcaaatagaagaatgaccttcagtaatgctcacgtaaacagatcttccatatgacagcacttgccctgccaagtgtcaggccactgggcaaattaaaggaggatggagtgtaggtcttgaacactagagaggccaggtgtttggactaacctgtagcattttatgtttcttgcagatgttcccacaagcctgcatttccagagcatgctgaaatctcagtggcagaacaagccttttgacaaaatcaaacctcccaaaaagttatcgcttaagcacagagcacccatgccgggcagtctgccagatccagctcgtaaggacaggcacaaattggtcagctccttcctaacaacagccatgttgaagcatcacacagacatgagcagttcgagctacttggcagccacccaccatcctccacacagtcccttggtgcgacagctctccacctcctcagattcccctgcacccgccagctctagctcacaggttacagccagcacatcgcagcagccagtaaggaggagaaggggagagagctcattcgatattaacaacattgtcatcccaatgtctgttgctgcaacaactcgcgtagagaaactgcaatacaaggaaatccttacgcccagctggcgggaggttgatcttcagtctctgaaggggagtcctgatgaggagaatgaagagattgaggacctatccgatgcagcctttgccgccctgcatgccaaatgtgaggagatggagagggcacggtggctgtggaccacgagtgtgccaccccagcggcggggcagcaggtcctacaggtcatcagacggccggacaaccccccagctgggcagtgccaacccctccaccccccagcctgcctcccctgatgtcagcagtagccactctttgtcagaatactcccatggtcagtcccctaggagccccattagcccggaactgcactcagcacccctcacccctgtggctcgggacactccgcgacacttagccagtgaggatacccgttgttccacaccagagctggggctggatgaacagtctgtccagccctgggagcggcggaccttccccctggcgcacagtccccaggcggagtgtgaggaccagctggatgcacaggagcgagcagcccgctgcactcgacgcacctcaggcagcaagactggccgggagacagaggcagcgcccacctcgcctcccactgtccccctcaagagtcggcatctggtggcagcagccacagctcagcgcccgactcacagatgagcgggagacagccatctaaacagactcactaactattggcattaaagcttcagaaatctctgcgtttgatattcaaacatcatatgccggaaattttcacagtttttagtgaacttaaggaatttagatcctactttggtatttttttttcttgttttaatttttgttttgtttttgtttccatgttttcttgtcacacacctgagcacttcctcccgttggcaaacagaagttcaggatgagaccctgctggcctggtcctggcacatcctctgcactgttgaatcactggacttactgatcttagatgaccaccccctccctcacacctgtgggcagggcagaacagcctggcgggcagagggctacagtttagcatggccttcttgagctagggtggaatggggcagggtgctctggactcttaccccctcccctcccatctgtggcttggctctgctgtggccctcctggctgggtccccttggttttttgtgctggaacatccccaccagagcctctctgccataactgccagctgctctccccgagtgctcagctggcagaacacctttcctttctcacccagaacttaagagactgattttttgtttcatctgcatttggtcttctctgttttgactctctcactgcagtaacctggctgtggctgctcaggttcccctcctcatgccccttggtacccttccctgtctgctctcccatgccatgtacacacccacaacccatccttccacttggaatatttttaccacctatcctgatctttgaaggtagggttaggactacttaacctctattcccactcccctgcaaactgggggttgtgggaagtgagcagccatctccctgtgtgatttttttttttttttccctctgattcactttgccatgtttccttcacatccagatccctgtcggtgttagttccactcttggtctttcacgctccccttgcctgtggaacattgtctggtcctagctgtggttcccattgttcccccttcacccttctctgttaaccttgtgcctgtctcctgtatgatcacatcaccaaaaagggggaggggggagaagactctttttttttggccattttgtaatcgtataaaaatagtagacaactgcttaatggttggggttttttcacaattttcaacattagtgatttttttttctgtttgcaagttaaagggtttgtcattgtttctttaaaaaaaaaatacaataatgcaccatatccctatgcataaagtgcttcttctatttataaggttgaaaattctgaataacccttttagcattgaaaaaaaaacaaaaacaaaaaatggaaaaaaaaaccttgtattttgtaaatattttcttttcctgctttggagctgtgtaatggcagcgaaacatgtagctgtctttgttctatagaaatgcttttcttcagagaagctgatctttgttaatgtcttgattctgttcgcaaagcacagactagtgcttaaaaaaaaaaagaaggaaaaattgaaaaaaataaaaaaaaaagttacag

SEQ ID NO: 440 - DNA, 2745 bp, Homo sapiens
tttacagatgagaaaactgcccaaagagggcagtggtgaaggatgatttgatttaggagctgccacctgtcctaaattcatgtagccaaatctctctttaaaaaaaaattatgggaaaactgaggtctgtggggacaaaggagcagcctgggagagtgtggtccagctgggacagggacccccatggctggcccagacccagtgcccttggctgccccttgcacttgtcaccaagtacaaagcatgagaaagacctgaccccagcctcccagctgtcaggccagccccacgtgcaggccacagcgatcacaggctgcttcagagggcagcaggagggactctggtcaactcacgcctggggccctgggaggacagggcactctctgtctccttgggacagtgggcaagggaggcagatgttggcagtggcagcaaagggctcccccagttccagctgtgtacagttaagagcacgatacaggcggaatccgagccttggagtctggggcttcatgtccttgcgtgagctctgtgacctcaaccacagtcttcactgctctaggcctcagctctttgctaagaccatagttaatggccgtgtagttcttatgacaagccaggccctgttctagtcatttcacgtatcattttattgtcgccccgatcctatgagacaggtactactattatgcccatttccacctaaggaaacagagaggtcagataacccacccagggtcacacagctaactgagtgggcagagattcaaacccagaccatctggctctactgccagccttaccagctaatgacagatttcaatggaagtaacccctggcacagggctttgttcaaattcagaattgttattaacatcaatattattattatcattaagaggaggaagaagaggagtagtgcctccagggttaaagacatctggtagcttctttgccttgcccactgatttcagccaatttcagccccactggccttcccggatcgatcaaacgtgctccaactctgaggtctttgcacgtgctgttccctcagcctgggaagctcttcccgttgaccggctggcttcttgtctttcttccgctctcagctcacacatcccctctttgcagacaccctttctgactgcccactctggttctctctcgtcaccctgttttgtcgcttctgggtgctcactttgacctgaagttgtcctggtccttgtcactcgcttgtctcttgcatggtgcctgcgaggcgaactccctgagacagggactgggttcgagttggtcctggctctatccatggtgcctggcacgggctcggcccacaaggtctcagggaggctgtgcggggagtcaggataggctggaagcctggggatggcctgtgtggaggtggcgtctgtgccaggcctagaagtcatacgggggaggtagcaaccctgactctgagtccaactctcgctgttggaactgggctggccctgtttcctcactggccctgaatttcaatccgttcaataaggggttgggcaagatgatttctgaggtgctatccatctctgtccagcttagcctggaaggtcaagtcctggacacacagacagatgatgggacagcccagcaccaggctcagcccctggtggggagcgtgtgtgcagcagctttggtcctaaataataataacacaatggtgccactaacggagatttatggagctctttcccggccatgagctccgtgtgcttgcacgaatatgaagccatttatctaaagtcaagttcccttaatccgtggaaagatggtctcttcggagaaaatggttctccaatccctacagcctaacagctcgctatcgggttctaaattaatggagagaaagattatgtttttcacgagcggctgggaacgtgttggcttctttgcagtctgcagacgttttgtgggggaagcggggacagacagaatcacaaaatgaggcagaggctcggctggagggagggggcctgcgggcctggtgtggctgacagtctcaaggtgtgatggtgagggcacacccctgcctggccggtttctccttctgcccatgaaggtgcttggaggacagatcagaggtggaatcccagctcctccctgacttgctatgtgacctagggcaagtgagttcacttctctgagcctcagttttcttctctgtgaaatgggctgctggtgcagttcagtgcaatcctgcctgagacacacagaacctggcaaacggtcagtgctcaataagcattaggcagactcctccctcacagcactctcaagggttaatacaaccatggagaggaatttcacctctcaaaaggcttttcatgatcatctagtgcaacttccattttacagaagaagaaactgagccccagagagggctaagtccctgctggcccgtaggtctattagaaggtgtctgatgggctgggcgcagtgggtcatgcctataatcccagcactttgggaggctgcggcgggtggatcacctgaggtcaggagttcgagaccagcctgaccaacaaggtgaaaccccgtcctactaaaaatacaaaaattagctgggcatggcagcaggtgcctatagcctcagctactcgggaggctgagacaggagaattgtttgaacctgggaagcagagcttgcagtgagccgagatcacaccactgcactctagcctgggtgatggagcgagactccatctc

SEQ ID NO: 441 - DNA, 2374 bp, Homo sapiens
tcctggcctcttcctggggcctggagccctggttgccatcagccatggctcccaaaaagagtgtgagcaaggcaggcaaggagcttgaagtcaagaagaaagggggcaagaaggagccggtggtggccgtggagccgcctctggccaaggagatgaaggagttctaccacatccagatccgagacctggaggaccggctagcccggtaccagcggaagtgggatgagctggctgtgcaggagaagatgttccgccaggagtttgagcagctggccaataacaagaaggagattgtggccttcctcaagcgcacgctcaaccagcaggtggatgagatcacagacctcaacgagcagctccagaacttgcagctagccaaagagatggagaaggatgccttcgaggcgcagctggcccaggtgcgccacgagttccaggagaccaaggaccagctcaccacggagaacatcatccttggtgcggaagcaggagaatgagttcagggactatgcatacaacctggagaagaagtcggtgctggacaaggacagactgaggaaagagatcatccagcgcgtgaacctcgtggccaatgagttccacaaggtgaccacgaaccggatgtgggagacaaccaagcgggccatcaaagagaacaacggcattaccctgcagatggccagggtctcccagcaaggcatgaagctgctgcaggagaatgagcagctcaagggaagacagaacaatctgtgcaaacagctggagctgctggagaacacccagaaggtcatggccaggcacaaaagaggccaccagaagatcatcctcatgctgactaagaagtgccaggagcagcagcaggacaccaaggaggccgaggagctgcgcctcctgctgagccagttggagcagagatccctgcagctgcaggagccagagagaccagctgagcctgcagctggagcagcagcaggtggatttgcagcggctacagcaggaactggctaatgagcagaaggttcgggccagcctggaggcggctctggtccaggccacctccttcctacagaacattctgcaggtgagcagaagggagagagggagggcgcaaggggagggggagtgagcgcaagatggaagctgcttgcagagaaggggctgcctcaggatcagaggcccctcttttccctgagagactcctggaaagtctgtccttcgctgattctggccttcaaagatccctccaaggtcttaaaggagctggattccttctctgaggctctgaaaggtcttgggcctcagtcttcccgactgaagaatgggtatcccaccacagacagggaaaacttcgtggaaatgggcactgaggttggaatttcctggacgagggtgggtactggggccactgtgggcctgctgccaccccaccctcaccaacagatgcaccgcgatgaagaggacagcgacgttgacgtgacgttccagccatggcacaaggagatgctgcagcaactgctggtcatgctcagctccactgtggccacgagacctcagaaggctgcgtgtccccaccaggagtcacagtcccatggcccacccaaggagagccggcccagcatccagctgcccaggactgggtctctgctgccgcagctctctgacatcaccccctaccagccgggggatctaggcctggtacctcgccaggtccacatcccacccaacccccaggacctcaggctgctgtcatctatcacccgtgtggggaccttccgggcacacagcagccctgagcagggaaagagtgggatccccctgaagaggcctcagcttccaagccagcatctttctttttttttttttttttttttttttttgagacagagtctcactctgtcacccagactggagtgcagtgccacaatctcagctcacagcaacctccgcctcccaggttcaagtgattctcctgcctcagtctcccaagtagcagggattacaggcatgcaccaccatgcctggctactttttgtatttttagtagagacagggtttcaccatgttggccaggctggtctcgaactcctgacgtcaagcaatcccccagcctcggcctcccaaagtgctgggattataggtgtgagccactgcacccggcctccaagccagcatctttaatcttacagatgcgtgcccctggttctctaaaaaggcttgaaaagtttagtcttcctgaagttcccctacgtcccaagtaggacacagagagaagaacctactccagaaatggactggtccagtcacagtcacccccactttaatccgcaggcagcctggaacagtctagaggagatttgtataaaaagtagatacc

SEQ ID NO: 442 - DNA, 2249 bp, Homo sapiens
gactccggagaagaaggctgaggaggagcgggacgaggaagaggacaaacggaggaagggggaagaagtcacgcccatctcggccatccggcacgagggaaagactgacagtgagcgcacggacaccgcagccgacggggagaccaccgccactgaggagctagaaaaaactcaagatgacctgatgaaacatcaaaccaacattagcgagctgaaaagaaccttcttagaaacctcaacagacactgccgtaacgaatgaatgggagaagaggctttccacctcccccgtgcaactggccgccaggcaggaggatgcccccatgatcgaaccacttgtccctgaagaggtcagtagtcagaaaatggaaaccaagacggagtccagtggaatagagacggaacccaccgtgcaccacctgccgcttagcactgagaaggtggtgcaggagaccgtgttggtggaggagcggcgtgtggtgcacgcgagtggggatgcttcttactcggcgggagacagcggggatgctgcagcacagcccgcattcacaggcattaaagggaaagagggctctgccttgacggagggggctaaagaggaaggaggggaggaggtcgctaaagctgtcctggaacaggaagagacagccgctgcttcccgtgagcgacaagaggagcagagtgcagccatccacatttcagaaactttggaacaaaaacctcattttgagtcctcaacggtgaagacggaaaccatcagttttggcagtgtttcaccgggaggagtaaagctagaaatttccacgaaggaagtgccagtagttcacaccgaaaccaaaaccatcacatatgaatcatcacaggtcgatccaggcacagatctggagccaggcgtgctgatgagtgcacagacgatcacatctgaaaccaccagtaccaccaccactacgcacatcaccaaaactgtgaaagggggcatttcagagacaagaattgagaagcgaatagtcatcacgggggatgcagacattgaccatgaccaggcgctggctcaggcaattaaagaggccaaagagcagcaccctgacatgtcagtgaccaaagtagtggtccataaagagacagagatcacaccagaagatggagaggattgaccagaggaataacttagcttgcacatgaatgcagtcatgcaaaccgttaggaaaaccagagcctatatggagttccctcttctaacccaactgacttgtatctgtccgtggaaaatttcagtccagaagaattgaccttgaccattaataaagacactggcagagagatcttcccataataaagcaatctgattcagcatcactaaaccgataatgcatgaagcaacgataaaattacaaaagagcagcatttttaattttcacaaaatgtctcagttttcagctatacctgcacgttcataaccaacaatataaaccgtggtctcatgtaacacataaacaattcatgcctttcatagtttattattattaaagtctaaacaaaattgcaatttcttaggtaaccttatatttacaataaatgaagattaccctcaaatgctagaagctgtctaggtccgtccggtgtgtcagattttcctcagattagatgtgccaataaccaagtttattcagtaaacaacgtgtacttgtttcatctggttttattactctcacccataaacagtaatgactctctgaccctctggaaatatgtaatgcttccaatcttgctttgtgtatctcatttaatttgttataaggtagtactgattttagcatattaatgcgatttcttccttgttgtttgctttggtctgtgttcaatccagagagcttaaattgtcattattttgggaagaaaacctgtatttttgttagtttacaatattatgaaatttcacttcaggagaaactgctgggcttcctgtggctttgttttcttagttactttttccgtgccgtgtattttttaattgatttttcttcttttacttgaaaagaaagtgttttattttcaaatctggtccatatttacattctagttcagagccaagccttaaactgtacagaatttccactgtaattaaaactatttagtgttagttataaatagccttcaaaaagagagattctccattacacgatcacctgcatcacagcccatggtgaatgtatgtttctgcatagcgaaataaaaatggcaaatgcactg

SEQ ID NO: 443 - DNA, 1981 bp, Homo sapiens
catactggagagaaaccctacaaatgtaatgaatgtggcaaggtcttcagtcaacattcacatcttgcagtgcatcagagagttcatactggagagaaaccttacaaatgtaatgaatgtggcaaagcctttaattggggctcattactaactgtacatcagaggattcataccggagagaaaccttacaaatgtaatgtgtgtggcaaggtctttaattacggtggatacctttcggttcatatgagatgtcatactggagagaaacctctccattgtaataaatgtggcatggtcttcacttactattcatgcctagcacgtcatcaaagaatgcataccggagagaaaccttacaaatgtaatgtgtgtggcaaggtcttcattgacagtggaaacctttcaattcataggcgaagtcataccggagagaaacctttccagtgtaacgaatgcggcaaggtcttcagttactactcatgcctagcacgtcatcggaaaattcataccggagagaaaccttataaatgtaatgattgtggcaaagcctatactcagcgttcaagcctcactaaacatctggtaattcatactggagagaacccttaccactgtaatgaatttggtgaggcttttatccaaagttcaaaacttgcaagatatcacagaaatcctactggggagaaaccacacaaatgtagtgaatgtggtagaacttttagtcataaaacaagtctggtgtaccatcagagaagacatactggagagatgccatacaaatgtattgaatgtgggaaagtctttaactccactacaaccctggcaaggcatcggagaattcatactggagagaaaccttacaaatgtaatgaatgtggcaaggtcttccgttatcgctcaggcctcgcacgtcattggagcattcatactggagagaaaccttacaaatgtaatgagtgtggcaaagcctttagagtacgttcaattctgcttaatcatcagatgatgcatactggagagaaaccttataaatgtaatgaatgtggtaaagctttatcgaaaggtcaaacttggtttaccatcagagaaaccatactggagagaagccatacaaatgtatggaatgtggcaaggcgtttgggcggcggtcttgcctcactaaacaccaacgaattcattctagtgaaaaaccttataaatgtaatgagtgtggcaaatcttacattagtcgctcaggcctcactaaacatcagataaaacatgctggagagaaccttacaactaaactcaatgtggaaaggccgttagatgttgtcctaacctctgggatccccaaataatttatacttactcatatagcttgtatatttgtcctttccctttgaagtctcatgtggaattgtagtaatctccagtattggaggtggagcctagtgggaggtgattggatgatgggggtggctttctcaagaaagttttagtaccatccccttgttgctgtccttgtgatagttctcatgaggtctggctcatgcctgtaatcccagcactttgggaggctgaggtgggcggatcacttgaggtcaggagttcaagagcagcctggccaacatggtgaaaccctgtttctgccaaaaatacaaaaattagctgggcttcgtggcgggtactggtagtaccagctactcgagaggctgagtcaggagaattgcttgaaccctggaggcggaggttgcagtgagccgagatcgcgccactgcactctagcctgggtgacagagtgagactccatcacgcacacgcacgcacgaaagtgaatggcacctccctcttgtttgttcttctggccatgtgacatgcccttcacctcccaccatcattttaaccttcctcaggtttcccgagagggtgaacagacgtcagcgccatgtttcctataaagcctgcaaaattgtgagtcaattaaacctctttatacatt

SEQ ID NO: 444 - DNA, 2592 bp, Homo sapiens
gtggtcccatagcccctgcaccaggcggcccgcgcccgcgacctcaaggcggctgccccgcgccatggcggcccggctgggtgcgctggccgcgtcggggctgtaccggcggcgccagcaccggcagagcccgccgccagccacgggcaatatgtcggacgccttggccaacgccgtgtgccagcgctgccaggcccgcttctcccccgccgagcgcattgtcaacagcaatggggagctgtaccatgagcactgcttcgtgtgtgcccagtgcttccggcccttccccgaggggctcttctatgagtttgaaggccggaagtactgcgaacacgacttccaaatgctgtttgctccgtgctgtggatcctgcggtgagttcatcattggccgcgtcatcaaggccatgaacaacgactggcacccgggctgcttccgctgcgagctgtgtgatgtggagctggctgacctgggctttgtgaagaatgccggcaggcatctctgccggccttgccacaaccgtgagaaggccaagggcctgggcaagtacatctgccagcggtgccacctggtcatcgacgagcagcccctcatgttcaggagcgacgcctaccaccctgaccacttcaactgcacccactgtgggaaggagctgacagccgaggcccgcgagctgaagggtgagctctactgcctgccctgccatgacaagatgggcgtccccatctgcggggcctgccgccggcccatcgagggccgagtggtcaacgcgctgggcaagcagtggcacgtggagcactttgtctgtgccaagtgtgagaagccattcctggggcaccggcactatgagaagaagggcctggcctactgcgagactcactacaaccaggtgagcccggtgcagaaccttcagggatgcgggtctggaggggtggccaggagagctgccgtgagcaagggaggctgtgggcaccccctcagaagctctgccaggtgctgagcccaggcctgcaccctcagccctggctcctggcctggggtctcgagacctgggcagctctcttcagtctcagtgtcttcctttgaagaatgttctggggctggtgtgaggtcccgggcacatggggctgacagtgccagcaaccccctccctcccttgctctggtacagaaggcagggggcgctggtgggatgcagtcaccacctgggcccacctccttgcaggacagcagtggccagagcagaggggccttctggggagcaacgccccagcctgttgtccttcccggaagggtggttctcatgggttgccgtgccctcaacccagccttgcagctgggccctgggaggcagggcctgggagatgcctgagaggggccgtgttggagggccaggctggctgcatgatggccctgggctggggtgtgactgcctgcagctactctgacagcctgctcggcccacagctcttcggggacgtctgctacaactgcagccatgtgattgaaggcgatgtggtgtcggccctcaacaaggcctggtgtgtgagctgcttctcctgctccacctgcaacagcaagctcaccctgaagaacaagtttgtggagttcgacatgaagcccgtgtgtaagaggtgctacgagaagttcccgctggagctgaagaagcggctgaagaagctgtcggagctgacctcccgcaaggcccagcccaaggccacagacctcaactctgcctgaaggccctcttgcgcagctgcctctcggcccctccgccttctcccctcctgctgtccatgcttggccccctcgtccccatccacctgtgccctccgcatcttaccctccctttctctttcctcattgccttctcccttcctgttccctcatctctgccttccccatgtctctcctctccttggccgtggcttctgtctgtgaggaggcaggagctggggagtgggagcctatgaccccacgtctgacagccatgtccacctgtgcccacagcttccgcccacagacctccagggacaggagcaaattgcaccacagctccccgcctggcctggccctccccaggcggctcagtggctcatgctgtcctgtgagagcccctgccccagagcggccccactaagcgcatgtggctcctgggctacccacagccagggcagcctgctggagccacagggccagggccatgcagatggaggcctctgggagccacctccaatccctcaccactcactcaaccagtggcacagtgtccttgtgcccacactgagccagcaagtcctgctgtccacacccacaagctacctggagggacaggacccacctccatccttcggaaggccttcctggaatcccaccttggcctccgccctcggttccgccccgcccctctccccccgaccttggggcttgtgtcgagcccttgggtggggccaggaggaggtgatggcgtcagaggaggtgtggtcagaggtgacttgttcccacctccagggaggacgcttcgtcttcggccagcccagacctggtgtttgtttgttgggctcacgcttgcacaatgaaggcttgttcacac

SEQ ID NO: 445 - DNA, 3183 bp, Homo sapiens
gtctcctctcagctaggactttctgtttgcacagccgaggcctgcagggtacattccagaggtggacttggggctggccttgaacttccagaccctctctcccctctctggccggggctggggaaatgtcagctattctgagggccttggaagctggactcagttattttcggcttatccaaatcccttgggctcattgaaggttatggtgggcggggtaaagggggccttccggctactctttccccggctgaagaagaaaaggctaagggaccccatgagaagtatggctacaattcatacctcagtgaaaaaatttcactggaccgttccattccggattatcgtcccaccaagtgtaaggagctcaagtactccaaggacctgccccagatatccatcatattcatcttcgtgaacgaggccctgtcggtgatcctgcggtccgtgcacagtgccgtcaatcacacgcccacacacctgctgaaggaaatcattctggtggatgacaacagcgacgaagaggagctgaaggtccccctagaggagtatgtccacaaacgctaccccgggctggtgaaggtggtaagaaatcagaagagggaaggcctgatccgcgctcgcattgagggctggaaggtggctaccgggcaggtcactggcttctttgatgcccacgtggaattcaccgctggctgggctgagccggttctatcccgcatccaggaaaaccggaagcgtgtgatcctcccctccattgacaacatcaaacaggacaactttgaggtgcagcggtacgagaactcggcccacgggtacagctgggagctgtggtgcatgtacatcagccccccaaaagactggtgggacgccggagacccttctctccccatcaggaccccagccatgataggctgctcgttcgtggtcaacaggaagttcttcggtgaaattggtcttctggatcctggcatggatgtatacggaggagaaaatattgaactgggaatcaaggtatggctctgtgggggcagcatggaggtccttccttgctcacgggtggcccacattgagcggaagaagaagccatataatagcaacattggcttctacaccaagaggaatgctcttcgcgttgctgaggtctggatggacgattacaagtctcatgtgtacatagcgtggaacctgccgctggagaatccgggaattgacatcggtgatgtctccgaaagaagagcattaaggaaaagtttaaagtgtaagaatttccagtggtacctggaccatgtttacccagaaatgagaagatacaataataccgttgcttacggggagcttcgcaacaacaaggcaaaagacgtctgcttggaccaggggccgctggagaaccacacagcaatattgtatccgtgccatggctggggaccacagcttgcccgctacaccaaggaaggcttcctgcacttgggtgccctggggaccaccacactcctccctgacacccgctgcctggtggacaactccaagagttggctgccccagctcctggactgcgacaaggtcaagagcagcctgtacaagcgctggaacttcatccagaatggagccatcatgaacaagggcacgggacgctgcctggaggtggagaaccggggcctggctggcatcgacctcatcctccgcagctgcacaggtcagaggtggaccattaagaactccatcaagtagagggagggagctggggcactggagcctggcccccaggacatggctgctccccccaacatctggaccagctgccctggcggagagacagcaaggggccggcaggtgctcgatgggccccccagggcttctccagggcagcacagggaccccggatgaagactctgtcccccctcaggcattcagctgcccacaagtttcctgcaccctggaaaagccccccacccttcctctgggaaactgacagctgtcttccacagcctctgatgtggacctggtactgaggagcaagactgtccagttctcctccacatctcccatcccagaatcaggatctgggactggcagggtcccctcctgtgtctcatctcttgcagcagcagctgctgaactccagccatcaacacggtgggaggcagcgggggcttcagccatgtcctagctccccgccctaaaaggaggcagtgaggaccaggcactatttcctccgaggttacttctacccagatgacacctgcctgttcacgccccaaggcagctactgcccctaacccttcccaccagggtagctttgggcactgcagctctggacttttctggcccctcctgagatgacctgatggagctgatgctttctctcctaatccctgggcactaggctcttatcagtgtgcttgggccagctctcctgcctgtgtctagaggaagccagagacagaaataggctaagcctgcagtaggatctcagccacaagggccccgcaggatggagctgggtcaaggaccagggagccctgactcccagaggctgccaccggggagaagcagcggtcctccatccagaacctaagggctgaagcaaaggctgccaggacccttgaagatgcttttggctcacctcatttcaccccacgctctgctggctggcagaggagaaggcagtcgtttcctctctgaagagtatttttttcgattgccctctggttagggtgcacatataaatcagagttaatatatgaacgcgtgtgcatgcacaagtgtgtgtgtgcctgcgtgctgtgcgtggcagggtgtgtgtgtgtgtgtctggctgtgcgttccggagtgtgtgacgatgctgacctagctgtgtggccttgggcttgctgcttcattactcacctggatggggacgagggatgagaagggtgtgggtttggccccatgtcactggccggaaggatgtgtctcagccctgccctgtggggtgcccccgatgggaggctgtcccatctcccagtccccatctctttttccccacactgtccctggccaagccctgcccagagctgaaccctgtagctgcccccttgccctgtgtgggattcgcagtgtctcatttggtgacgtcttactggtgatcatctcctcaccccatctcccaccttgtggaataaatacatgttagcacttccc

SEQ ID NO: 446 - DNA, 2655 bp, Homo sapiens
tagattccaccatgaccagtgatgacattaccttccagaatccactacacctgacagagacatcctctactgaaatccactaggactgatgattccaccatttcccataatccctcatgattttggtgtcatcacctcccaagacccatgatgcccaatagtgtcatcatcatttgcagggatgcatggtgtcatcatctccagggatccacttcaaccatgtgccaccacctcccaggatttcattcaaacatgtgccactacctcccagtatccacttcaactatggtgttatcacctgccaggatccacgagagccaatgctgtcaccatccactaggatccaccataaccctggtgtcatcatctcctgtgatccatgaggtccagtgctgtcaccatccactaggatccaccatgaccctggtgtcatcatctcctgtgatccatgaggtccagtgctgtcaccatccactaggatccaccataaccctggtgtcatcatctcccaggatccatgaggtccagtgctgtctgtcaccatccactagtatccaccataaccctggtgtcatcttctcccaggatccatgaggtccagtgctgtcaccatccactaggatccgccataaccctggtgtcatcatccgtgatccatgaggtccagtgctgtcaccatccactaggatccaccataaccctggtgtcatcatctcccaggatccatgaggtccagtgttgtcaccatctactaggatccaccatgaccctggtgttatcatctcccaggatccatgaggtccagtgttgtcaccatctattaggatccaccatgaccctggtgttatcatctcccaggatccatgaggtccagtgctgtcaccacccactaggatccaccataaccctggtgtcatcccagagtccactgtaaccatgtgccatcatcccccaagagccatcatcttaggagccaagtaccgtgacgggctgtatttcagttgtcctctggggccgcatggtacttacagttgttcacttaaggggaaccagcacaacaggccatattcccgtttccactaaaaggacaggggtggggccagctgtccccctctgaagacttcacccctactctggccctccttatgtcactgcctcactcctgaccgaggatgatgcctgcatcaatcccaccacagatgtggcctcagccaacctcaccttaccccccggtgaggcacccaggccccccctgacagcagcgctgtccctcacccagccatctgattggtgacagggtcaacccagcaacctctcattatcaccagagaggaagcatttcaaccctcaggtgacgccactgccccctgcccaatccctgtcacttgggcccctaccaggatcagcactccactggccccggccaaattctcctcagagatccctgacccccgcgggatgggtcaaagctggtgaccgactggggccttcagtgctgtcttctgctggcctcatcctgcagcagggacactggagagcaatggtccctgccagcacatctgcggggaccaggggtgctccttcacctccctccctaacaccttaacacccggggagcctccgggggtggcaggaagtccccagcacccaatgcacaatcttccctcaattctctttgtacatagccatgttgcgggggcggccattcccccactcttaaagggctacacgcccctcccccagcccctagggcgaggtggggggggcctcttcttcctcccctgggccgtccccctccctcttatgtctccccgcaaacactggcacctcacactccttcttgtcaggagcttggggcagacaactggcccttggttcccaccacactgaggaaatgggggttacccaaatccacctgggccctggtgccagtttttcaaccccacggcttctagctgctctgaggggctcctcccatcccttccagggcctccccagccccgcactgctcaggccaactgtgacttccccagaaaggagccagcttgagcacccaccccctcccagccccctcccctctgctcaacacctccgcggaacactcagctttctccagctgccgggatttgggggtctgggcctttcagcttttttatcccccctccactagctctagcccagcctggattccagggatcccacccctagccctgtccctattcagttggcacaggctgcctgaccctggggccttgatttgatctcaaataagccatagaggagagaggtcttgaggggtgggagcaggtgtgtactgacaattcccctccacatgtcttgagctgggacctcgtcatctgagacttccccatgccccaacaaatgcaaatgcacacaaacccatgcatacacaagcacacacacacaggcatctccccgtctggttgggggagcatgggagggggcacttcacagggagaagataaatagttccacacctgaagaccctccaacagcttctgcctccctcctcatcacttcctctctccaccccctctccaacactggccccttcccctaattaattccctggtgaggacagccagaggagctgcgacttggtattttttggaataaatagacattttcctgatg

SEQ ID NO: 447 - DNA, 2506 bp, Homo sapiens
gtgaacacccttctcttcccacagaaccatctaaattacaaccaaaggtctgatcaaaggatggcacccagtacatgtgctgaatgactgaataggggcagagttccttcctggtcctgaaacgtggaaattgattatagcaccatgcaggagtttccccacccagtgagctggggcagaagagggtctcactttgtcacccaggctggaatgcagtggcacaatgtcggttcacttcaacctcaacctcccaggctcaagtgatcctcccacctcagtctcccaagtagctgaaattacaggagcctaccaccacgtctggctaatttttgtatttttagtagagatggggtttcactatgttggtcaggctggttttcaactcctgaccttaggtgatccacctgcctcagcctcccaaagagctgggataaaaggcgtgagccaccgcgcctggcctgatgcctgtgtgtcattctcttcttttcttttatagtcatgttaacaaaaggagatgcacagaatagcaactttcagtgagactctaccgaattgttgtagggcttggtaaaaagtcccatgtgggagaaccttgagtgtccagtgagatgaaacacagattactgaaccagtaatctgtgttttttattgggcaatactagtacagacttaacctagacaaaggactgttataattctagaaatttacagtatgattgatataatagcaggtagaaaccacgttccttggcgctagtatcgagtacagttgaataactttaaagtgaaagttaacatttccaatctagattttgttatcatggggaaaataatgattgtgattgaacaaatcaatgctcgcatgcaaaattttaggtggacttttctgagatcttgtagaaaaaaaataaattgggtttttattgtctaaccacagatagagtagagttttgttttctggatctgtctagtagattactaagcttccttgtccagtgtgaataaataagtttgtgggggcatgggtgatgcagacagttttagcaggacttgtgtattttactgggtatgagagtagacttagcataaagtgcttgcaatttctctccacaattgctgtgctgactgattcatattctgggaattaatttactactgaattcctggttggtgttaagagaatggcttaacttctaatgataaagctgagaaaataaggactttcttaactgaaatgtgtcctcctcagtcttgttcttgtactgtgctctgtctctccatccatcctaagctctctctagtcacaacacttactcattcttccataaatagacttgtgcccaaaaggggacagacaaaagaagcatggcaacatgtcttacagattagctttctcttttcttcctctgtcttcttttttctgcaattctcaactacttccctggcttcaggaataatctcttatgatgatcattctcaaatcagtttctccagcctctacctttcttttacatttcagttctcaattctcattttgtaggtatctcaaacacaacatatctaaaatcaattttattccctgctattcccctgctcctccacctttcaatccctctcccaccctgctcccattcctgaaattccattttcatgtaaaggcttcaccacccgcctcctcactctactcaaccttttgtaaaacctctctcatctccatttccagttagtttccaagtccagtcaattttacatgatatcctacatggactcgttcactgagcttaattattattagcaaacattaacgcatattgtgttatttctacagaaatcagcaaaaggtcctggggtatcctctgtgtggaaaataaccatgatgcatcttcagtgttgtagtctgactctatcacccaggctggagtgcagtgtggctggaggtgaagttcagagatacggtgtctttcctgagttgtgcagctcacgcatggagggatcaggatgggaactgaagcctgcatggctcaaagtctttgctttgaagtgctgcaaatatggcttcctgaggaggactgccctggactgcaaatttgtattacacagacaataccttttcccagtgccttcttctggacttatgtctatgtatttagtaaataacttatgagtttgtttttaaaaaacctattgagggctgggcgtggtggctcatgcctgtaatcccagcactttgggaggccgaggcgggtgatcacttgaggtcagtagttcgagacccacctggaaaacatagtgaaaccctgtctctactaagaatataaaaattagctgggtatagtggcacacgcctgtagtcccagctactcaggaggctgaggcaggagaatcacttgaagccaggaggcggaggttgcagtgagccgagatcgtgccactgcactccagcctgggcgacagagtgactctgtctcaaaaaaacaaaacaaaacaaaacaaaaaagcaaaaaac

SEQ ID NO: 448 - DNA, 3271 bp, Homo sapiens
agctttgaaggtcttgcggtggtgcgtggcgggcaggaacccacaattccaaatacaaacggtcggcgcgagaagcgcttctgggcgcaggcgcctggctgtagcgactggttgcgggaggctggactctggtgactgtaagcatcaagtgtacctgatttgtgaacctatcttgcttcagttggtttcctcctaaatattaggcagatgggattggctggtctgtgctctgctaggtgaaaaattagacgatttcaagaattggagctgaatctgatgttaagtaatggcaacaggtgacttaaaaagaagcttacggaacctagaacaggtgctccgcttgctaaattatcctgaagaggtggactgtgtaggtttgataaagggagacccagcagcatctttgcccatcatcagctattcttttacctcatactcaccttatgtaacagaacttataatggaatccaatgtagagctcatagcaaaaaatgacttgcgctttatagatgctgtctataagcttcttcgtgatcaatttaattataaaccaattttgacaaaaaagcagtttatccaatgtgggtttgcagaatggaaaatccaaattgtttgtgatattttgaattgtgtgatgaaaaagcacaaggaattaagcagtcttcagaagattccatcacaacaaagaaagaaaatcagttctggtaagtcagaacctcctttgggcaatgagaaaatatctgcagaggctgttggcgttgatatcagtggcaggtttatgacctcaggaaagaagaaagctgtggtgattcgtcacttgtataatgaagataatgttgacatttctgaggatacattaagtccaataacagatgttaatgaagcagttgatgtgtctgacttaaatgctactgaaataaagatgcctgaagtaaaggttcctgaaatcaaggctgagcaacaggatgtaaatgttaatcctgagattactgcactacaaactatgcttgctgaatgccaagaaaatcttaagaaactgacttcgatagagaaaaggttagactgtttggaacaaaaaatgaaaggaaaagtgatggtagatgaaaacacctggactaatcttcttagtcgtgtcactcttcttgaaacagaaatgcttttgtctaaaaagaatgatgaatttatagagtttaatgaagttagtgaagactacgcttcttgtagtgacatggaccttctgaatcctcacagaaaaagcgaagtagagaggccagcaagtattcctctgtcctctggctatagtacagcatcatcagattcaactcccagagcctctactgttaattactgtggtttgaatgagatttcagagaattttcctgcatggagtgctacatcctcttgttccagtctcagctggctgctccgtgggcatacttcatacctttcatcacagagctttgcttggcctctctcctgtgtgtaatctctgtttcttggatcctgtgcttaccttttcctgctgtactctgatgtttcagtgaagctcatccacgaagtccagaattctgcctggaaaccagcttcctcctcagctccagctcttttaatgggcatatcaaaactgatgactttttccttcctgctacatgggtaacacttagttgtttgtctaatttctattttccagaaatttctcaaaatgtctgctgatagcccctcactcatatttttcatgtgggtttatagctttcatatttctttattattgtaaatgggggctgtggaaggtgagaaaacacatgctttcttaaaacagaagctctctccttcattaatttaaatatttttatcggctctagaaaatgcataaggttagtacaagatcagtagagagaaagtcaaagattacagaagtgctgaagcagaccattcttcctttcttcccaatgtctattaagatcacacataggtaaactgttacaaatccagaatggtgaaagagtccaacaatggctgagggaagtagaggttaagatatagctcaacagtgaaagtagcagggaaagagctgggcaaggccaagaccatcttttgtaccgttggtacagtaggctaaaggtacggtgttccatattaaatacagcaatatgaagaaaaataaattaagtcccttatacctaagacctctatttctctgttgattacatacacagtggcaatggaaagaagggaaaataatggggatagcatttgctcattctctgaccatgcaacactggcagcattctatacttattctattaactgcatcaaccacatcttataaaacacatttccataggccatatgtaataggtcttggctttattcattgcatttattggctccttaaattgacaacatataattgttttcatataattttcatcaaataaaattcactttaatttgtatgaacatatttaaagtggaaagtatcttcccaaatggtccatatcttaaagtgtcagatattttatgggcttcacatctgaactgccagagatctcaggcatagcatgcattaatcacaaccacttactgacctggttcagatacttactcaatacatggggctagacacagagtgtgccttaggctaaagaaaaaattattcaagttgagcatatccataaactctggctcaagcagtgtattttgggggtaataaacacaagtttgttcctagttggagggatatgatgcttaggtttgaacctgttaaccttcctgggtttgagggctagaaaacgtggagacattcctttctaactaacacattttctaatagaaacaatccaccaggatgttgagcccacattttaagagttcttcggaatttactgaaaatggaaaactgattacattgggcacataggacatttatatttatagaaacattttagataagacaagaattttaaaagccagaaatcacttttagtgggcattttcagaaaaatgttgtcaactttttgtaatttttaataggcataaaaaagattgttatattgatattgacagaaattaggtggttaattagagagcgtaaaaggatgaattgctctaacattggtttagaatttttctttatatgattcaattttgtggtctggcaaaggcccaatagtcatttatctagtatgcatacctttccacagctggattttcaaatatgatgataaagttcatatgacagacctattctgaaaataaatatgtcagcagg

SEQ ID NO: 449 - DNA, 3637 bp, Homo sapiens
accacagaaaactcctgtatgttctattgatgggagcactcccatcactaaatcaacaggtgattgggcagaagcatctctccagcaagaaaatgctattactggaaaacctgtacctgactctttgaattccacaaaagaattcagtatcaaaggtgtgcaaggcaatatgcagaaacaggatgacacacttgcagaattacctggatctccacctgagaaatgtgactcgttgggttctggagtggccacagtgaaagtggctttacctgatgaccacctgaaagatgaaatggactggcagagctctgcattgggagaaatcacagaagctgatagttctggtgagtctgatgacacagtaatagaggacatcacagcagatacatcatttgaaaataacaaaattcaggctgaaaaacctgtttccattccaagtgctgttgtaaaaacaggtgaaagagaaatcaaagagattcccagttgtgagagagaagaaaaaacatctaaaaactttgaagaattggtcagtgactctgagctgcatcaagatcagcctgatattcttggaaggagtccagctagtgaggcagcatgttcaaaagtacccgatacgaatgtctccttagaagatgtgagtgaagttgctcctgaaaagcctattactactgagaaccccaaacttccttcaacagtgtctccaaatgtttttaatgagacagaattctcattaaatgtgacaacatctgcctatttggagtcattacatgggaaaaatgttaaacatatagatgattcctccccagaggacctgatagcagcctttacagaaaccagagataaaggaatagtagatagtgaaagaaatgcttttaaagcaatatcagagaagatgacagactttaaaacaactcctcctgtagaagtcttacatgaaaatgagtccggtggttctgaaattaaagacattggaagcaaatacagtgaacaaagcaaagaaacaaatggaagtgagcctctaggtgttttccctacccaaggtactccagtagcatctcttgacttagaacaagaacagctcacaattaaggctcttaaagaattaggtgaaagacaggttgagaagtcaacttctgcacagcgtgacgcagaattgccttctgaagaagtactgaagcaaactttcacatttgctccagaatcttggccacagagatcatatgacatcctagaacgtaatgtcaagaatggatctgatcttgggatttcccagaagcccatcactatcagagaaactactagggtagatgctgtttccagccttagcaagactgaattggtaaaaaagcatgtcctagcaagacttctgacagacttctcagtgcacgatctgattttctggagagatgtgaagaagactgggtttgtctttggcaccacgctgatcatgctgctttccctggcagctttcagtgtcatcagtgtggtttcttacctcatcctggctcttctctctgtcaccatcagcttcaggatctacaagtccgtcatccaagctgtacagaagtcagaagaaggccattcattcaaagcctacctggacgtagacattactctgtcctcagaagctttccataattacatgaatgctgccatggtgcacatcaacagggccctgaaactcattattcgtctctttctggtagaagatctggttgactccttgaagctggctgtcttcatgtggctgatgacctatgttggtgctgtttttaacggaatcacccttctaattcttgctgaactgctcattttcagtgtcccgattgtctatgagaagtacaagacccagattgatcactatgttggcatcgcccgagatcagaccaagtcaattgttgaaaagatccaagcaaaactccctggaatcgccaaaaaaaaggcagaataagtacatggaaaccagaaatgcaacagttactaaaacaccatttaatagttataacgtcgttacttgtactatgaaggaaaatactcagtgtcagcttgagcctgcattccaagcttttttttttaatttggtgttttctcccatcctttccctttaaccctcagtatcaagcacaaaaattgatggactgataaaagaactatcttagaactcagaagaagaaagaatcaaattcataggataagtcaataccttaatggtggtagagcctttacctgtagcttgaaaggggaaagattggaggtaagagagaaaatgaaagaacacctctgggtccttctgtccagttttcagcactagtcttactcagctatccattatagttttgcccttaagaagtcatgattaacttatgaaaaaattatttggggacaggagtgtgataccttccttggtttttttttgcagccctcaaatcctatcttcctgccccacaatgtgagcagctacccctgatactccttttctttaatgatttaactatcaacttgataaataacttataggtgatagtgataattcctgattccaagaatgccatctgataaaaaagaatagaaatggaaagtgggactgagagggagtcagcaggcatgctgcggtggcggtcactccctctgccactatccccagggaaggaaaggctccgccatttgggaaagtggtttctacgtcactggacaccggttctgagcattagtttgagaactcgttcccgaatgtgctttcctccctctcccctgcccacctcaagtttaataaataaggttgtacttttcttactataaaataaatgtctgtaactgctgtgcactgctgtaaacttgttagagaaaaaaataacctgcatgtgggctcctcagttattgagtttttgtgatcctatctcagtctgggggggaacattctcaagaggtgaaatacagaaagcctttttttcttgatcttttcccgagattcaaatctccgattcccatttgggggcaagtttttttcttcaccttcaatatgagaattcagcgaacttgaaagaaaaatcatctgtgagttccttcaggttctcactcatagtcatgatccttcagagggaatatgcactggcgagtttaaagtaagggctatgatatttgatggtcccaaagtacggcagctgcaaaaagtagtggaaggaaattgtctacgtgtcttggaaaaattagttaggaatttggatgggtaaaaggtacccttgccttactccatcttattttcttagccccctttgagtgttttaactggtttcatgtcctagtaggaagtgcattctccatcctcatcctctgccctcccaggaagtcagtgattgtctttttgggcttcccctccaaaggaccttctgcagtggaagtgccacatccagttcttttcttttgttgctgctgtgtttagataattgaagagatctttgtgccacacaggatttttttttttttttaaagaaaaacctatagatgaaaaattactaatgaaactgtgtgtacgtgtctgtgcgtgcaacataaaaatacagtagcacctaaggagcttgaatcttggttcctgtaaaatttcaaattgatgtggtattaataaaaaaaaaaaaaacac

SEQ ID NO: 450 - DNA, 2070 bp, Homo sapiens
atcatcaacatgcattcccagaaatgccatgaaaggaaagaccaagtcttgactgagaaacggaccgggcagatgagggactcccacatatacctgtttcctgctcttcccgaagacattttgccacaagcatataattcagcttctgaaaaatacggtcttcctcactgcagacaccatgccagcgttttaaatcaagttggctactcgtgctgtttagagtatgcagtttgcctgtggcaatattaaactcatctggaagaaagcacttaaacctatccagttcctcatcggtgatgttatccaggctggttagcaagagtatctccttatatttactctccatctcacgacttttcagcttataagggatccaaactatgtaagattataccaccaaaagtgattcaacattcaaaatgaagcaagatacttcattttcttagcgtttctggagattacaacatcctgcggttccgtttctgggaactttactgatttatctcccccctcacacaaataagcattgattcctgcatttctgaagatctcaagatctggactactgttgaaaaaatttccagtgaggctcacttatgtctgtaaagatgggaaaaaaatacaagaacattgttctactaaaaggattagaggtcatcaatgattatcattttagaatggttaagtccttactgagcaacgatttaaaacttaatttaaaaatgagagaagagtatgacaaaattcagattgctgacttgatggaagaaaagttccgaggtgatgctggtttgggcaaactaataaaaattttcgaagatataccaacgcttgaagacctggctgaaactcttaaaaaagaaaagttaaaagtaaaaggaccagccctatcaagaaagaggaagaaggaagtggatgctacttcacctgcaccctccacaagcagcactgtcaaaactgaaggagcagaggcaactcctggagctcagaaaagaaaaaaatcaaccaaagaaaaggctggacccaaagggagtaaggtgtccgaggaacagactcagcctccctctcctgcaggagccggcatgtccacagccatgggccgttccccatctcccaagacctcattgtcagctccacccaacacttcttcaactgagaacccgaaaacagtggccaaatgtcaggtaactcccagaagaaatgttctccaaaaacgcccagtgatagtgaaggtactgagtacaacaaagccatttgaatatgagaccccagaaatggagaaaaaaataatgtttcatgctacagtggctacacagacacagttcttccatgtgaaggttttaaacaccagcttgaaggagaagttcaccccaaagaagatcattgccatagcaaattatgtttgccgcaatgggttcctggaggtatatcctttcacacttgtggctgatgtgaatgctgaccgaaacatggagatcccaaaaggattgattagaagtgccagcgtaactcctaaaatcaatcagctttgctcacaaactaaaggaagttttgtgaatggggtgtttgaggtacataagaaaaatgtaaggggtgaattcacttattatgaaatacaagataatacagggaagatggaagtggtggtgcatggacgactgaccacaatcaactgtgaggaaggagataaactgaaactcacctgctttgaattggcaccgaaaagtgggaataccggggagttgagatctgtaattcatagtcacatcaaggtcatcaagaccaggaaaaacaagaaagacatactcaatcctgattcaagtatggaaacttcaccagactttttcttctaaaatctggatgtcattgacgataatgtttatggagataaggtctaagtgcctaaaaaaatgtacatatacctggttgaaatacaacactatacatacacaccaccatatatactagctgttaatcctatggaatggggtattgggagtgcttttttaatttttcatagtttttttttaataaaatggcatattttgcatctacaacttctataatttg

SEQ ID NO: 451 - DNA, 2388 bp, Homo sapiens
agtagccggcggcggtgtctcaggcggcaatggaaggatccgagcctgtggccgcccatcagggggaagaggcgtcctgttcttcctgggggactggcagcacaaataaaaatttgcccattatgtcaacagcatctgtggaaatcgatgatgcattgtatagtcgacagaggtacgttcttggagacacagcaatgcagaagatggccaagtcccatgttttcttaagtgggatgggtggtcttggtttggaaattgcaaagaatcttgttcttgcagggattaaggcagttacaattcatgatacagaaaaatgccaagcatgggatctaggaaccaacttctttctcagtgaagatgatgttgttaataagagaaacagggctgaagctgtacttaaacatattgcagaactaaatccatacgttcatgtcacatcatcttctgttcctttcaatgagaccacagatctctcctttttagataaataccagtgtgtagtattgactgagatgaaacttccattgcagaagaagatcaatgacttttgccgttctcagtgccctccaattaagtttatcagtgcagatgtacatggaatttggtcaaggttattttatgatttcggtgatgaatttgaagttttagatacaacaggagaagaaccaaaagaaattttcatttcaaacataacgcaagcaaatcctggcattgttacttgccttgaaaatcatcctcacaaactggagacaggacaattcctaacatttcgagaaattaatggaatgacaggtttaaatggatctatacaacaaataacggtgatatcgccattttcttttagtattggtgacaccacagaactggaaccatatttacatggaggcatagctgtccaagttaagactcctaaaacagctttttttgaatcactggagaggcagttaaaacatccaaagtgccttattgtggattttagcaaccctgaggtaaataaacactttgcaggtttgagagaggcagcagaatcagagatgagaattagtgagtgattatgaagttaaaatggaataaccatgtaggtatctggctgtcgggccttataatgtgagtataataaaggttatactcacatatctaaagttgacttctgaggattaaaaatgtgaatttgtctcatagaaaaaaatgataaagtaataggaaaaagtttcacttttataatgatttgccaactttgataattataagacgatttcaataacttgtacaaagatgatcttattaaaagattttctgaatcgtaccattttatacaatacatatttcttaccaaaaaagccttgagtatgtattctatttttttttaaaatggatgtaattttgtagcagtaaatgtgataaggaaggaactaacagtttccaaatttgtaaattttaataaggaaaggggattagatcatttaccttcatggccttgaggttaagtcatttaacttctaaccttcaggtttcttatttgttaaatagagttaataacagtattaagctgatgtgtttattatgatggttaaataatgttttaaaagtatttagcccagtgcctgggacatacaaccactcagtaaatgttggccgatttttaatgttctcaataggcacctttagagattcacacagctatgcttgccttggaccagtttcaggagaaatacagtcgcaagccaaatgttgggtaatgttttaagtttaaaaataagtattttcctttttataaaagtagtagttcagaaattataatttaaaaagtaactatgccctttgtaattacaataccaatagatataccaagctgtgcaaacatttattatgactttctggtccttttcctggtgggagtggagaaatttggtttataaaagtggaatcatactaaatgtgaatttttccactttgaagcctttaaaaattaaagcttcttaaaacaaaaaaaattctgagaattactgaattattaacacatagtaattttttttttaactttatatcctgttaagtcagagtactgttggagaaggtttttgctttttatatttgggattaaatcttgggattgggtgttgtggctcacgcctatgatcccaggactttgggaggctgaagcaggtggatcacttgaggccaggagttcaagaccagcctggccaacatggcgaaaccctgtctctgctaaaaatacagaaattaccaggcgtggtggtgcatgccggtaatcccagctccttgggaggctgaggcacaagaatcgcttgaaccaggaggcagagggtgcagtgagccaagattgcatcactgcactccagcctgggtgacagtgagactgtctct

SEQ ID NO: 452 - DNA, 1987 bp, Homo sapiens
gctgtgctgcagcgccctgctgtccccggccgcgggctacgtgatcgtgagctccgtgtcttgggccgtcaccaacgaggtggacgaggagctggacagcgcctccactgaggaggctatgcccgcgctgctagaggattcgggcagcatctggcagcaaagcttccccgcctctgcccacaaggaggacgcgcacctgcggccccgggcgggcgccgcccgggccaggcagccccccgcgccacccgggatgttctcctaccggcgcgagggcggccagacggccagtgcgcccccgggccctagactgcgcgccgccaccgcccgctccctggcccatgccagcgtctggggctgcctggccaccgtgtccacccacaagaagatccaaggactgccatttgggaactgcctgcccgtcagtgatggccccttcaacaatagcactgggattcctttcttctacatgacagccaaggaccccgtggtggctgatctgatgaagaaccccatggcctcgctgatgctgccagaatcagaaggggagttctgcagaaaaaacatcgttgatccggaagatccccgatgtgtccagttaacgctcactggccagatgatcgcagtgtctccagaagaagtagaatttgccaagcaagccatgttttcaaggcacccagggatgaggaagtggcctcgtcaatatgaatggttctttatgaagatgaggatagaacatatctggcttcagaaatggtatggaggcgcatccagtatttcaagggaggaatatttcaaagcagttcccagaaaggcctgatggagtgagaagaaagtccttggtgtttgcacttaaatgaaaaccttttcagtgatgcagccagacagctattgaccactgtctctttgttgaagggttcatagcagccctgccatccctgcagcagaatgagagagggtgaacagggaactctatgctagatttgagattaaagtggtcatttgcagatctccaactcacacagatacttcacgtagatagtctttattccattgtattcaatccagactcatcgattcagaaatcatataatagctggtggtcaaaatgacatgttgagatcattgttgtttcattgtttaaggaaaaaaaaaaaatgcctgtacctacaatgtgattgctttgtattgtgagagtatctttgttgcttgctctgccaaatgcagtcttggttctaagttcactgtgaccacgaagcagctgactgtgcatcacgcagtcacaatattgtttttagggtgagggtggaggactgtgtgtccgtggattactcctcctgctggtggattgcagatgcattattaggtcatactggctagaatgcagcttttctcccaccataacatgaaaacagtgtaagaacatagggtgctttgtgcatagcccttctctatgtaagcagccatggcagtcattaaagagaaaggagtagctttgacattaagctccccagatccctgctgctcatacttctggcaagggttcccctctctcatgcatgaacaggggcatccaaaataagaagctctccattctgtggtggggaaagcggagaggggagtgggtgaagctgggaaagtaaaggcagcacgttacagaaggaagaaaggaagccagtaactgagggcccactgcctgcccggccctgggccaggccctcaacagaagccatctcatttaagccctgcaaccaatgagatgcacgtcatcattggctcttacagacaagaaaactagactcagaggggctgagtccacatcccagacagctcactgcagacacaggtggagtggttcctacaagacatccagttttaacaacaaaagagttattgaaatgcatgggtagaaattgaaccaggaaaatcagtaaagtgattgtaaaaaagaaggactagcttgcctggagatgatgtttcttgcttttgg

SEQ ID NO: 453 - DNA, 3872 bp, Homo sapiens
atttgttgagcgggccgtgctgccaggcaccgcacgttgtgtgtctgccctactctcgtggaaccaaggtccagtggagagaggaacataagcgaatgaagaaagaagcaatagagtctcagtgataagttcttggaaaaaaggtctttgccaatcctgattcccggaagagagtcggcagaattccttcctttaggcccctctggagccttggccgaccagccacttctgtggtctggggacagtcaccgagggtatcaaaaagccattcacagaggtcatccgagccaacatcggggacgcccaggctatggggcagcagccaatcaccttcctccggcaggtgatggcactatgcacctacccaaacctgctggacagccccagcttcccagaagatgctaagaaacgtgcccggcggatcctgcaggcttgtggcgggaacagcctggggtcctacagtgctagccagggtgtcaactgcatccgtgaagatgtggctgcctacatcaccaggagggatggcggtgtgcctgcggaccccgacaacatctacctgaccacgggagctagtgacggcatttctacgatcctgaagatcctcgtctccgggggcggcaagtcacggacaggtgtgatgatccccatcccacaatatcccctctattcagctgtcatctctgagctcgacgccatccaggtgaattactacctggacgaggagaactgctgggcgctgaatgtgaatgagctccggcgggcggtgcaggaggccaaagaccactgtgatcctaaggtgctctgcataatcaaccctgggaaccccacaggccaggtacaaagcagaaagtgcatagaaggtgtgatccactttgcctgggaagagaagctctttctcctggctgatgaggtgtaccaggacaacgtgtactctccagattgcagattccactccttcaagaaggtgctgtacgagatggggcccgagtactccagcaacgtggagctcgcctccttccactccacctccaagggctacatgggcgagtgtggttacagaggaggctacatggaggtgatcaacctgcaccctgagatcaagggccagctggtgaagctgctgtcggtgcgcctgtgccccccagtgtctgggcaggccgccatggacattgtcgtgaaccccccggtggcaggagaggagtcctttgagcaattcagccgagagaaggagtcggtcctgggtaatctggccaaaaaagcaaagctgacggaagacctgtttaaccaagtcccaggaattcactgcaaccccttgcagggggccatgtacgccttccctcggatcttcattcctgccaaagctgtggaggctgctcaggcccatcaaatggctccagacatgttctactgcatgaagctcctggaggagactggcatctgtgtcgtgcccggcagtggctttgggcagagggaaggcacttaccacttcaggatgactatcctccctccagtggagaagctgaaaacggtgctgcagaaggtgaaagacttccacatcaacttcctggagaagtacgcgtgaggacgcctgagccccagcgggagacctgtccttggctcttcctcccaatgcccgtcaggctgaactcgcctcccccgtgactctgcctcgggcctcgcagaggccgctggtcacttcgtcatcattttgcccctggagacgtctttctttgtgccttgatgttgagagcgcctctcttttgagcaaacaagcattctatatgcaaccagagtagaggggacctgctcagcaggtgtgaccagggttctctgaatctgttattgtttttgcttctggaaagttcatttggggtttacaacaactaggatgtgttgggtgagatgtttcagatctggagaaatgagcaggtgtcgggaaatgtgtgacttaaccgtggtgagggctggaaatccaaactcaccaccatgatctgtgaaataaagcccttagcggtgtgaagcatccggtcctttgaacagaagggcctggaaggcccctggggctgagaaagggtccgcccggtggcctggaggcaggcgccgggagcgcagtagcacgtggactgggcaggatgttgcactagcttggggtagatgctgggggctgcggccacggtcagagggccccactgtgaggcgtgggtgtgagccaggctgcaggaggaactgggcctccgcttcccagcaacgcagccaggcctgagaattctgtgcgcccggcgggctttgggaatgaggggttcccttgaacatgcgtaggctggaaccccgtctgagaggtctccctgaatttcagtgacacatagtgcagcccggcagtgtcccacttccgtggagagagccgctggaatggtgtggacccatcccgcgggtgaccggtgcctgttctcccctgaccgagcctgtgagcacatcgccccctgctggcgacagcggggaaatgagggctgaaaatatcctccccacaagggcaatccccgggacctgccgagcagccaaggccctgtcctttcttgaatggtggcgagctgaatctggtcggtttcctagcttttaggtggtaaaagtgcctggcagcttggctgccgtggaggagtcagtcgtggttggaggttcattgccgtgctttcatgcagagtgttttgccttcatgttagcttccggctcccctcccaggctgcagactctgacctgtggcatcaggcttctcccagtacaggagggtgccatcccccagcatgcggcttctctgccattagcagccctgggcgggccgaccacactcgaggctgcggtgctacgggcttagccctcgcctccctcactgggagcttccccatcctccctgccttccccagtgggaagttagggaagctcaggagcctgggaccccgcatgtcccaaaatgggattggagaagctggagagaaagcagaagaggccgaggagtgaggcagcagcctctatgcttgatttccacaccgggtccgtgcagaggaaacagaaactcccaactgtccttacccaccgacatcacagcccctatgaagaaagtagccacaatctcaaataacaaaagggaatgttctaaaactttttcttccttaaaaaatggagaaaattgcacttgtgcttgctgtgtggtatataaaccaggattagtcccagggtcgtgaggtttctggtgaaaaggttaaatcgtagaagctagtatattttttatatttttgtaacaattgcttttttcatgggggaggcggggttagtatttatagtcctaacaagtccagtaattttttataaatcttcagattataaacagcccctaaaaactttacaacgtttacacagttttttaaaaagagactgtatacacttgatttgctttcaaaataaataaggtcagctagtctaggaggttaacgtcgggtaggaatgctgatcatgataggtttggttttctacagattctgttccggtgcctttcctatccaggcaccacctgagaaagttgtcatttgaggtcgcacttggaagttacatctgtgaagtttctgtcattcgtccagatctgtgtgtgtagcatgtgctgaggaagcacgtgctgggctgtgcctcagacagtgcatcaccgggcacccagaggcttgcctggctattcctgttctggtgtgtgtggagtgttggggaggaacagatgcagatcaacctgtggctgttttcccgtctaggttctcacaggtatctcctgacagaggtacttaacaatggctctgctggaaatttctataaataaaatgtccaaaatggtg

SEQ ID NO: 454 - DNA, 3524 bp, Homo sapiens
tttaaagtggccgcatcatttttccttttctcaagcattgtatgagagttccagttgcttcacattctcactaacacttcgtatggtcagagtgagactagagaaagcatttttatatttctgcatgtctaggaatttctgaacaaatttttactgggaactgggttaaaagataagtgttagagttagtgagagatttacctcttgaaaggaatgtgttgtgttcatgtatcaaggggtaatgaaactcaaggccatagagacgttccaggggttagaaactcagagaggcttatcttatcctcccctcggagatatttatttacataccatgggtatgagacctgcagccatttgtctccttatggtgagcgatttgcttccatccaaaggctaattaaagtctttcatccaaagactaatcatccctcttctcttcctaaggagaatttattgacactagaggagcaaatgtttctctccctctcttgggaggtgagaaggaaaccacggtctctctcctatataagctcccagattcataattttggtgttgctcatctgtattacaaatctcaatatgtgtaggatgacatctggctcttctcctgctgcctgggtggaggagaattggattagaagggggaaccaatatggttgttcccatgagtaagtcaattcatctgtctttgctctgggaaatcttatgtttactcttaggaaaacaggaataaatgtaggtattaaaagcttaagagtcagtttaaaaagtgttttagccattctgattcctgtactgtgttatctttattgtggttttattttacattttccgaatgtctaatggtcctaagcatcttttcatgtacttattgaccatttgtatatctttctttaaaacatgctcgagtcttctgacaatttttatgatttttacattgggctgtcttttgttgagttgttagtgttatttattgtattctggatagagttctttatgtatacgtgttgtgagtattttctcctgttgcgtggcttgcctttcttgttttcttaaacagtgttttttgaagagtaaaagttctggattttagtaaaatgcaatttatcagttgtttcttttatggttcatgcctttgtacttttttcaggaaaccattgcctacctcaagattaaaaaaaagttctgtacattttgtgtgttaggtgttacgtgatccaccttgaggtaacttttgagtacatatgaagtcagggtcattcctattttcatagactgcgttgtttccttttcttaggttgtctttgaagcttggtgatgctggaaaccccagaagtcttgctatgagattcatccttaccaattacaacaagttgtccatccagagttggtttagtttgcgccgagtcgagatcatttccaacaattcaatccaagcagtctttaacccaactggcgtatatgctccctctggttactcctaccgctgccaacgcgtgggcagcctgcagcaggaccaggccctcttgctgcccagcgacacggatgatgggtcgagcctgtgggaggtcacttttattgatttccaggcacttggactagtaccctgcatgaaagttcatttcaaggcaaacagaacaatattcttggaatgggaggaaaaagcttcgagtttgaacagagctggggtctcccaaagttgccaatgctggtctccaactcctggcttcaggtgatcctcccacgtcagcctcccaaagggttgggattacaggcatgagccaccatgcctagcccagatgattcttataagatgagacatgggacttgaatgctgctattggtgcacatttctgcagacgtgtctctggctgtcaggatgcagaatgttgacctctcagaaaaaggaagaaaggcttcatccgcagtgggcattaaaaaaaatcataaacatctattcatggtcttggaattgaatcttaaggcaaagcaggatctcagtgtctgtggccatctgaaaacgtccacatgatgccagaccatgctttactctgaaaatccaccgataaggtacgttgaagatggagaacaactgatgtcaaggcacattttggttgtaagggacagaagtccaactccaacgagcttgccaaggatggaacctgctggcaaacataaccaaactttgggaagggcagggtatggttaacctcaggtttctggaagcagagtgtacagtgctgtgccgtccctcttctctctgcttctctctgcatattggccctatcctctcagtggggcaccctccctgagcagcgaacagcagccacaggaagctccagtgtcaatgcctcccacagctttccagagaagcagcagcctctttgttagctccgtatcaaagacatccacaggcagggctttgtgtgacccagtttgggtcacgtctttatttggggcccggaggaaatggatacaatgactacagcccatcatagaacctcatgtttagaggaccaaatttcctctctccaaaagtgaaatgttgtcactgtccatccaactgatgaaaatcttccttttcaacagaaaaactatcatgatgttgtctgttgggcttcagtttcttacagcagtcatcttaagaattaaactggtatggataatctgactatgaactccttgagggcagggaccatattatataatacttctgtgtcctctgctatttcttagcagaattttgaaaatgtgccaagtgttgacttggttcgatcacttgtgagaatggagggacccataatgttaataatcaatgaaggttgttggagttacttacccaaaaccttatgaacttagccttccctagcagattgagtttcctaatttgtccggtataagcaaacactaaagagggattggggaaagttgtgagttgagtagttgggaaaaaggtagtttgcagttttatttacgtctcacagcttgacattttttgtttgccttggagggggtacttttaaaaattcctcttttgaaaacaataaaatcttagattttggataacagatatttctgtactatatacctcacttaagattttcaaagtaatgtttaaaagtgccttttatattttttcataccacattgtagggagggccagggtcattttttaacacttaactatgctcaatacctcctcaccactataaagtaaggtcgaatgttggttaaagcaaagctgtctggaatcaccctgtcaaaagtactgatttataaccttgctactcacatttcttactgtggtgccctccctcttgttggctcctgcatctttgaagtacagggaaaatgaactaatatggcagctccaatatgcagctaatcctgccaatgatgtctcccctggaagtgtttgagagaagaatttcttttcccagtatggatttatgtaaacatttgttccattcacgagtagcacattaatgcctaattctggaaaaaatacaaagaaaaaaccttt

SEQ ID NO: 455 - DNA, 2459 bp, Homo sapiens
cataaatgtctaaggggcttagaaccttacctaacatattgtatgtgctaagtaccaactactctaatgcgtcaaattgtctttctataccattcttaaaatagaatattttttatttatttttattaaaaatttttttgcctaatctaattatttacgaaaattatgaggtctactcagtttgtcctcttgataaaagccaaagtttttttcttctctcttatttttttgagacggagtctccctctgttccccagactggagtgcagtgacacaatctcggcccaccacaacctccacttcccgggttcaagtgattctcctgcttcaacctcccgagtaactgggactactatgctccaccatgccaggctaatttttgtatttttagtagagacggggtttcactatattggccaggctggtcttcaactcctgaccacgttaactgcccgcattagcctcccaaaatgctgggattataggcttgagccactgcaccaggcctttttttttctctatattaatacgttagagagtacaaatgcagctccctcacagaagcatgttgcataatgatgaagtatgggcttttggtgtgacaacattatctgaatgctctttattgtcccaattagttattttctcattcctaaaccctctgccaacctcccaactttctgagtctccagtgtctatttttccagtctctgtatccaagtgtatgcataattgagttcacacttacaagtgagaaaatgaagaatttgattttctgtttctgaggtttttcacttacaataatggcctctggttttattcatgttgtgcaaaagacgtgatgttattcttcttcatggctgagtagcattccatggtataaacgtatagcacactttctttattcgattattgactgataaatttaaattgatttcatatattggttattgtgaatagtgctgcaataaacatatgagtgtgggtattttctttgtgtaataaattattttcctttaggtagatacaaagtagtgggactgcagaatcaaatggaagttctacttttagtcttttttgaaatctccatacagttttccatagaggttgtagaaagttacattcccacaagcaatgtctaagtgttctcttttctctgtatccttgccaatatttcatttttctgcttttcagtaatagcaattctgaatggtgtaagttggtatctcattgtggtttttaattggcatttctctgatcattgacaacgttgagcatcttttacgtgcttgttgaccatcgttgtctttttttatttaaatgttcatgttctttgcttgctcattgtctttttttttaaaatgttcatgttctttgcttgctttttaaggttacttgttttatttttattttattgagctgtttgagttctttgtatattctggatgttagatctttgtcacatgcaaaacttgtaaacattatctcgttccataggttttctgttcactgtgttaattaaaaagcatttttaggagatttttagtttaattaagttccttttgtctatttttgttattgttacatctgcttttgagatcttagtcataaattctttgtccaagtcaatctctagaagaatttatcctagcatttctcctagcatttttatagtttcaggtcttacattttagtcttttaatccatatttagttgacttttgcatatggtgggacataggggtcccattccttacttctgcatacggaaatataatttttccagcacaatttgttgactaggatgtcatttctccagtgtatgtttttgctgactttgtaaaatataagttgtttgtaggtatgtggctttatttctgggttctctattctgtaccattgatctatgtgtcgatttatatcagtaccatgctgttttggttactaaagccttctagtataattttaagtcagataatgtaatatctccagctttgctctctttgcttagatttgctttggctattcaggctctttttgtggttccatgtgaattttagatttttttttctaattttataagaaataacattggcattttggtaggaattgcatttaacatgtagattgctttgggtagtagagtcattttaataatcataattcttccaatccatgagcatgggatgtttttctcatttgtgtcatgtacaatttctttcatcagtgttttgtagttttccttgtagggatctgtcatctctttgactaattgtatttctaagcattttaccttttatgtagctattgtaaaaggaagtgacattttaattcggttctcagcttgatcaccattagtgtataaaaatgctactaatttctgtaagttgatttttgcattctgaaacattattaaatttatttatcaaatctaaaaaaaaaaaaaaaaaagaaaaagag

SEQ ID NO: 456 - DNA, 1992 bp, Homo sapiens
taaaaactcaatgtttttcttcatgtggacttaaatgtttgtatttccaaatgaaatagatcccgggtgaggcgcccaaaggagaaggaaaatcaaaaccccagaaagaaacccagtagtcactactcgcctggcgctcagtggccaactgtctggtttttgcactgaaagccccttgtctgtccagaagcccctcagtcccagtcttgggtcttgggctctgggcccggtgtggctgggatcgcaggcatgttcatggcaggtcaggactgcgctaagcctttggggaggatacttgaaaggggagtaatctgctgtctgtgtggttggagcttaaagtacagctggggctcaagagacacccagagtgcctgtcaggcggtggcactgtcatcgcatttgataaaggccaaactgagtctgggagagaaggggctggggccacgcagaatcagggcagggctggggccaaaatgcctggagagacagagtctgagagatacagagatggccagagacagatggagagagacagataacagagagatacagagacagccagagacaaatggagagagagacaaatggagaaagagagccagagacatacagaaagacagagacactagagtctgagagatacagacagacacagagacagccagagacagatggagagagacagagacacaaagagagccagagacacagagagtctgagagatacagacagacacagagacggccagagacggagagagacagagacagacagacagagacacagagagtctgagagatacagaaacagccagagacaggtggggagagagacatgaagagagccagagacatacagagagacagagacacacagagagacagagacacggagagtctgagagatacagagagacacagagacagccagagagagacagagaggccccagggcatcgtggctaaggttgggctcccctactccacagcctccaggaggggctgaggtctggaaacatgggcgggggtgggcccgcggtgagaaaggtggaagaatgtctgcaactcaggcggagaataaacaaaccgcactccgggcgacgggcagtggctggatgcacgtttttcctgcaccgacctggcagagcctgagaccgggcctctgcatctccagcggggaaactgaggccccaagaggcccaacccctcatccagaacagctcacctcctgtcctatcctgttgcctccaggcccaagccccatcccttcccctactccgggcctcagtttcctctccaggcaaggaggaatctggactgtgcctgtgcctttgctgtgtcccctaccaccaggcgttcccgttgcccgctctctcccggaagcagaggacggtgctggtcgtgtgtggcccggagcagaacggggcagtggggctggtctgtgcccggcacctgcgggtgtttgagtatgaacccaccatcttctaccccacacgctcgctggacctgctgcatcgggacctgaccacccagtgcgagaagatggacatccccttcctgagctacctgcccactgaggtgcagctcattaacgaagcctatgggctggtggtggatgccgtactgggccccggcgtggagccgggcgaggtcgggggcccctgcacccgcgcgctggccacgctcaagctgctgtccatccccctcgtgagcctggacatcccctcaggctgggacgcagagaccggcagcgattcggaggacgggctgcggcctgacgtgctggtgtctctcgcggcgcccaagcgctgcgctggccgcttctccgggcgccaccacttcgtggccggcaggttcgtgcccgatgacgtgcgccgcaagttcgctctgcgcctgccgggatacacgggcaccgactgcgtcgcggcactgtgaccgccacccgcggccacaccgcagggaccctcgccaataaacagccctcccaccacc

SEQ ID NO: 457 - DNA, 3156 bp, Homo sapiens
aagtgctgtctgtgatgtttggcaagcctggtttatatccatctacaaggtttgcgaacccatgttgccaacaactcccttggtacaataaaaaagacgagtatttacttttcattgaaagtggagaacctgaaaaggaacctggaaagaagcagctggaaaaggtgagaggaaaacctagagtgtgtgttatcctgcaagccaattgagaatggagcttgcttgatatttcactagataaagaatttaaggcgagtatctatctttgttctccttggcaactgagagtctgcccttggaaacatcaggcaccatggggaagcgggataatcgggtagcctatatgaatcctatagcaatggccagatggagaggcccaactcaatctgtgggcccaacaatccaagattatctaaatcgaccaagacccacctgggaagaagtaaagaaacaattagaaaataaaaaaacaggttcaaaagcattagctgaatttgaagaaaaaatgaatgaaaattggaagaaagaacttgaaaaaagcagagagaaattattaagtggaaatgagagctcatctaaaaaaagagaaagaaagaaaaagagaaagaagaaatcttgtcggtcttcatcttcttcatcaagctctgattcttcaagcagttcttcagattctgaggatgaggaaaagaaacaaggaaaaaggagaaagaaaaagaagaaccgttcatacaaatcatcccaaagctctacgcatgaatcagaatcagagagcaaggagtctgtaaaaaagaaaaagaagtcaaaggatgaaacagagaaagaaaaggatgtaagaagcctcagcaaaaaaagaaagaaaagttaccctgatgataaacctttatcgtctgagtcctcatctgaatcagattatgaagaggatgtgcaagcaaaaaagaagagaaggtgtgaagagcgagaacaagcaaaggaaaaagtaaagaagaagaagaagaaacagcacaagaaacatagtaagaagaagaaaaagaagtctggatcaagtcacaagtcaaggtaacatcaagaaaaaaagcaagaatgagtttgccgagttcccctgtgttagtagaattatttctggactttgagttgcctatcaaatcccactgtgccagtaaggggcatagtggctgctggcaacttcaatatacatttttgtttgtttgcttgtccttccttctaatggttaattcctctgagagctaaaattctgttgtcataccagtgaataaaatgtttgaaattaaagtaaaatgtgttagataatgaataacttcgacaaaaaaaagtgtatctaaggttaaatgtatctaattcgaatacatctttgaaatatcaccatcaatgaaacataaatgtaatttccagacaattgtagttggtatttttgatgcaaggacttaatattgatgtctcaaattccttgcttttgtaaataagtttagttcattttccttttttctttaatgaatctttgtttacatggggaaagagcatgtggggtgggaagggcaagtgtttgctaatcactgtggctagctgaatagtgtgcctttgactcttacacatcctatttttgccagagcagcagccgtccttttcttactttatgaaattctggggtgttgtatgctgcttcaagtgaacaagaaggacaggagtttacagcataagtaagcccccatatctatgaaatttacctcttcttcagcactgtttactatacagtactgaataatatttagtattacaatattacatgatttgaaataactttatacccattttgtatgggaaccattctaaacagaccctgatgttgtttgattaagaaatattctgaaattttttttgcatgttttatactgttaagttttaattatctgaccatattctatataactgatgatccttttttaagatatgatttatgcttaggatataagtttcaagtttttagtttcttagccttgctatattaatttcattactgtgtttaattgcacccttgccaaaatatttagcatgtgaaaaggttttttttaaaaaatatgtaatgccttcatattgaagctggttactgtacgcaagttgagtgccagacctctagtacgccgtatgttacatgaaactactgccaaaatcttagtaagattgttgttgaaaagattgttgtcttaagcattaatattgaatttatatagaagttaaatgtagatgataatgacatcattgatcttcctgtgtccgtattttcctacaatttggtgccttgtatctgttgctgattcacttttaccactagtgtaaaaataagtgaaaaaatatttttactttacatttttatatatcagagtaacataaattataaatttgtgtctcaaaaccacctgtgatggaggatgtgctaattgtaatgtcataggtacaaagtattttggcatgatgaaaagctcaatagctattgtttttcaatagcagattttatctcggctaccttcaatcacaagtaaaattataaagataaaaaacatctacataaacatgttggctgccaaattttttgcattggaaatactggaatctctcattaaagttcttggaacattatagtgatgccatgttagattaccttggagcttcataactttagctttttcctaaaaatatatgtttatgctgataaaaactattacatttatgggatattttgtatccatatagagtttttcagaattgttcattaaaatgctttttataagcttatattatttgtagaatatggcaaaagcatttacagctcatcatgtatctatctgctcctgttcacttccaaacctcttgtagttaggcaatgccatttgactacttcaagcagagggattgtaaacagaagtgattttctatttccatgttggactgtaaaaagttctgcatgaccctccagttttcttttgcctgtcatggtgacctgaaagcaagatgttccaaatggcatacttacaagacggatgcaacctgggtccttaggtcgctgtttagaagggacctgactggagtgctgatggacttgcagtaaactttttaagtgtaagaaataaactgttatgtgtt

SEQ ID NO: 458 - DNA, 2750 bp, Homo sapiens
ttaaatgttccaagtgtttctgggattcagaacctcagctccatgctctagaggtcaagacagttggagcaaagtccagaaggaaaggccaactggggagaggcaggaggagagcagagtggggagagaagcggagggaggtgggtgtgggagggagatgctcacagccctcagcagccatgatctggtgggggcccctgccgctgccctggtttttctctcatcttggacctatggggaatgcaccgtgcccctctttctggcctaatttcctgtgtccactggtgccacctctttgcagaggcagccttcagagggatttgtgggggagaaggagcttctcctttgggaagaaaatgcttgtggtcctccatgtaccctacaccctgcagctgcgtcacaggggaagcactcccccatgggggccaggcgctgtgctaagccttttccctgtactaacatgtgaaccccctctgagcaagccagcgaagtgagcactatttgacagcctgagaaactgaagcacagggcagtgaagtgaattccccgaggccacagctagcaagtggcagagctgggacttgaacccagaaagggcagctccaggctcaccacccgtatactctccagtctattgtctagtggaggcacgggcggcccaggggccttccccgatgcttatctcattctgtaactctgcattctcagtggaggttttcttgactctagctccaggcaggcagagactgcctttgtttggctcccatttttatcattagcagagcaggtgctagtgatatttgcagaacaggtgctgaatgaatgcatgaaaaaatgcatgaatgtggaaatgaaaggggatgcagatggagatgatgcagatggagatgatgatgcagatggagatgatgcagatggagatgatgcagatggagagcagtggccatgcagagtctttgcagaccttggcttggcttcaggctgtgggggctctgcaagccaagggtttgagttccacctccagtgcttgccagcaatgccaccttgggtgacctttatcttgctacctggaaagtggggatgctggcagcccctccctcctggcatcactgacactgcatggtcagggtgtgatccctttgggtacaggcgggggtggtggacctcccaggtgggcaggtccagtttggatgaaaggccaaggacgattcataggagagcacaggagtccttgcttagccccagcaattccacagaacctgctgtgaactgctggctgctgcccgtaacttttccctgtccctatttccactccttggaggccgcaagaacaactgctggctggccttggccactgcctcagtgttccagcctctgccgtcatttgacaccaagaagacagccaggcaggccttggctcactgcagaggtgttactccacccccgagtcctagccgccccctgtcctctgggtcctggctgggctgggcaggagggcactcacctctcccttctctctctgccctagcatgaaccagcagaggggctctcaatcctggtgctgggcagtgggtctagatttccctttccatctgcaaatatacccaccatttcccttccctgcattctgcgctcagcagggctattcacaggaagcacagaggacctctccttcacagtgagcagttgaccttttttgagcacctactgaatgccaagggttttttctacatttcaatttgtgatctcatttgtttctcaaaatctccctaggagggagacataatgcccctccccattttactgatgagtaaactgaggctccaagagattcagccagttgcttagcagagtcaggatttgagccgaaagctggcttgtctctactcccctccatgctgctctgcagaagagagaagccatagaaagctcaggaatgtagtgacagtcgcagcgctagcgatgatgataatcacagctcacatccaccatgtgcttgctacgtgctgggagctgccattcaagccttacatgcgtttctgcatttaatccttactcctgtgaggtaagcagtattttaaccccattttacagatgtaaaacactggcggttcagagaaaaatctgtccaaagtcatgcagctaatgcatgagacagcagagcccctggctctgaaaatccgtggagattgaaataccaagcacactggttcatccagacagtgggatattgttcaggattgaaaggtaatgagctagaaaaatgtgaaaagacatggaggaaccttacatgcctcttactaaatgaaagaagccaatctgaaaaggttctataccatatgattttcactctgtgacattctggaaaaggcaaaactatggagacggtaaaagatcagcggttgccaggggttgcgggagggagggatgaataggcggagcacggaggatttttagggcagtgaaactgtgtgtgatgctgcagtgattgatacgtgtcattagacatttgtctaaaccgaaggaatgtacaacaccaagagtgacccctgatgtcaagtatggactttgggagacaatgatgagtcagtgttcattcatcaatcataacaaatgaaccctgtggtacaggatgttgatagtgagggaggctgtgcatgtgtggggacaggcaggatatgggaaatcgctatcttctgctcaattttgctgtaaacctaaaactgctctaaaaatatagcctatgtttt

SEQ ID NO: 459 - DNA, 2642 bp, Homo sapiens
attcaagaacagaggggcagtgccagctctgggtgaataatgtccccaggagttccacttataggcctttgaagtaattctgatgcctggaccactccaattcacttaaatctgaatttctggggggttgtgcctgggcatgggcattttttaaatctcccagctgatgctactatgcagtcagggttgagaaccacggcgcaactctgaccttgcaccttgcatgttgacattctctgttttgtccctgcaggctaccaatcacgttagaaatctgattaaggcactagagacaaaggaacccaaaaatccaagcctccatcttaaaaaaattattgtggttagccgactggtaagaaggttctttcctggttctgaaatggtgcttctccctgctttccttagaggagaactgtgctcccccaggaagctccttgagtgccttacccctcccttctggctcaaacttgtcctttagggtagtggctcatatcctgctgtgcctacttgcctctggctgataactgtgacatgtgggttctacatccttagcctaggtgccccctcagagatgccatgaagatcagggagacggggtctgaaagtgcttttggagtgggctgtgccttatttggggaaagcgggtggtattgcagctgttatgcagcagagccacacccagctctagcctctagtgcctgggtgcccatctcccatattcttttttgtggaggtgacctgagaaggctggcctgcctaggcctctcaaacatcagggaaggttcaactagaccaggttgccaacaaatctgtatctctttcagacccttcagccccaaagcaagatttactagaagtagttgctgtaagaatgaaggcaactctgggaccccaggaaccagaactgtggagttgcataggcaccatctctccctctgtatgtctgattctctctgccttgttctccacacatggcagggaacatggctgatggcagcctttggggccacttcttattactggacacattcagcttcaatttttgaaaaacctcttggtgactccttagaccaattactgtgaccagacaggggataggtccctcagaggaccctgtggctagaggcaggttccacagttgtggccagtgagaggttccttgggagccagacagcaacacagacccagctgcctagacacacggtacctcttggctctcctgggcctaccagccctgcctaccaaagtgtcccccgtttctgacatgaccttgctcatacaggctggactgactggtttcccaattcccaccttcctgtttcttgcagtgtgggagtcaccaggtgattctagggctagtgtgtagtttcatcgagcgcaccttcatggccaccccctcgtatgtccatgtggccacagaactgggctatctcttcatcctgaagaaccaagtgaaagaggccttgctgtggtattcagaagccatgaaactggacaaggatggcatggctggtttgacaggtatatgcaggtgtggcagggctcagggatgggtgtcgggagccaaaccgggcagcttccatgggtccagaagagaggtgctggaaagcattctccttgaagggtatgtgaattttggggtacaatgtatgatggggtatctttctgggaatccacaagtatagatgtaagaggcacagcaatgctcagaggtatgatcagagtcactctgatctccaccagacctccaatgtctgtctacactgactgccccagaagactgacaggctgaaccttatactcagtgggccctgcctcttctcaggctgcccaggccggggttggaggcagttctactcaccaccagtccccacatgcagagcctctagattcacctctgtagaccctccttcagggctctgagctgaaaaaccaccaaaaagagtagctctgagaattatatatttccctgtctgtccaggtgactttaaaaatcttttctataaatgccaaatgaactttctacagtgccatttccattttacgcattttttaaagccccctattccatggtctgtggtgaactctgaagtggcagtatttggtttgggttgaggaagttgtgtggtccagtgctcaaggcaggccgactcttgccctggctctgaggggctatgtgtttggggccaagtcacttctcctttctaaactccaggctcctcatctgcatagcacatttatcagagtagtttatcttgacttctggttcaacatgtcaggctgaccccctcaaatccatgctttccctctgtccccaaatcccatgaaaataatgaaagatatctttaaaaggtaatgagccaggcgtgatggctcacgcctgtaatcccaatactttgggaggctgaggtgggcaggtcatttgaggtcaggaattcgagaccagcctggccaacatgatgaaaccccatctctactaaaaacacacaaaaattagccaggtgtggtggaggacacctgtaatcccagctatttgggacgctgaggccggagaatcacttgaacccgggagatggaggttgatatgagccgagatgacaccactgcactgcagcctgggccacagagtgagactccacctc

SEQ ID NO: 460 - DNA, 3101 bp, Homo sapiens
ttttgccaaatgatttgttgaaaattgcatttttgctattttaatcttgccaaaaaagggggcctcactaatcctaattatgtacatacagaatgatgcacattgcttgcatctttttattcctcccaaagagcatatcaaggatatatatatatacataatttgttagtttaacataaggcgaagagtaccatttggttttaagagtaaatataggctgaatttattcaagaccaaagcaacctatttaatgaggacaaatgagtgaaaccagctgttttagaatttatctgcagacactggagtgctcctttaaacgaagaaacagcctcccatggcagaggaaaagccaggtccttacaaaggcctctcccatcccagtacttcttctgcctgctgctctgccctgggacgtaggccttcctgccgtttctagtcacaggcaccctcctgcctcagggcctttgcacatgccattccttctacctgaacattcttccccagagagccacatggttcacccctcactacctgccagtctttgctccaatgtcacctttcaacgaggccttccctgacttatttaaaaggacaacacaccccaccctccctccctacccacctctctgcatcttcttcttgtgcacctatcaccatctgagtgctgcagatgttaatcattcatccatttatttgattctcgcctccccatctcccatagactgtaagctccatgtgggcaggaacttttatatgtcttgctcattgctgtatcctggtgcctacaacagtgcctgacacatattaggcactggataagtatttattgaaaaaaggaaattaaatcagtaaattgaaaactattaagaggccagaaaatgtcaatttcagctttcatcaaatctaggttctattattgtgagaactttagctgacccagtgacctggctcctatgggtacaagatggttagatacaccgggcagcagcggtggcttctgttcacagacaagtgaatgcctgccctgccgctagccccacctcacaaatatgaggctcactgttcgcaggggagcattttggaaccagctgggatgaagacagttttctgcaggtagcttttgtagccagatgcacagtagtgggttcccatcactccatgaggtcactgtagacctggaccattccagagaatcctttgtaatcagtctttaggtgtctcccagtccttcccagttcaacacgggtggcagcagatggcccagcccagggaaagtccacctgaccattagaaggactcatcctccagccaccaaagcaaggctgcagaggaagaggagcttgtcacaaacattaaccggctcagggctgggtaactgcattgacaaatttggaagcagcagggccagagagccaaggcccccgggtatccccattggccactggtggaggtgcactggaaggtcagggccttgacaccacagagccaagcaacacacacctccttgggcccaggccccagcacagtggccctccagtgctggcaggtggcctcacccacagcaggggaggcgtgggtcctccaatgaccttcctgcccctgccagatgattttcacaactacctaactttggtgtttacttctaggtcctttggccaaatgcgttttcttctaagagttgttggcaaaatactgttacaagcttcttatgggacttttgtcctactgtggcctggttaaaggctttgtcctcctgtttaatccacttccgtggttttgctgtcatttctcttgatgccatattttcaggtccctcgtgggagggggcataaggtctccatcgtgatgccctctctgcagctgtccagccagcagtgagtgggcccacacatgtgcattcctgtgcttgaattgccaaataaacagtgtccctttcattgctgcccaaacagactggaagcctgctcctgccagcactcagggagggagtgtgtgcttcccaagagcctgcccccttggcccatgcaaactttctccatggcaggtgtccgtgaaggtctcccaggccctatgggctgtccagctctttgcacacattcttcccgcttgcaggaatggaatccaaacacctgatacggaatgatgacttggcagtggggagtggggcagcttgtctccactaacttaggaccaaaactaggaaactcaccatgagcatgtgttggagatcagctgtggcctccagcccctgtacacacagaggcaagccccacctctgacagagccagtcaccgttcagtaggagcttgtcttccctgggcccccaggtgggaaaggctgggctcttagtcctacaagtaaaggcgctgttaggagcaaggagcaggcttagctgggtccacagagggactaagctccttagtgacctgttactgcctcatctacggagtttgaactccattcaccatcacctttgagaatttggccttgttttaactaaggattgttgaagttaattataacaagggaccatcctcaccctgtgtttgctttgttccattaaacgtgcgtttggcctaatgaagtcagtgaatgttcctcttttttcttttttggtttctttggctgatttttggatgatatatgttgctttatttctcccattttctttgattactgtggacaaaggaaaacactgaggcaaaagtaggtcgtcaatcacattactttgacccagatgtgcagaacccctttctacctgcaggtgttaattccaattcaatgcaaatatccttttcaatccggtccattcttggagaagaaacccattgtaagagctgtcttctgtggttgggatattactttgtaaagtattaaagcactaaaccagtttttgcaatatgtagtaaatcttgctttcattttggaaaacttccagtaatgactactgcactttttatagaagaattgtatttaatttctttcttttatgaaagattatttcaagtaaaaatagctctgtaatctgtgtgacatggcttctccattacctgacacagagagaagctttgatgcctactcaataaaattaacatgcttgt

SEQ ID NO: 461 - DNA, 2382 bp, Homo sapiens
atctcatgctgtccccagcctgggcagtgacttctgcatggtccaggggtccctgggtactctttagccacctccgtcttcatggccacctggggcttagcactcacatccagccaccaaggagccgctggagctgtgggctggtggccctggttcagaatgtcaggcccggggtgggtcggggtagtccggatgaagcccctccagaggaccgcccccgactaggacagcatctgggccccagagggattcctggaggccccatctctggcgctcctgccgtgccgtgccctgccatgccctgcactgggggatgcaggccagcccttcgcagctgtccatggccatgctcagcccaccctttgtagcttggccaagtctgtcagtgcctgggtcccaggccgccctgtgcgtgcctccgtgtgcttcctgcagctcccagggccctcgtcctgagtggggtggggggctctgcccacacatgcctccagcggccagggagcatgggagcacagcccccaggctgcctgccgttagttgtcaggtgagtccctgcgcaggcctgggttctgacccccacgcagatgacagctacagccacacaatccccatccatggggtctcccagcctgaaaccctgatgtgtcagtcaaaaggatgaccaccaggcttgcagccagcttgggacatgagccgcgctccttcaatgtccttggggagggcccctgggctcacacctttgaccctagccctctgtgtggatgctacccttggaaccttatctcacgcaaacaagtgcagttcctcagatgtcacatttcatgtgccacagccccacacacaagccccagggactcctcccatgggcccctttccatcaggcctctgtgagtctataccccatcagcccctggcccagtgagtctgtctgtccgcccacctgcccaggtggcgcctcatgttggtttcctgctggaaatgcttgggacagggtggaactgggtttcctgggctttggggctggaggtgtctctattgcggtccctggcttcccactgagctgtgggcaaggctgctgcgctgggggatggctggggcacggagcgaggttccctgctaagctgcgcgctttcccccaggtgatccgcaggggctggctgaccatcaacaacatcagcctgatgaaaggcggctccaaggagtactggtttgtgctgactgccgagtcactgtcctggtacaaggatgaggaggagaaagagaagaagtacatgctgcctctggacaacctcaagatccgtgatgtggagaagggcttcatgtccaacaagcacgtcttcgccatcttcaacacggagcagagaaacgtctacaaggacctgcggcagatcgagctggcctgtgactcccaggaagacgtggacagctggaaggcctcgttcctccgagctggcgtctaccccgagaaggaccaggtgaggagccgtcctgcgcagccaggcccagagcccccacctgggagaggaagcagggctggctttccccaggacaggtcattttcaggccatgttagccaggagtctctgaaatcatgtagcagatgcccacttgagcaagcaaaggagaaattgggggtactttgtcatcagggcccagaaagttccctcacggaagccagtgaccggggcacacaggggatggggtcccacttgctttgttctcttctcttttccccttccatcctgaggtagagtgaacatggccacccttggccccaatattaaaatgccttgccgggcacggtgggtggttcgcccctgtaatcccagcactttgggaggctgaggtgggcagatcatttgagctcaggggttcgaaaccagcctggccaacatggtgaaaccccgtctctactaaaactacaaaaattagccaggcatggtggtacgtgcctgtaatcccagttactcaggaggcttaggcaggagatcgcttaaacccgggaggtagaggttgcagtgagctgagatcacgccattgcactccagcctgggcgacagagcaagactccatctcaaaaataaaataaaatgtcccaaggttgggtgtggtggcttacacctgcaatcccaacactttgggaggcaatgtgggcagatcctttgggcccaggagttcgaaaacagcctgggcaatgttgcaaaacccttctctccaaaaaatacaaacatacccaggcatggtggcgcacccctgtaatcccatctactccagggcgctgaggtgggaggatcacttgagctctccctgggaggttgaggctgcggtgaactgtgtttgtgccactgcactgcagcctgggtgacatagcaagactgtgtc

SEQ ID NO: 462 - DNA, 2245 bp, Homo sapiens
actcaacaaatgtggagccctactgcgacccgcccgatcccggacgccgagacacccgcactgcgccagaaaatcatggtcccagtcccaggagcggacattccagaaacagaccataaataaacacagaagacacacgagtgtaaagtcagtgccccgctgcgaattaaatcggggtgatgtgatggcgagtgagtgggtagttaattcggatggcttggttagacgaggcctcgctgagcaggtgccactgaagccgaagtctgaaggcagagcaggaacctgcgggcgaaggtcgctatctgaaccgcgaatcgctggtttccctggggaggttggccgcggagggatcactgctcgaaggaccgagggagcgggcgctgtaggtgttttcggcagagatgcccgcccgcatcagagtgcctcaggagggcggtgaggaggagacggaagagagggcggggacctcgcagggccgagggcgccctggggtccagtcccggggctggcggctgccttgcggcctctaggtgcgggcggataacaaaacccggcgccggatcgcccggcccgggtcgcgggcgccgcaggatgtgggcagaaggcccgcctgttccgagccttaaatcaacacctgcggttcccgggggtgctaccactggggcccgcagcaaggctccgcggcgctaggcccgagaaaccgaaactcccctagtcgcccctgccccccagcactcgcgccattgcctccagccccgagccaccattgtttccagtgccaaatcgggcagccccgctagcctccgaggccgaaccgccaggggccccataagccccgaggaggctcgtcgggaaccgcttccttatcctctcggtatgcgcatcgccaccaccctcgctgcagaggccgccgccctcccagcgcgccatcaccgcctcctctgcctcttcccctccctcagccccggcccctgcattgacttggctcgggctgcgcctcactgcgcctgccaactgtcacacgctctgaggctttcaacagcggggcgccagggacaaacaagccgcggcaagcgcaaacagcctgctcaaacagggacggccagggtgttgtttgaccagcactggaattggaaactaggtttcgaagaagtcaaatcgaagtacaatattgtattttaaactgcctgttgttattacatccctcacaacgcacgctctacttgaaacttccagtggataccaactgcacttagaataaaaaatgaaactccttgcctaactctgggacctcatcagcacatactcaccatattttggtaacaaaggccttcatgctgttcccggaagtcgccaagttccatccatcattgttaataattccttttgctcgctcctcgcacaagaactgtttcttctgcttagtgctttgcctactgattccatcttgtcatttaagtctcggctcaaatgtcacctctgcaaagaacccttgtctgaccatacatctaaaatagccacaaacactctataaagacttggccttgctttatttccttctcagcactcatcactgtctgaaacaatgttttggatttgttgcttattatcagtctcccttctcaagaatgcaagctttgtgagggcagagtcgtaatcttttttaaggctgtatccccaatgcctggattatcaacttcgggcaatggaccacgcaccaggattccacctctttctagcacctatcagtgttgcgcacatcataggccctcaacaaacaggcagccacgctgggggatcccacatggtaaagaactgcaggtggcctctaggagatgagggcggcctccagtcaacagccagcaagaaactgaagtgctctgtcctacaaccttgtgtaactgaattctgccaacaacctgagtgagactgaaagtggatccctctccagtcatgcctcagtgtgagagaaacctgtgacttgcttctaacccataggatatggcaaggaactagtcatatctgagagcagcctccagaaaacagtcagcaaaacactgaggttctcaatccgatagtcaatgaggaacggaatgctggaacaatgatgtgagcttggaagcagatccttcccttctgctgggcctcaggtgagactgcagctccagtcatcatcttgattgcagcccacagaaactaccaacccacagaaactgtgagttaataaatgtgttgttttaagttg

SEQ ID NO: 463 - DNA, 3495 bp, Homo sapiens
catgatttctgtcctttatctttttaaagccatttcatttggggtactttctttgtggccatttaaaattgtttcagaatttccaagaaaacacttttttattttatttttatttatttttaaaatttttgagacagagtctcgctctgtcacccaggctggagtggagtgccgcaatctcggttcactgcagcctccacctcctgggttcaagcaattctcatgcctcagcttcctgagaagctgggattacaggtgtgtgccaccacgccaggctaatttttgtatttttatttatttatttatttatttttgagacagagtctcgctttgtcgcccaggctggtgtgcagtggcacgatctcggctcactgcaagctccgcctcccaggttcacgccattcttctgcctcagcctcccgagtagctgggactacaggtgcccattaccatgcctggctaatttttttgtatttttagtagagatggggtttcactgtgttagccaggatggtctcgatctcctgcccttgtgatccactcgccttggcctcccaaagtgctgggattataggcttgagccaccgcgccaggcctaatttttgtatttttagtagagacagggtttcactatgttggccaggctgctctcaaactcctgacctcaagtgatctgcccacctcccaaagtgctgggattacaggtgtgtgccaccatgccagccaagaaaacactttagaaactgacagtaagtatctgaggcataaagatgtttgattcttagtcatttgtacttagtgagatttaaataagtctgatgtactactttgattttatgaccaaaagcagcagaattttgttctttctattttacttttagattgttgttaaggataccctgagtgggagggctccgtcatctattgagaattgaataacattatcctgtgtataaatgaagaaaaatggaaagggcagtggaaacttgatgaaaggcagatcagcaagcggctgcttttaaaatgaattcttttgtttgtgtctctgttggagattgtttgaaattttgcattaatttttattagttacaacttttaactcctgtgtaagcaccaagtatgaagatgatggttgtgtgttcctgaagttgcttaggtacactgttgtctcattatgggaagggatggaatggagggagccctgtctgctctgtgcaggaatcatcaggtcttccacctagattgtggagtgaggtactgcctccctgaatgcatccatccatgcctcacatccctagttgtcttttccaagcactcggaactctggagacttacattgaggtttcagattcactttagtacctactagtatcaaaggaaacagatagctttgcttttgtgcgagtggttggggtgtgggtgtgtgggtgggggaggtgagatatgaaattctacctgatacttcaaagacatgtctgaaactctatgaagcctagcatggtgatctcttattaagtagttgttctttgattacttcaatatacagatacttgaattcattcatttttatacaggaaaggaaagcacagtgtgttaatggttctccctcagaattcgtgacctagaaaatgatattaaggtattagcatatttacgtaaaagaaggtagagtttatttgaaataagtctttgtttctgctgtcgagttgctttttgagttgaaagtatttttcagggtttcaaattaagttctgaagatttttacatctgaattaattatcacttgatccttgtaatactgatgggaaggctgtgaaattcttaattaggggaaaatatctctcagttctctgggaacttgactgaaaaggttattcaagatttggttggtattttacccctttaagcttaaacatttaagcttaagttttaaattttggctattttaaatgagaatctcatacttttccacattcttaactggaggttgctaagtgtaatgcagcccttttgttgggttgtataattcacatctattattgtaccttgctgtgatacacagtaccctgggctttcaccttacgtgaaatagcctcaggatattgtctctgttaggagagatgggatggggcactaacttgatactcatgtcttagcgtgtatgttaatgatcacttgtaatttatacatcactatgcacatgttagatgtaacattattattcatgacatctgttgtttcttttgaattgagatgatctaaacagggccagttgttcactgaagctgacttactcatggcctcttttcctttagttctccagtgctgatgaagcggctttaaaagagcccatcattaagaagtttgaagaggaaggaaacccttactattccagcgcaaggtgggggccagaacatcactaactctctgatgggtgcagatggcagtcagaggaacagctttacagagctctgtgtagttgagatggtccagcattcataggaactggaaaataacatttggacacacttaattttgtactgttgtttctttacaatctgaatggctactgctgaaatgccacccctcctcccagcatccctgcactgtggactcaccaccagtggtctgattctcgcttcccttgtcttccccctagttgaggtgtctggggcctggaggggtcctgcagcccaaggtgggccatgttaggagccgagaataagttataagcttggctgtgttacttcagaagttctaatttttgcttaaaaacccctctccttgatcattttgtttttaccccattttaaacatgagattggttgaacacttactggcatttgttgacaagtatgcttgtacgtttgaaaggtgattagtcactgccagggtctgtgtgtcggcgccaaataattacctcacagaccattgccgctgttggctcggtttttcttacaccacttaatgaggtaataaattatcatgcctgtcccagctgaagacctgctggtgcctgctttcacatctttcttcaacaactttagtgttctgcattccgaagactaatctaagcttcatgtcttcctttcatcccttgggcagatggaaaaaagaaagtaactctttctgcatcttgtaaaattagcttatgttgtaatttatgctggcgaaggcaaactggagaggagaggggagagaaaagaaaatcaggccaggcacagtggctcacgcttgtaatcccagcattttgagaggccggggcgggcaggttgcttgagcccaggagttcgaaactagcggggcaacatggtgagacccagtctctgcgggaaatatacaaaaattagccaggcgtgatggtgtgcacctgtagtcccagctactcagaaggctgaggcaagcagatcggttgaacctgggaggtcaaggctgcagtgagccgagatcatgccactgtgctccaacctgggtgacagaacaaggccctatctc

SEQ ID NO: 464 - DNA, 2573 bp, Homo sapiens
tttcaagctcttctgtgtcgagctgaggagctgctctgtgcccggcttacagaactggaagggggagccaccttccgcctgatggaggctggagaacggatggaacctggatccctggagcctgggacactacctcgctgcggttggtggtggccacagaccagtaggagggcggctggcagcgggagcttcttctgccgggctggaggactaggagaagggagagggaacgccacatgctggaggctggagcctgtgccaccgtggctcacctcgatgtggttggtggcagctcgccttgctgtggttggtggtgacgtcggagactgcagctcggccacagtggtagaaatgtgttgggcttttgctgtgttgggcacttgctcccatctgctttcttctctagaatccactgccctagaatgagtaatttttcttagaagcagagttggaatcactgaggaagcacagacgaagcctcactcttgtcccccaggctggagtgcagtggcgcaacctcggctcactgcagcctccgcctccccggttcaagcaattctcctgcctcagcctcccaagtagctgagattacagtgagaacacgagacttttgaaaaaacacagacgatgaaactatgtgctctttcagccaatacaatgtgggaagtttttctgtttgttaaaataattcaggtccttagagggtagcttggtgtaaatgtggccacagactctcagtttgggtcctctcatctggtcctccaccgtccaaggccagcacaccattcctgaagcccagcttcacaccctggattttacccctcatcccttgaggacccgaagacaaacagccttgtcaacgcactagtgctttgtctcacctcaactgcaaagtggccatggggtcttcaccagcagctggggaggatgctccagaaactggccctgatagctttgccctgtaacttgactggattgcaaccactatgggtgagataaacatgatctctaaggctctttttcagtattgaaattacatgtatgtctgatcactttaaagaaaaatgtgaattttttctttattaaaacaattttcctttgtccttatggatcatttgtcatattttgcttcaatcaagagttgggtcagacacaaccactgggcagctgacacgagatctgcacatttgttactagaagagccagaaggccacccactgttcctcctagtgaaccactggcagagcaggtatggcttagagcccagtttcatgcttgactactgatatggtttggctgtgttccacccaaatctcatcttgaattttagctcccacaattcccacatgttgtgggagggacctgattggaggtaattgaatcatgggggcaggtcattcccatgctgttctcatgataatgaataagtctcatgagatctgatggttttataaggggaaacccctttcgcttgacgctcattttcttttcttttctgctgccatgtgagatgtgcctttcaccttccaccatgattatgaggcctcccctgccatgtggaactaactggaaggagacatggcttgcatcaacagcaacagagatgggccccacagttgccactgccttcgccaggtccttctcccatgaagtgtcccagtaaaacaaagcaggaatggcagcaagaaaaggagctccatttacctttccttcatatggataggaggcctcagagtccaggtctccgttctcctcaacataccagaaggaagtatccatgaagccaccattgcagccctcattgctttgaggaccagagctaccagattctgctcactcagtgagataagtttgcctgttttctagaacatctgcccttccagcataccagttgtactaaaagcccaacaagagccacaatgaccctgaaaagagaataaaaaagctgatatccacacacacacacacacacacacacacacacacacacacacacagagcaagacttttaacaacagctcatatatctaaatactcctttaaaaagtgaactgcatgttgcagcacagtctagcatagcacaaatgtcaattgcttcttggctttcctggggtgatgggaggtctgaacctaacacagtctcacctgatccttcacaggactcatgtagcctttctctctccagttcacagatgtggggatctcaagaagcagacgttcctggaactctttccccttcctgtgcttctggtattgaaaaccattcatcacctgcctgaattcttaattagtcttcaaggaaaagtaaataaaatgttaaaaagcaagagattgatttggtaaagaactgaggagaggaagcacagagttcagcagtccacagcacactcaccatgtctccaaaggcgttcatggctgttgtgaagctgtgtttcccttggctgtgttcctgattgtgctgctcaatcatcttcatgttctcccacactgctctcctccatccttcttcattctaaagacaaacatgtaactgatgctctttatttctaattaaaacccagcctatgctaacc

SEQ ID NO: 465 - DNA, 2980 bp, Homo sapiens
gtcaggagattgagaccatcctggccaacatggtgaaaccccgtctctactaaaaatacaaaaattggctgggcgtggtggcacgtgcctgtagtcccagctactcgggaggctgaggcgggagagtcacttgaacccgggaggtggaggttgcagtgggccgggatcgcgccactgcactccagcctggggaacagagcaagactgtctcaaaaaaaaaatgaagtaaattaaaaacaacaaaacccatgttccgtaatcccatatatagtcactccaccgtgcaaagctgactatgcacattgaacaggaatgtgcccttacagggatcagtgtccttcagggatgtggctatcgatttcagcagagaggaatggcggcacctggacctttctcagagaaacctgtaccgggatgtgatgctggagacctacagccacctgctctcagtagggtatcaagttcctaaaccagaggtggtcatgttggagcaaggaaaggaaccatgggcactgcagggtgagaggccacgtcacagctgcccaggagagaaattatgggaccataatcaacatagaaaaatcatcggttataaaccagcttcctctcaagatcaaaaaatttattctggggaaaaatcctatgagtgtgctgaatttggaaagagcttcacctggaagtcacagttcaaggtacatctgaaagttcctacaggagaaaaactctatgtatgtattgaatgtgggagggcttttgtacagaagccagaattcatcacacatcagaaaacccatatgagagagaagccctataagtgcaatgaatgtggaaaatccttttttcaagtatcgtctcttttcaggcatcacagaattcataccggagaaaaactatatgaatgtagtgaatgtgggaaaggtttcccttataactcagatctcagtttacatgagaaaattcatactggagagagacaccatgaatgcactgactgtggcaaagcgttcacacaaaagtccacactcaagattcatcagaaaatccatacaggcgagagatcctacatctgtattgaatgcgggcaggccttcatccagaaaacacaattgattgcacaccgaagaattcatagtggagaaaaaccatatgaatgcaataactgtggcaaatccttcatttccaagtcacaacttcaggtacatcaacgtgttcacacaagagtgaagccctatatatgtaccgaatatgggaaggtcttcagcaataattccaacctcattacacatgagaagattcaaagtagagagaaatcttccatatgtactgagtgtgggaaggcctttacctacaggtcagagttgattattcatcagagaattcacactggagagaaaccttatgaatgcagtgactgtgggagagccttcactcagaagtcagcactcacagtgcatcagagaattcatacaggagaaaaatcgtatatatgcatgaaatgtggactggccttcatccggaaggcacacttgattacacatcaaataattcatactggagagaaaccttataaatgtggtcactgtgggaaattgtttacttccaagtcacaactccatgttcataaacgaattcacacaggagaaaagccctatgtatgcaataaatgtgggaaggcattcaccaaccggtcaaatctcattacacatcagaaaactcatacaggagagaaatcttatatatgttccaaatgtggaaaggccttcacccagaggtcagacttgattacacatcagagaatccatactggggagaagccttatgaatgcaatacttgtggaaaagcctttactcagaagtcaaatcttaatatacatcagaaaattcacactggagagagacagtatgaatgccacgaatgtgggaaagccttcaaccagaaatcaatactcattgttcatcagaaaattcatacaggagagaaaccctatgtatgcactgagtgtggaagagctttcatccgcaagtcaaactttattactcatcaaagaattcatactggagagaagccttatgaatgcagtgactgtgggaagtcctttacctccaagtctcagctcctggtgcatcagccagttcacacaggagagaaaccctatgtgtgtgctgagtgtgggaaagcctttagtggcaggtcaaatctcagtaagcaccagaaaactcataccggagaaaagccctacatttgttctgaatgtgggaagacctttcgacagaagtcagagttgattacacatcacagaattcatactggagagaaaccttatgagtgcagtgactgtgggaagtctttcactaaaaaatcacagctccaagtgcatcagcgaattcacactggagagaagccttacgtgtgtgctgagtgtgggaaggcctttagcaacaggtccaatttgaataaacatcagacaacacacactggagacaaaccctacaagtgtggcatctgtgggaaaggcttcgttcagaaatcagtgttcagtgttcatcagagcagccacgcttgagagaaacagtgtgagaaaacccccctgagggttgggtctgattgtacactgttgcacgcatgcagcagaaaaatatgtatattattgtaaatagaaatgaccacatcagaatgtcacacatggctgttctggagagggcctctgagaaggcactgaatgaggcgagggacccttcctacattgtcaccatccccagtaaaccttgggtcattattcatactgacaaggaaccgagtcaatttggtgaataggaaaagccttctcatgaaaactacaatagaatactgttaccaaattcttcataagaaagatcatattatgggaatgataatcctgtttactgtggattaggtatagtgccaacagcttgaatggtaagacaacataatatatatgatagtgatgaaaaaaaaaag

SEQ ID NO: 466 - DNA, 3716 bp, Homo sapiens
tcacactagctgtctgtgtcaaggccacgcagaaatctattggaaatcgctgtggaaacaaacgcaaatgaaaagccgcaaagagcaaaggctgctcactggcccgtctcctctcatgactgctgctctgggaaccacctctctgctctccatcgctaccactctagcctgtggcctgctcctggttgaagaagccatcaatcaaaatgaataccactctggaaatcttgggtggtctgacctgatattttcgcatagtggccacagatattttaggcccccaagaggtagtcttactctttcaattttactggctccactgtttgaggaacttggaacaatttccccagggactggtctggaggtactgttgaataacaccacggtgtttttttttcctctccaccaagggcccgttgatgtctcaagaccagacataaaacttttggtgctcaagtcactcagaatgagagtcctgctttccctcagcactcttgccctttgagggtggggccaaatgttttcttcctttattactgaggacttttgatcctggtttttgatatttgtcattcccagggggaattttgtaccctgtgtcttggtaaagtgtaagaccactgtggattttggggttaagtctcatttccctatccctcccttcaagagaagaaagaaagagagaatacccaaaccctgcatcgtctctcactcgcctgtccagagcctatggaacagccattggggcagctgtcacaagctgttcacacagcttttctgatatactgacagtctcatgaggaagtgcatataactccctgcaatggtttgaatgtgtcctccgaagtttatgtgttggaaacttaatactcaatacaacagtgttgacagaaataaaaatctgtccatgggccctaaacatattgtgagtctctagtcgctgtgccctttgtgcctgctggggatattggccctggcaacaggatgaacatggaccactggagcctggaattctgccactgagagattccccgggagcatggctttcttttctttcctgggttccgtggattctctccttctcctgaggaattagcctccttactgtcagaccagccacagaacttcctcccacttatcccttagatgtcaactacccacacttcaaatcaccctggagactgatgtgactgggatgatttgactgcatgtaggtcagagctgcctccaggcaacttgtggggccaaggctctgtggctagaaggaagtgagcattaatacatcacttagaacagcaaaaatcatcatctgaagatcatcatctgaaaagatcagcatcagaagagctgtgaatatcaccgatctgataattgggtatttttggtaaaacacacacacacacacacacacacacacacacacacacacacacgcacagatgcacacagccctgcttttatgagaattgagcttaaatagatgtgggtggaggttttactgaactggatatttcttaacttttggagtacaacacctagtctcctaattcctgtcctgcatagcgtgcttacacagtattttaaaattagagataattaaaattgattttgtttcaataattattttgacagttttaaaatatcttttggaattgtttgtaccattccagtccttttcaaatccaagactgaaatgaatttttctagctatttatcccatctttgagttaagaacataggtccttgcgtttcagtttaataggtgattctttaaaatttgtttatttatttagaagcagggtctcactatgttgctggctggtcttgaacttctggggtcaagtgatcctctcacctcagcctcccaagtagctgggattacaggtgtgagccactgcacctggctctaatagttgatttttgaaaccatatggaacatttcaagttaataaaaatttttaattaaaaaatatgtgcacaattcacagatgatcagtcttttggaattattatagaatatttttgacaataaaactatgctgaactcaatcttttcttaatgattatgaagatattttctgattgcaaaactatgaaaattaatggtcattgtgatattgttgtgagtctaggtcaatgtggagttctggagacagaataatacctaaagtagatctgttttttactttgggaactgattataacacctggaaattatgtgttatattatttaattaaatgagacaatgtatataaataaaccaagcattggggcttggcacatagtatttttcagtcaatgagagaagagtttgaatatgaaattttttatgcactggggagtaacttcctagatctatttctctatgtacttcctctctgtcaatctcactcattcaacaatacttactaagcatatactattaatattatattgcattgattctaaatcagacacatagtcacattttattaactctaaaactgtgatcagttttaacattgctggtggcttgcaaatactgtcagctagaagcaatcatgatgtactagttggctattctttttggtggcacaattggataactgagccccttcgtgtttctgtcaactgacgtttatgtttgaggaaggcacatgaatcagggccattgtttgaaatctaacctttggcaaaaatcggtaaggaactagccctcaaacttgcctaatggtaggtgtcagcggcttggatgaaaattcccagggataatagaggagtactcttttaagaaatagtgtagcaccaacaccctagatggtacagaagatggatactgtgggaaagtcagggacactgatcactctatttgaaaggtaattcagcaaatttagactcacacatataaagaagtttagaaaattgaaccaattacttttgtttatatttttctttttatgtatgtgtaagagataagataaatatctgtgactaaatatgtctcttataccaaatagaaaaatatatccaagaagaaattataatgtcattgttttattaagcattatgtcatgctttttggaggcatttccacccttttttatctttcttaatggtatataaaattgcagtgcatttcaccatcagtggttcattggattcggtgaagtctaagtaactgctggaccttgcgttaggctttttagatacaattaattaagcaaatatttatttatttatttatttaaattgagatggattcttgctctgtcgcctacggtgaagtgcagtggcaccatctcggctcactgcaacttccgcctcccgggttagagcgattcttccacctcagcttcccaggtagctgggattgcaggcactcgccatcatgcccggctaatttttgtatttttgtagagatggggttctaccatgttggccagtctggacttgaactcttgacctcaggtgatccacccgccttggcctcccaaagtgctgggattacaggcgtgagccaccacacccggcagcaaatatttattgaatgcctactgtgtgccccaagctgttctaggtgctataaatgggccagacaagctgtcagggaggttgccctggctgggaagacagacatcagacaacataattccagagctggataaatactagggagaaaaacaaatgtgtgatgtattataatggatattgcaataaacactgggatttaagacac

SEQ ID NO: 467 - DNA, 2894 bp, Homo sapiens
catcgcacccctatcctgtacccatataaaccccaaaccccaggctccagaagcagatgaggagacaaggagatgagacaaagagatgagctgatgagtggcagaacagcatggcagagaaggggagaagagaaggaatgtctgaatgctgagaggagttcagctggtgatgatcagaggggagatcggccgctagatggccagactccaggggaagaccatctttccactccattccccttccagctccctatccatcccactgagagccacctccaccactcagtaaaacccctgcattcatccttcaagtctgtgtgtgacccagttcttcagggatgctggacaagagcttgggatacagaaagctgtcacactggccccctgcccttgcaaaaaggaagagggtccactgagctggttaacacttaagccattcacagatggcaaggctaaaagaatgcactgtaacacatgcccatttgggctttgggagtcgcagcctcccaccccttgatgcttctatggggctggagcccagggatgcttgctccagctcctgcacatctctgtctctgtgccccccctccaataaggggttagagcaatggtggcaaccaaacagaggatgcacatccctgttgcacatcctgtgaggggtgtcagggaactctaccatttcatcaagaatagtgcccattttgaaatcagacaaacccaagtctcagtttctcctccaccattagctgtgtagctttcttactcttagacatttcagatcaaagagaacgtgcatcactgtaattttcaccagtggatgaaaagttctgctctttgatgcaacatgggacaaactgaccagttcctcaggtagggaagtaagtaacctctctgagctttattttcctcatctggaaattaagggaggtggaaatttcccagagtagtttcataaattgagtaatacctgtaaaatgttcagcgcagtacctggttcacagtgagcagtcttcatttatctcttttctttatttatcaaaatatttaactcaatggaaatcctttgctgattatcagtattgtccctaatacactattgtttatatactgtcagtatagtgatcatttgttttacattatttctccattcctttccatcccttttgcctttttagatcatcgtgtacaatcctatgaggtgagctgggcatagattagaaaatttatgtcctagatggagatgctgtggcccagcataggtcacagctgttagggttatagagatggagagagagccttgcttatacccagggacctgcttgctgagccagccttattcttgggggacaactaacatccagattttatagctgggtgcccttggttctcaggtaacttgttaagtgtgaaattatgaaatatatatttgatcttcctcccagtttcctgacatacaactcctaaaatccttggaatctctaaagttatgtgtctttttgaatgttaaggagttgactggtggctggcagccccttagtagcttcaggatgaggctcatcactagaaagaccaatgcctgatgagacagatgggactttcagccccatccctcaacctctgggaacgggagagtggctgaaggttaagctgatcaccaattatttaatcaatcattcctacataatgaagtctccatagaagtccgaaaggacagagtaatgatgaacttccagatagctaaacatgtgaaggctcttggagggtggtacacccggggagggcatgtaagttctgagctccttccaccatattttgctttatgcatctcttcatctctatcttttgtgataatctttataataacaatttagggtagatgtaagtaagtttccctgagtcctatgagctgctctagcaaattaatcaaacccaaggagggagggtcgtgggagcctcaatttatggctggttatgttaccgatggagggtgtccaggttgttggcattttgaacaaagaattgggcaaaatgcacaaagcaaggaaagaatggagcaacaaaagctgagatttattgaaaatgaaagtatcctctatggggtgggaacatacccaagcataggggctcaagagccccgttagagaattttctggggtttaaataccctctagaggttgccattggttacttggcttatgctctatgtaaatgaacaggatcaagtaaagttacaaagtcatttactcagtgtaggccctgtgcaaatggagaggctatttcctgtcatagctgaagtgtttccatttgatttagttctaggaagtcagcatgaatcagctttattttcctgacctccggaccctgttctcctgccccagttggtcaaaagcacaggtaaaacaacttggggcctgtgattggcatcagaaatggggctcagttttgtggggacaagtccccaacctgtgtgatctgaccctatctccaggtagatagtatcagaattaaattgagttagaggacacctagctcatgtcactccagaattgcttgcttgcttggtatgtgggagaaaccccccacacatgaggtgtcagaagtatagcagcagaggccgggcacaatggctcgtgcctgtgatcccatcactttgggaggccgaggcgggcagatcacctggggtcaggggtttgagaccagcctggccgacgtggcgaaaccccgtctctactgaaagtgcaggaattggccgggtgcggtggcgggcacctgtgaccccagcgactcgggaggctgaggcaggggagtcgcttgagcctgggaggcggaggttgcagtaagccgagattgtgccactgcactccagctcgggcgacagagccagagtctgcctc

SEQ ID NO: 468 - DNA, 2133 bp, Homo sapiens
agcaaacacgacttgactcgaggccaaggctcttgagggctgagcagtgtccccatgcacactcctgaaacactttgtcccttcgccattcagaaggcatcattttggggaaggcagcagccggtttttcagagccagcgagtggccctgccagctgctgagcagggcaagctgagaagggtggtggtgtgcaagtgttattctctctttttgtttttgtttttgttttttgagatggagtcttactctgtcgtccaggctggagtgagtgccgtggcatgatctcggctcactgcaacctccgcctcctgggttcaagcgattctcctgcctcagcctcccgagtaactgggactacaggcacctgccaccatgctcggctagtttttggtatttttatttattatttatttatttattttgagaccgagtctcgctctgtcgcccaggctctagtgcagtggcccaatctcggctcactgcaagctccgcctcccgcgttcacgccattctcctgcctcagcctcgcgagcagctgggactacaggtgcccgccaccacgcccggctaattttttgtatttttagtagagacggggtttcaccgtgttagccaggatggtctcgatttcctgacctcgtgatccgcgcgcctctgcctccaaagtgctgggattacaggcccgagccgccgcacccggcctgcaggtgttgttctgaccccagctccactgtgccagcccgacttgagatgccaagtatcttgggcctgaggattgaggcctagagagaggcaggcgttcctcagagtcacagggaatggcggcgcctggactgggactcagcccagctgcttggcctgaccctctcacagcataatttcccggcacctggaggccgcgcttagaagccgcccagtgccctgagcgtctccatggcctgcctgagcccctcgcagctccagaagttccaacaggatggattcctggtgctggaaggattcttgtctgcggaagagtgtgtggccatgcaacaaaggattggcgagatagtggctgaaatggatgttcctctccactgccgcacagaattctccacccaggaagaggagcagcttcgagcccagggcagcacagactatttcttgagcagtggtgacaagattcgattcttctttgagaaaggcgtttttgatgagaaaggaaatttcctggtccctccggagaaatccatcaacaaaattggccacgctctgcacgcccacgaccccgtcttcaagagcatcacacactccttcaaggtgcagaccttggccagaagtctgggcctccagatgcccgtggtggtgcagagcatgtacatctttaagcaacctcactttggcggtgaagtctcccctcatcaggacgcctccttcctgtacacggagcccctgggccgggtgctgggcgtgtggatcgcagtggaggatgccacgctggagaacggctgtctctggttcatccctggctcccacaccagtggtgtgtcaagaaggatggtccgggcccctgttggctcagcgcctggtaccagcttccttgggtcagagccagcccgggataacagcctctttgtgcccaccccagtgcagagaggggccctggtcctcatccatggagaagtggtacacaagagcaagcagaacctctctgaccgctcgcgccaggcctacactttccacctcatggaggcctctggcaccacctggagcccggagaactggctccagccaacagctgaactgccctttccccaactgtacacctaaaggctctcgcagggcaggagccctcgcccctcccgggtgaagctgtgggctgtaaacaccagtgccttgctcagcctcctggttgcaacagggaggtcttgtctcccctcctgggctttcctcctgccctgtgggcagcagcctaggctgggtcaggggcttccctaagatcttcacctctctgcctccctactgccccaacatagccttgaggaggcttctcagccaccaaagggttctggccccttctcactctcctctcctctcagatggaactctggttattatggtgttagttatcgaataaaaacgacttcagaatgc

SEQ ID NO: 469 - DNA, 2300 bp, Homo sapiens
atgccagaggggctgacacccttggccacactgaagaatgatcagcagcgccgacagctggggaagtcccacttgcgcagagccacggctcatcacgaggagtcggtgcgggaggcgagcctctgcaagaagctgcggagcattgaggtgctacagaaggtgctgtgtgccgcacaggaacgctcccggctcacgtacgcccagcaccaggaggaggatgacctgctgaacctgatcgacgcccccagtgttgttgctaaaactgagcaagaggttgacattatattgccccagttctccaagctgacagtcacggacttcttccagaagctgggccccttatctgtgttttcggctaacaagcggtggacgcctcctcgaagcatccgcttcactgcagaagaaggggacttggggttcaccttgagagggaacgcccccgttcaggttcacttcctggatccttactgctctgcctcggtggcaggagcccgggaaggagattatattgtctccattcagcttgtggattgtaagtggctgacgctgagtgaggttatgaagctgctgaagagctttggcgaggacgagatcgagatgaaagtcgtgagcctcctggactccacaccatccatgcataataagagtgccacatactccgtgggaatgcagaaaacgtactccatgatctgcttagccattgatgatgacgacaaaactgataaaaccaagaaaatctccaagaagctttccttcctgagttggggcaccaacaagaacagacagaagtcagccagcaccttgtgcctcccatcggtcggggctgcacggcctcaggtcaagaagaagctgccctcccctttcagccttctcaactcagacagttcttggtactaatgtgaggaaacaaacatgttcaggccccgaacatttccggtgctgactcggccttaaacgtttgtgccataatggaaaatatctatctatctgttctcaaatcctgtttttctcatagtgtaaactcacatttgatgtgtttttatgaaggaaagtaaccaagaaacctctaggaattagtgaaaaaagaacttttttgaggtgtgttactatactgctgtaagttatttattatataaagtattgtaaatagaatagtgttgaagatatgaaatatggctatttttaatggtgacaattatgacttttagtcactattaaattggggttacctatatcagtacaatttgtagttgtttccaggtttggctaataatcattccttaacctagaattcagatgatcctggaattaaggcaggtcagaggactgtaatgatagaattaaattagtgtcactaaaaactgtcccaaagtgctgcttcctaataggaattcattaacctaaaacaagatgttactattatatcgatagactatgaatgctatttctagaaaaagtctagtgccaaatttgtcttattaaataaaaacaatgtaggagcagcttttcttctagtttgatgtcatttaagaattactaacacagtggcagtgttagatgaagatgctgtctacaaggtagataatatactgtttgatactcaaaacatttttcattttgtttaaagtagaagttacataattctatattttaagtcttgggtaaaaaagtagttttacattttataaagtaaagatgtaaatgattcaggtttaaagctctatttgacttcctttttttgtttgagatagcgtcttgctgtgttgcccaggctggagtgcagtggtgtgatctcagctcagtgcaacctccgccccctgggatcaagcgattctcctacctcagcctcccaaatagctgggactacaaggtgccctccagcatgcctggctgatttttgtatttttagttgaggtgaggtttcaccatgttggccaggcgggtttcgaaatcctgacctcaaatgatccacccacctcagcctcccaaagtgctgggattacaggcatgagccaccacaaccgtcccactattttactttttaaaatgacattcctactgattgatttttatcttgctataagttcgatgacaccgtgaatctaataaggttcactgttgacacagtacaagttacatagctaaaatacatagcattgaagactaattttaaggattgacaagagtttattttctattgtgcaatatcttaaaggaagcaaccacctttgggaaagtgtatctgctgctcctagggccatgcttgtatacatatttaaataaacatattcatttacccg

SEQ ID NO: 470 - DNA, 2690 bp, Homo sapiens
aacttgcaaataaacccattcacaaattcatcacacttgctgacaaattaaacaatgcccttctgtgggtggaatgtcatttgtatgaaaaaaagaattgttaactgcatcctttcagccttactccttccccatgctatgccttctttgtgacagtacttattacaacatccagaagagggtaaattggggttggggattgagggaatgaaaagaaaataaaactcagttttttggctcccttgcctatcagttttaactgtagctattatagacggggagatgcaggctttctgaacacagtggcatgtgcacttgagtaggcctgtgtcctgcccaagatggagcttggatgtctgcaggtggaagaaggccatttggacttgagccatctttgatgtccaaatcactaagcagggaccatgcaaagacacaggagggaggccatgagggcatcaagccagatgagcttgccagcctcagcaaccagccagggatgggggcagggctgcccaagtaggtggggcaggaagcccagccctcaacaaaaccctattatattctttgtcttagtgaggaagttcttactgttgtgtgtattattggaagacatcttctgtgatagggttattattgcatgtacagagagattccttggaaccgcatatgactcaatctatctcactcagatttctcaccataccttcacttattttgctgcagtgtccagcagatctccttgaaacagtgtgtactgaagacctaactaaatcctccaaattacctggttggttcagagaaccaaatcactggagctttgtagggaaggtttgactttcagggctttagccagagtaacttatttaatgattggcttttaatgtgtttctgtgcaaagatcaaagcaggtgaattttcatgtatttttagaattctagtagaaaaggaagataggaaaatctagttcaagtatacattctagtttttaggggaatttgtgtttttattttacttttttggttgctacgatttgtcctatattctatatttataagaacataaatatgtaattaaaagaatatatttgatggcactacctgtcaacaaagccacttatttgtgaaattttttggtaacttgatggaaatagtcacattttatccattgaaaactacaaagctcttatctattgttctttgtgtatatttatgcattaaaaatagatcctgcaggatgagcagatgtactgaagtgtaaatccgttttttaagagaggctatatggaaaaatatatcattcaagactcagtctctgccttgcctataggcctcgtcagtgtttagtgaatgacctcaaccctgtttttttccttccttctttggtggttgaggacagacaatgaatggtctctgtactcgcctgggctcagctgggtggtggccattatgccattgtgctcactggagagggctgccgggtttgtagagctgcggatcccggccttccctgacattgccaatctcttttctttcagctccaccagcccattggagaaaagttactgttcagtccctgaaggcttgtgccataaaagagtgggagacattcccagggaggtgaggaatgaaagatcgaattaaagaccattaaagaccaaagggcatctaaatctgcagcaaccatcagctctcttttctttgagaggtagtagtctctgaaggtgttgctgtaatgtctataattatttagatgttggcttttcagaaacccaggcattcttattagctccttaagttctccatgcgtgaagaaaataaccagcttaaaaaagctaatcggacctatctctagaagaggacctcttcttcccttgggagctaactgatattaactgactaactgattgcttagcaggaaagaatatatattctttccagggaatagagattcagagctctgtcctgtttgctttctaagccctgctgattgatatggttttgcagaatttttattgttatttttagttaagtctttaaatgtttatatggatatttaagaaaagatccaatttccttatttagtcatggagagtgtttttttgtcccacatattagcaaccggtcaacatgattgctattggtcatagtcagttttcttgcctccactagtctttctccaaacctaatcatttatgaaacgtgtgagaatcgtgaagttcgtctactgattcccaagtggaaactgaggaacaattaggatgctcagtatattcagagagaatctatacaacttcaaaatgtgttaacatgaaacaggggtgggcaaaataaaagcccacagcctgttttttgtacttcaggaagctaagaattgtttttacatttttaaagggttgtttggtgtgtgttttttttttttttaaagcaaagaacgtgaagactatgcgacaaagactgtatgtggcccacaagcctaaaatatttatctcgccctttactgaaaaaaaattgctggcataaagtaataatactggaaagacctagctaaaaataattataaagctctatgcaagttgctattcctttaaacatgtttttctatgccttatttgacttttgagagacgaatgtgtaattcttcaagtcaattattcaaattggttaatttgaatataggattttaggaatctt

SEQ ID NO: 471 - DNA, 3038 bp, Homo sapiens
actcggctccgggagaggcgagcagcgccggtgagccccgcagcagcgcacccggccgcggagccccgcgatggagatggcagaggcggaattgcacaaggaaaggctgcaagccatagcagaaaaaagaaagaggcagactgaaatagaaggcaagcgacaacagcttgacgagcagatacttctgctgcagcattccaagtccaaagtgcttcgggagaaatggctgctgcagggcatacccgctggaactgccgaagaggatgagttcagagtcaagcaacttgaagataacattcagaggctggagcaggaaatacaaacgctagaaagtgaagagtcccagatatctgccaaagagcaaatcatcctagagaaactgaaggaaacagaaaaatccttcaaggactttcagaagggtttctccagtacggatggagctgtgtacgccatggaaattaatgtggagaaagacaaacaaacaggagagaccaagattctctctacatctaccattggcccagagggggtccatcagaaaggagtcaaagtctatgatgatggtaccaaagtagtgtatgaggtgcgctcaggaggcaccgtagtagaaaatggagtgcacaaattaagcacaaaggatgtagaagagcttattcagaaggctggacaatcaagcttaggaggagggcacgtgtctgaaaggactgtgattgcagatgggagcctcagccatcccaaggaacacatgctctgcaaagaagctaagttagaaatggtacataagtctaggaaagaccattcttccgggaacccagggcagcaggcccaagcccccagcgctgcagggccggaggcaaacttggatcagcccgtcaccatgatttttatgggctaccaaaatatcgaggatgaagaggagacgaaaaaggtgctaggctatgatgaaaccatcaaggctgaattggtcctcattgatgaagatgatgagaagtcattgagggagaagacagtgacggacgtgtccactattgacgggaacgcggctgagcttgtgtccgggaggccggtctcagacaccacagagccctcatccccagaagggaaggaagagagcctagctacagagccagccccaggtacccaaaagaaaaagcgctgtcaatgctgtgttgtcatgtgaccacttctttcttctcctttcttctgggcagcctgtactctccaccactcacgtagacctcactgtaccactaactgcaatactgtgaactggaagcaaacacctgccttgccttgcagttgaattgctttgatctctctcatttttttttcttttcctcacctgagagacaacgtgcatgtgtgtgcttcattctctccaagaacttgcttttcctctaaacctttccttgtgtcttcaagagtgaatcacttccttcctgctcgattggaatggactcttcgtatcagccagtgatatggtagccttaactcacttgactggaattgaacccattggcactgggggtttcattttgtagtgtgttcctgtaacgtagtcacacactgccatgtctctggtttctcacttgcctcctttgctgtggatctttgtttttatatcttgtgtggcaaaatgctgttggctctagccggttgctagtgtagccaaaagtggaccttacttagtctgtccgatctagggtgatgctttttgctgccttacataagcttccagattacagtattgtgcattcatggctttctttctgttaaaactgaaatgaagtcaatgtagaagaacccagagcttgtcacagctgaaatgtagggactgattccataacctgcccatcagcggttgtctctctttctatggtttaaccgatgaaccctttatataagaagcaccattttaaaatttctaaggacatgaaacaaacattgtttgaagcatcagtagcaattgatctccaaacttaggcaaattcacaagccttgtttctattctcttaaaaaaatgtaaatttttatattgtttcttttttctggatattttctggtcatgttaatctattttcaatgaggagatcatcttgagaagtatctttgcagtgaccatatttctaaaacagtctgtccaacctacaatggttgccatgatgctcccacttcatcatggatggtgctgtaatgcattaactgttcatctcctccccagttgattacaaagccttgcatccatactcttttctttctggccccatgagaaagagaatgttttaggtaacttcaacttgtaggtttatctgcccttcaaaaaaaaaaaactttaaaaaacttttaaaaattaagaaagacctatcttctcaatgttaagcacttaatttcataacaaatattaagtggcacatagctgagcttcttagggcattgttttgtttttagcttctggagattccagaagagcaaagaatattttttatctagaacacaatgaacagtttttgaaataccttctcagcactcccccaaagcaaaaagccacatatgtagtaaaaccaaagggaaacaatttaataaaataacaatagtatagtaatgaaataaagatataacatgattactggttttaataagagttatcttaactttaagttatttgcccatttatagcattgttatgaattattcataaaattatgtcccacagtatatagttttgaaaaaacatgatatactacatccagtctaacttctgtggaaagtagatcagaaaaaataagatagtcttgagagaattttattatagaagctgtctaatttgacctattttgcttgctcagtgctaaatctattgcttttttttaatctcctggcttgaaattatatttacttcaataggaaaggtaaaaacatcagtttttacttttcaaagttaattttctgaaataattgcattttaatgagcacaaaatgggtcattttatttttattatactcatcttgtttacacctatacataaacagaaaacgtt

SEQ ID NO: 472 - DNA, 4021 bp, Homo sapiens
attgttcttaacttaatgctatcattagagatatgaaaatccatctggagaaaaatttagaagaagagcgccagatattactgcagcaacaaaaaatatgtcgaaatcgagcacgtaaatattttgtggagtcaaatcggagaaaaaaagcttttgaggagaaacgaaaagaacaggaagaaaaagaacaccaaattagagaacaaatacttcaacaaagaaaacagaagtttgaagaagttactgaaaaattccagcgtgcccatgttcctctttcacagcggaggaaagcagttccccgaaaaccagttcctccattagaagaggccctcaaacaaattcagggatccaacttaaaatcagaagtaaaccttcccttttcccgtagaccaacaataaactggagagctatagattctgccttgccttccgcattatcaaaaaatgatcacaagcatcagaaacaactcttatccaaaatcaattgtgagaaagaaatgaatgaaaacatgagggcaaccttggctactagcaaaaatgtgttccagcttaaactggaggaaactcagaaactcctcgaagatcaacatctaagcaatttgcaaaaattttgtgatgaagttaatcagataaccaattctgaaaccctctcaagtatagacagtcttgaggctacagagcatgaagaaatatatttaacacttaataaggagcattccacatccatccagcggaataccatttccctcaaaccagcaaatatgcaatcaactaatctcagctgctttgatgaagataaactggcattctctaaaactcaacatataaataattggcttacaaatttagatgcttcaaatactcagaatgtcacagctttctcagatattttaagtaaatctaatgttctgccttcatgggaatattttaatagtaaagaacaaaatccatctcctttgaatggaacagtggaaagagccacaaatactgctaataattcagtaccctttgtatctagcccacccatgtttgtactagataaaaaatgtgaaaagacctctgaaactagcactatgaggacaactgactccacttctggagcattcaaaagagagagaccattagttactgagagcccaacatttaaatttagcaaatcccaaagcacttcagattctctaacccaggaagtggctacatttccagaccaagagaaatattctgaattaaatcaagaaaatggaactacttcaattcctacttcatgtgtaccagtggcaacgcctttagttttgccatctaatatacagtcagctagaccttcagcaaagaacagtatacacataaaagaaattgatgcagtgcagtgttctgataagttagatgaattgaaagatggtaaagaagaagagataaaatattttaattgcaataaggaagagttgcctttattttcagacagttttcaagatgcctatatacctcacaatcctgattcaaaagatgaaaaacaaaaattagctgaaacatcatccttgtctaatgtaacttctaattatgactttgttggccagcataagaaaatgaaatacaacatccatgagagaaatggtgtgagatttcttaaaagtattttaaagaaagaatctaaatatgaacatggttatcttaaggcattaattataaatcagagctttaagtttggaaatcaaaaagcagcagctatcagagatagtattgaattaacaaaggaaaaaggtgcagaaattccaaagactattaaaaaactgaggtggtttgatgaaactagcaatatagaaaacaatgctgaaaacagtcattcactgaagaataaaacaggaacaactcaacagcattctcaacaattccacattcaaagtggtgctggaagcaacataattagtgtttctacttgtgctgtaaattctgctgatacaaagaagtccagggaggattctatctctgaaaatgttacgactttaggaggatctggagcagaccatatgcctttgaactgttttataccttcaggttataactttgctaaacatgcctggccagcctcaaaaaaagaagaaagtaaaatccctgtacatgatgattctaaaactaagcaaggtaagccacaaagaggtagagcaaaaataattagaaaaccaggatctgcaaaagtccaatcaggctttatatgtacaaacagaaaaggcgctgtcattcaaccacagtctgcaagcaaagtcaacatatttacacaagctcagggaaaattaattataccttgtcctcctcctcaatctacatcaaatattagaagtggtaaaaatatacaagtgtctcagtgtcaaccagtaactcctgaaaatcctcaaaacattattacacataactcttttaattcaaaacatgtgcttccaacagaacacagtttgaatcagtggaatcaggaaagtagttctccactctcaaatgcttgttctgacctagtcactgtgataccatcactgccatcatattgttcttcagagtgccaaactttcgcaaaaataaatcattcaaatggcactcaagcagttgcccggcaagatgcgacattatattgcacccaaagaagtcctgtttgtgaagaaagttatccgtctgtgactctaagaactgctgaagaagaatcagttcccttatggaaaagaggtcctaatgtcctgcatcaaaataagagggctacagggtctactgttatgagaagaaaacgaattgctgaaactaagcggagaaatattttagagcagaaaagacaaaaccctggatctgtaggacagaagtacagtgagcaaattaataattttggacaaagtgtcctgctaagttcaagtgagccaaaacaaactacaaggggtacttcttatattgaagaagtttcagatagtacttctgagtttttgatggctgaaaacttagtgaaagcatcagtgccggaggatgagattctgactgtcttgaatagcaaacagatacagaaatcaaatctacctttaaataaaactcaacaattcaacatctgcacactgtcagctgaagaacagaagatcctagagtcccttaatgatctcaatgaaagactacattatatacaagaatccatttgcaaaaacccatccatcaaaaatactttacaaataataccacttctggagaagagagaagatagaaccagcagctgcagagacaagagataattccagcagaatccgtctaagaagacctttcatgtacttctctaggactagatgcataccgttttgtgaaaaccagccataggaaaacatgtgagcaacaacccccatgaacatttgtcctaactcagattttgtgagcagtgaagtttaacagagcagtgacatttaacaaagcagtgaagtttaacagagttctgagaataccatgaaagacattatgcctgcctaaacaaaaagcaggacataacctagctctgaatacatgccacaaggatgaagcttgtgagtagagcaaacaaacgtttttccaaagaattcacagtgctcctttgcaatttatagatttcatgttgaaatatatgttaaataaaatttctgtttattgaacctctttattaaacctctaacttactgataagatgtttatgaagtatggcatattttgattttttaattgtaataaatattcttaaagttaccacatcccacaaaatggcccttggtggcagcaatagagcaaaggttacctttttgtatggtgaagggaggccttcctatggctgtacaattacatcgattcttccaaatttcatatttcatacatggcactttggcataccgaaaaaacatgaaatttttcattaaaatgccatgaatcaagccagggccgttggcttatgcctgtaatcccagcactttgcaggccgaggtagacagatggcttgagctcaggagttcgtgaccagcctgggcaaccctgtctctac

SEQ ID NO: 473 - DNA, 4055 bp, Homo sapiens
tttcaggctcaggcagaatctgttctagacctttcttccctacttactctccctggacaatttcatggcttccatttatatattgatgactcccaaagctaaacatccacctcacccctctctcctgagatccagtcctagcctatgtagcaaacctgctggatatctcatgggcctctcaaactgttcttttagctatcctcaagctttccacagcaaaaggagctatattctctcataatagttgttcaaaggctctcacatataaaactctggtcccagaccttcatggctttgccttcctttaactacattgtatcctgaggcctagaataggactatgagctgggactgtgtgattttttttccatggcactgatgttggtaattatgggcttagacacttatttaagtagatgcttataaatgtctaagcccgtaattaccaacatgagtgccatgaaattgaatctaagacacttaagttcaattcaagaaacctttcctaggcaccctttctgtgcaagacctatgcatgatgctgggcagacagaagaatcagatatggcccctgagactgcctgaaggcagttgacatggactgggatagcatttgaaatcattgttgatcaccagccttggaatcagacaatcctgggtttgaatcactgttaatagttttgcggtatgagtgaattcctaacttatttaattttgagtttcttcatctgtgaaatggagataatgatatatctcagtacagttacatgaagtttaaatgaaaaaaatgcgggtagtctaacaaatgatgcctttcattatattcaggaagtaatcacgattccttatgagatgtcctcctgtttcctcaatatggattatatcaagaccaccttctggtttaaagaaagcctcctatgagtatagagagtaaatggcgaggataaggaacattccacagaacaaagggaaatggctaaggctgcatagattccaaaccacagctttgccagcactgtgttcaaaccaactgacttagttatgaaatcctggaaaactaccacctattcatagtaccccttgggtaaataatttaggctctctgaacctaaggctcctaatctgtgcaatgggagagaagagtttggaaatattcccacctcatagaataatcatgaggattacccatgaacatgttattttatgtgtacctggcacagtgttgttggtgtatgtgagttctctctgattatacctactcttccaaagaggaaggacaaatgcgtccctagtcatcagagctgatctaacagaaagaacagggagattggagttgtaagttttggatctagtcatttgttcatcattcattcgctaaagacttaagcatctactcagtgccctaccctgtgttaggtcttattagggatatagagcaagtaataacaccattgtcccctgttcttatggaaatgacacactcctggggaggcaagcaccagtggcatgtaaaatgtaaacttacttgaaacttacaagagggccatgtgctgctctgtgtttggatccaagtgcattaacaactttaggagctagaagggagaggtgactaggcttgagcacccagagagaggcagcttactgcaggaggaggggcacaggatggactttactaaatgggatcatcttattcctccactaattaatgaagtggccttgggcaggttacttcactaatcatggcctcagtttcatcatctcagaaaagaatttcagtatttttgtgcttaattgtatagggtagattttgagaatcaactttaaaaatggatagaagaatacactgaaaacttttgaatcctgcgtaactggggtaagaaccacaggatgtaatgaccagaagaactttcaagcccattcctttattttataaatagagaatctgaggctgagaaaatctgctgtctctacttatgggggctctgggtctcatatcctttagtctccttagggatcttctttatcagtcatcgctgttcattctcaatcattgtcgcattagttacgagcttacagtgttctgtaagacagtatgagaaagtgcttagtacaatgcctggcacatgcttaagtgctcagatggtaacttattattgtaataatacattttgaatccttaacatagcttacaaaatccttaatggtttggcccctgcttacctctccagccttattgttaaccactctcataagcaccatgccaagcttcttgtattccaagccatttcaagccttccttccttcctggttccctcttggattgtgaagttccctttcttatgctcttacagccccatgtagccagttttatcataggaatgacatgctgcattaaaatgttggtttttgtgttttactcccctactggactgtaaatcccctgaggacaagaactgtttcttctatgtgtctctggcccacagtaaatgtacactaaataggacagaaggaaaaagtgaagggaaatgattggcgcaaggttacaattacttgtattaccatcctcagcaagacttgataattgggtccagagtattgaggtgaggttggaaatggggaggtaggtcctgggctcctggaatgacctatgaggctgcataagagagggctcttttagtcgctgaagttgccttgctttgattcctctccagggaagttccagatgcaggtcctaccccagtgtggccatgcagtccatgaggatgcccctgacaaggtagctgaagctgttgccactttcctgatccggcacaggtttgcagaacccatcggtggattccagtgtgtgtttcctggctgttagtgacctgctgtccacccctcctcaacatcgagctctgttgtaaatacgtcgcaccagaggccactgtgatgccactgtctcctctccatcccgcccagccatgtgacactggctcccggtagacgggcaccccgagatgtaccaaccttttcatgtattctgccaaaagcattgttttccagggcccttgaccaacatcggcttccccagtccagggctcccctgctcctttcccttccctgtactggggtagctcctgcctgctctccctgcgttgcctagggtaaagcctccagatttgccatactgagcccctcttcctagcatcaggcgatacatctgagttcaaatgtcttcccaggctcagggacctccattccttgagattgtcttggcatggcccagccctgcctcatgggatggacaatgcatggggtggtctttatttttccctttcaaataaaacactagtcaggtaccgttttatcccagtcgtactcttccaggtttggaagacccagagaggccaagatcccatccttagccatagcgagcggtggtggtggatagcatcacaagaaacgagcctgaaaatcaggtccagccggtccaagcacatggcctcccatctgggagagcccactgtcccactcccacatgtctgggcacctgccctgggctgaggccaggctgctccaggggcctcctgcgccctcacctgccacagagcaacccaggttaaatacagcccatgcacaaagccacaggccaaagcctatggaattgtttttaatcatcaaatttaaccattttcataactggttcctggaggtgtgcagtgcccccttgcctcttcaaacctacagcttctctttgccatttgtggatttcacatcactccacacagaaacattacagcctggcatccccagtctttgccttcttccagctgcctcgacacagcactgtggcctgtccctattgcccaggcacgccatttccaagggcaggaaggggcagtgtcctgaagcccatcttttctgtgactgtcttaggtgatgtgtagccccctccacctttccactcaacaacctcccacccctgtcctgctgcatggtccggagtctgggacctactttgttttttgttatttatgaccttgtttaaagaaaataaatatctcccaaccttt

SEQ ID NO: 474 - DNA, 2885 bp, Homo sapiens
ccacagtccaaagtctcatctgagacaaggcaagtcccttccacctatgagcctgtaaaatcaaaagcaagctagttacttcctagataccaacaggggtacaggtattgattaaagacggctgttccaaatgggagaaattggccaaaataaaggggttacagggcccatgcaagtccgaaatccagcagggctgtcaaattttaaagttccagaataatctcctttgactccaggtctcacatccaggtcatactgatgcaagaagtgggttcccatggtcttgggcagctctgcccctgtggctttgtagggtacagcctccctcctggctgctttcacggctgttgttcagtgcctgcggcttttccaggtgcacggtgcaagctgttggtggatctaccattctggggtctggaggacggtggccctcttctcacagctccactaggcagtgccccagtagggactctgtgtgggggctcccacaccacattccccttctgcactgccctagcagaggttctctcccctgccgctgagagggcctctcccctgcagcaaacgtttgcctgggcattgaggcatttccatacatcttctgaaaactaggcggaggtttccaaatctcaattcttgacttctgtgcacctgcaggcttaacagcacatagaagctgccaaggcttggggcttccactctgaagccacagcccgagctgtatgttggcccctttcagccatggctggagtggctgggacacaagacaccaagtccctaggctgcacacacatgtcaggggctgccctgacatggcctggagacattttccccatggtgttggggattaacattaggctccttgctacttatgcaaatttctgcagctggcttgaatttctccccagaaaatgggtttttcttttctattgcatagtcaggctgcaaatttccaaacttttatgctttgcttcccttatttataagggaatgcctttaaaagcacccaagtcacctgttgaacactttgctgcttagaaatttcttccgctagttaacctaaatcatctctctcaagttcaaagtttcacaaatccctatggaaggggcaaaatgctgccagtctctttgctaaaacataacaagagtcacctttactccagttcccaacaagttcctcatcttcatctgaggccacctcagcctggactttgttgtccatattgctatcagcatttggggcaaagccattcaacaagtctgtaggaagttccaaactttcccacattttcctgttttcttctgagccctccaaactgttccagcctctgcctgttacccagttccaaagtcacttccacattttgggtatttcttcagcaggtcccaatctactggtaccaatttactgtattagtccgttttcacgctgctgataaagacatacccgagactgggaagaaaaagtggtttaattggacttaaagttccacatggctggggaggcctcagaatcatggtgggaggcaaaagacacttcttacattgtggcaagaaaaaatgaggaagaagcaaaagcagaaacccctgataaactgatcagatctcatgagacttattcactgtcacgagaatagcacgggaaagactggcccccatgattcaattacctccccctgggtctgtcccacaacacgtgggaattctgggagatacaattcaagttgagatttgtggggggacacaaccaaaccatatcagcatcctttcaagaatattagataattggagctgagtactcaggaacttgactgtagtagaataccgctagtttcttaattttaattcacatcacctgaaaagtaaaacaacaggctttgccaagtggatgcttttcagtaacagtgaagtggagtgaataccaaatgtttgccctggtggttcctatctcttcaggcaaacatggtcagtattctgtaaagttcccctggcctaaatgattacttgctctgggcaagtggatatttattaggctatttcaaagccacagcataagaatgtcagcctagccacagagtctgagattctgagttcagcctagccacagagtctaagattctgtatcctctgacattttggaaatgatacactactggcttaagtgatgactctttcagattttcagtattttatacaactactgccacatccttatactttattgcttttctgtcttcttcaacctgggagagaccctgaatttgagtgtgttctctaatcaatagtggtttagctttcttttctatttcactcgtttctagggttttttatttgcagtttaggaactactaggaatgtcaggactttatcagcaggggtaaaactaccacctggcctagcctaagtaggaagtgaaaagataattcaccaaacaatgattaatcagatagaagttctagtcaagagggatattgttgaagttacctcttttagcctagatacatggattcttttcaaatcaggaaagattagaaaaggaacccaaaaaaccctttaacagtgtgaatctttatagtatttgaaaatgagaagaagcagcagattgtaatttggtttattggatgtgatggacgttctgtaatagaaaacctgaaacgatgattgaatgggaaaaagagactacaaaatttgtcgtaggatgtatacagacttattttctttattacagtattataagaaaacatatgtatttgtaaaaatggtttcctgtgtcaagtatttgtgcagtcagagctgacttgtaaactattcttgtaatagctcattattttgaaagatttatatatgatgaattctggatatatgaccaataaaactgatgaagc

SEQ ID NO: 475 - DNA, 3729 bp, Homo sapiens
ttaagatgtaaaattgatgcagagacccaaacacctgagtgggagaaccaggataagaatggaagtgaggatgctgtggagacccagacatttgagaagaaggacaagaaagaggctggagaggaggatggggaagagatccaggctcaaggattggggaagcaaggccagactggagatgagaatggtgaggagacccagacaccacagtgggagaaacaagatcagatgaaaggtgatgcggatgtggaaattcagatggaagaggggagaaacaaggatcaggttggaggtcaggatgctgcacaaacccaatcatgtgggagggagaacgtgggagaagtaaaaaaagagaatagtgtagagacccaggccttggattggggaaaacaggaatgtgttggaaatgggaatgttacagagatccagacaccaaggtgggagaagcatgatcaaggtggaagtaagaaagctaagaagacccaagcatctgggggagagaaccagaaacaattaagtcatgaaattcaagtggggtggggaaataagggcctgagaagagatgaagatgctaaggaaacccagatagctaccaagaagaagctcagggagataagagagaaggattgggtggtgatccaggcactatggtggggaaaccggagacaagtagcaagtgaaatttatagagaatttgagatactatgttgggagaatcagaactggattggaggtgaacatagagcagaaattcaggcatcagagaggagagaccaaagaaaggatggatgtgaggatggcacaaatatcctggcacccgaggctgagatccaggaacaattaaaaggtgaaactgatgtggagactcagagcaatgagccacttagagaagaggatggtacagacattcagtcactagggaggagagaggttaaaggtgaggatgataaagacacccaggaacttgggaggaaaaatcagggtcagttaggaaatgaatttagtggaaagattcacataccaaaggggaagaatcaggaacatattagaggcgaagatggtgcacatacccagatatctgagtcagggaactggggcaaattaacaagtcaaattgatggagaaatgcattcagcagaatggaagaaagatcagcagattggaggtgagaatggggcagaaattcagatacaagggaagagaaacctgagagaagttggaggtgaggacggtgtaaagacctgggcacctgggaaagaaacccagagtcagtttagaagtgatcttggtagaaagatccttttatcagagtggaagagccagaagcagatgggaagtgagaatggaacagaaattcaggctccagtggagagaaaccagagagaacctggaggtgaggacggtgtaaagactcagagacctaagagagagaacgaggaccagttagatagtgaaattggagggagccattcaccagggaggaggaactgggagctgattggaaaggatgttgcagaaaatcaggcatcagagaagagaaaccagagagaggttggaaacgaggacggtagaatgatctggaggcttaggggaaaaaactggaggcttagagcgaagaaacagactgttaaaaagtaaagataatggaaagacccgtttatcagagtggaagaaccaggaacagggtggaggtgggaatgatgaagaaattcaaatacaggggaagagaaacctgagagggaccacagctgatgatggtacagagacccaggctcctgcaggagatgaccagggacagttaagagttgaaattgatgaagagatccaggtacaagggcaaggaaataagaatgacggtggagttgaggatgttgcagaactccaggatataggaagccagagaaagtgcacagatgaggatgttggagagcctcgagcaccaaggggaggaaacaaggatctggtcagaggagaggatgctgtgagggacagtctccaagtcgactgttctgggagtgagaggcccacaggcaggaagcacagcctaccatggcctccagccttcactggctatggatgtgggacccgggaacaggaacaggcagtggctgtgaatggtttcatctctgccccctgtcctgagatgaatcctgtcccccactggggtgaagtcttcctgctggtgggtggggagggagagcatctggccagccagggcacaacccctgccagggatcatagagtggggatcagtccagcctcccagcaggcccaacctgaatcctggagaagacgacaaaggggcaaaggggtggatccagagaaggcccccagcctgactcggcagtcccaaaaccctccgtctctgacagctcccttgggcatgccctctgcctgctcctgtctcccgtgtggcccagccccggaagctgccatcattctagcgggtcctcccaccgccctcactgtcctgcccaaggggacaggcctcaagaagagcaaacgactgctcctggagtccctcatgcggaggaggattgcacacctgaagtggggtcttccccggcggatcctggagtcctatttcctttttaacttcttaggatcttgctcattgacccttgctggggcgaggctctctggactgaacacaggccaggagctccaagcccagcaggaaaggtattgtgaggcccaaggctccccaccaggccttaagtccccagagaggttccagagggttcagcgcccagacagaaaaagctcgaaacttcctatacaagccagagctctggagaggaacagaccgcacatgtcagagcccattaagcatttccatccagcctgaaaaggccaggagagtcaggccaccagggggcgccagagaaccacaggagatccaggaagcgcttgctaggaccaagctcccagctcccaggacccccaggccggcagcggagtccaggagctggtgtggcccacaaagggtcggagagcctcccagtgagaacagtaggggcaggaaaatgatcaggtcaagggtctcccagctggcagagagggctcccagcagagtgaggacttcattctctagggcagaccacgcccactggaggaaggaatgtacatcctgggaggcctctaagctccccagactcaaatgccagcagctcacatactggagaagaggaagcctggaatctacagggtgcagaggggctgggcagcagccttcctgccattctgcagaacctgtcagcttcaaagggaggctccactctgcggtggcaaagctgggcctgacccttctggccaagatgtcctggtccccacagctcgccaagcgcaagcacttggcccctaacctgagcctgagggaacctgattctactctgcctcccaaagtgggtgatcctcgtgcaggggaggacagcatcggagatcacactgcttcacagagggatcttcagctgcaaggtcactgctgtactggggccacccttcctaagacagagagtccccagggccaggaggcacctgggaacccaaatggggctccacagaatacacgagcctccaaaaagtttagtattatgaagcatctgaatttttttctcttccagaatggctttaaaaagtagactcaggcccagagtcctcaggacatatcagaaaagctttgagagtgtcctgatccctgcaaagcctctaataaattggtcatttggg

SEQ ID NO: 476 - DNA, 2402 bp, Homo sapiens
agtagcatcttagctgcttccggccgctggtcgcagggctgcgggactacaatcttcgcatgaaatggaagagagggtggtgcggatagcttgaggaaggtacggataccttgagggaggtatggatacgttgagggaggtacggatacgttgagggaggttacggatacgttaagggaggtacagcagcggtgcgcgccttgcagggcatgctgagaggaacagttttttaactgcttctggctgttggtggcagagctgcgggactacaatcccagtatgctacgggagtggggatgatgctggtcccttgagggggggggggcagcgcggtgccctcctgccgggcatgctggtaatagtgtcttagctgcttccggccgttggtcgcagggctatgggactacagtctcagcatgcgcagggttcaagggtgttgcgcagccccgcagggaggggcagggcggtgttgacctctgtttccaaacccatgctggctactgaatctgtgccacccctggctaaggggagtgagtccatagagggacttgaagggcaggtctgggctgggcagtgaggagagtatgatactgcaaagtgcgcctcgcctttgccaaaatcggtcgggtctcaggctcaccccacctcccgctgctcagttccgtttccctccagagcatcaagcttcctcccgcccagggggcctcctgctttcctaagctgctgtggaatcggcctgaggtcccagacgctgtccattgtgctgctgctctctgctttctccagccagagtgccagttcatccgcttttgggagaactccgccgcctggcctgcccgcggaaaaggtcacagctttgcagggggtgacatgggctatggcttcctggaaatgtcaccctcactagcgccttttagatagatgtgaattttgagacatgagggagagtaattattggtttacccaggagatgctaagagcagaggagaaaaccctaatttccaggcatgtgtcctgagccagggacaggctggccagaccctaagcccccagtgccgccagagagcagcctactgccctgatttgtgtggaatccccttcgtgctgctgggccttagcgtcagggacagcccagtcaggtgaaggtggggatgacccatgggcttctggaagtgggttggtggtcctgggagggccagcccatccccccttggagagggtctttgtgctgaaggatgcccacagaggcctgggtaccaggaacactgctctaggcaaggtgcctttcttccagatttggctgaaaggaaggaagacttggtcagcttttccacccagccatctggcccttacagggctgctccccatggacctgggtttgtagagtcctccagggctttgtgtggcccactagttctgatactgaggacacccctgcaggctgttaatttcagaacaaggggtgtgtgcagactggcgcatgggtgctgtcagggtaccccaggctgctccagggacggtaccccagtgttcaacttggcttggggccccctgcctcatgcccttactccagggctgcttggcctgggcttgagccatggtccagaactcaggtggccccattgccacctaatataagggcctgtctccacagtgggtgagacgcccctgggcactgggctcttcagtcatccagggctatccactccatggcatgagttcccacattcagctgaactctgtctggctctggactggggtccctcctgtgccctttccctgaatcctctctgggtccgagacactgatcctcttcactctctggcttaaggcttgttctcctgacctccttggaggggtgctcaggattgaggacccctgctgttctctggggctgttggtactcggaggtgtgggtgttggcttgcactgagaagtccaaccccttcagtgcccttcaggggtcctttaagagcaggagtgatagggtgtgggggagtgccttagaggggtcttgccctcatcccctgccctgtctctgagacgtgtccagtaaacctgaggtcagcacctcaggaatgaaataatgtcttttgcagcaacttgaatgaagctggaggccattattccaagtgaaataactcaggaattaaaaatcaaatgccatatgttctcacttataggttggagctaagccatgcatatgcaaaggcatgcggggtgacataatggactttggagactcagacatgagggtggcaggtggatgaaggatgaaaaaactacctgttgagtacaatatatactactcaggtgacaagtgcactaaaatctcagaatccaacactatataattcattcatgtaaccaaaaaccacttgtacccaaatggtattgacatt

SEQ ID NO: 477 - DNA, 2338 bp, Homo sapiens
ctacgaagccctgtctaacattccctcatgtcaggtagaaggaattagaccagaggtcaaggcagcggctggaatcagtggtgctttctcaaagtaggaaaacagttttaggactgttttcggtcaaattttgggcaccactgtactgggttctatgacagagaagccaccaaggtcccgtgcgaggagccctgggcagggacagctgaagctgtgcacctgggccctcctgattgcctcccaccagccaggcctggcagcagccagcagccaccccaccccaccccaacaaggagagctgccccacactgtcggcccccaaagctcaggacacacgggccctcccaggtctctctggcgggctaggccttggcagggccccctcagcgggccccactctgaaccgcaagcacagggtcttctgcagtgtgagacctgctgtcagcacaggcctacgggctcagggctgtgcagggacacaggggccagcaccactgggcaccctgtcctttcccagcctgcctgtgcaccctgtgggcagtgactcctcaggcacagtggcccaaagtcacaggtggtctgtcaggggctctccagggagctgcacacactcaggtttagatcaggaacagaacagatccccagggcatttgctcaggctcagagcagagcagggagccgtccacctgcggcgggcacatccatggacttccaagccaacagggacagctgcccagacgggctgcccaagccaaccaaggatcctgtcccatcggtccctgtggcttgggagtctggcactttttggctttcgtttctcaagctgccccagcttctccaagtcctgagcctggggctcccagctccgagcggatgctctgcaagtggcgtccctgcaccctggtgcaggcggacggacgcgggagagcctgcaaggaagtaaggcccagcagccttcccgggcttggaacgccgcagcctaggaagcatcttcccaggaaatcgcagtcggagcccagcacggggtcttggaagaaaagaccccaccttctatcctcacgagtacgcattaggagtgagcaccgctcagtaggtgacacagaggcacagctgaggacccagagacgggcacaccagaaacagcgacatccacaggcgctcggcagggaccaggaacccagaaggcttgacgcgcagggggtctcggagaaactctacccctgtccttcccagcctcctgcttagctgggcctcaccctagcctgctggagatggcggccatgccgtcagagagggggatggacagattggctgaggtcaccccacaggccagcagaggcctgggtgggagtgcgcagccccgcagatggctgcttatggggcccagaggccacccctgcgtcgcagagggcaccagcacacccggacttctcggaggcttcatacagctcccaggccctacaagcagcgtgtgggcagaggcccaggccccttcctgtcactcagagaagctgctgctgccagaaaacggggcgccagcctcccatgaacactgtgtcccaaccccggtcctctcaggattcctgtgtggaaatgtcacttctgtctcagctctctagggtgcacctggtgtccagctctgccccctttctgcttaagcagctgctgggagaccctgagccaggccgccgaggttctgagctcgtaaggggtgcagcagtttcccgcacagcgtggggagcacatttgctcacgtctcccaggctggctgtacactctgaggccagccctgggctctgacactctcccgattccgctgggctttctaagccctcctctcctgtccactgctggcccatggcccaggcccagccttgaagctgtaaagacctctcaccccatccaaatgagactggtcagatatctcccgcatgtcagccgccactggattgggaaggacgggcagtaggtgcaaggctggccctttttatgagagttatttaaaaaacaaaaacaggtcaggcacagtggctcacacctgtaatcccagcactttgggagactgaggcaggagggtcacttgaacccaggagtttgagactagcctgggcaacatagtgagaccctgtctcaaaaaacgttaaatgaaaacattagccagctgtagtggcacatgcctgtagtcccagcttcttgggaggctgagatgggaggatcgcttgagcccaggaggcagagggtgcagttagctatgatggtaccactgccctccagcctgggtgactgagagagatcctggctccaaacagaaaaataaaaacagaaggaggaatagatg

SEQ ID NO: 478 - DNA, 2854 bp, Homo sapiens
aaaaaccttgattctctcccttgaaaaacagggacgatgatagcacctccctcagcgggctgctgtggtgaggattcagcaagataatccacgaggcttccaggagatgaaggatgctcagtaaatatttgtgatgattattcacagagatgaacctaaaagctaaatgccacgagtgactggctggatgttacaatgtctggggaatgcttcgcagcctgacccttattccagaaagttctgtgagtatcctcatgacctcactgaacgtcagcgccgactgctcttacttaacaggggagagccacagactctgcagtgcgtggcaggcagggcctgtcactgtctactgttgtcgctgtggctgtagcagtggaggtggccgggccttctttcccacctccccttcttccccatggtcagccccgctcccaggctccgtctgtgcccctgcagctccccagcggtggcctttttgttcagtgcttcctcggcggctgggactcaccctgatttaaaagctccagacgtgttctcggcagcccgggagcacaggagtcaaagcaagaccaggagcgggttgctgagaggacgccacgctgactggggatcgagagggtggcttccttcaaacagagaaaggaaaaagccccttgaaccaatctgaatgtaaaatccaaaagctatggccaccgcgaggaaaacaacagtcatgatgcgggccaggaggccgtcgccgtgggaatgcagtcggccctgcgcatgtggtgtctgagcagggcccgagaccttccagggaggggagagatactttttggctgactctcctgactctgtgtttcctacaattctacaacaaagatccaggaacatgagaaaaggaaaatgagaaaatgagtcctgtgatccaaatttaagccaagaacaggacaggcaatgtgagccaaatagaaatgaggccaagagtgctttcttggggccccagcttttttttttcttttttcgaatgcccaaacctgtttaactgcttagtgtgaactctagttctgggatacagttcactatgggaaaggaaatttaattagcactggcgacctcaccttcattcttaggtcaatacagtaaactggcatatgaatagtgatttctaccaattgattcctgaaggaaaagagagagaaaaggagagaggaagacacacacacctacacacacacacacacacacacacacacacacacacagagacagagacagagagagacaatgaggcacagagaaacaggcagagacagagagacagagagacagagagaggggaagagagacagagaaacagagacagaaagaaagagacagacagagaaagagagacagagaggcagagagagacagagaagcagagacagaaggtcagacagagaaagaaagagaggagcaagtgacatactttaaaaattattcttgagagaggtcaacctgcatcagctgcagaaatcaacaatcacttggcagtgtcagctgtaatacattcccacattgcattctgcacgggcattgactatcttgacccacactctctatatcatgttcacagtaacgtaagtggtcagatttctacaattaggccttgcaagataataatgacaagccgtattcgtatattgctttactgtttgcaaagcagttgcataattatcattacgtttggttcctcatgactgtgctgtgaggaaggcgttcctgttcccattttagaagtgaggacacaaagttacaagtgtccaagccagaacctgatgccaaatcccatgacatttctgccgtactgggctctgccatgccctgggaggatggccacctgcaaacacaacctttctcctaacagagagagaaactgagacgcaagctcgagtagcaacttgatggaatggcacagtggggaccactagctcttagaatacgtcaattttgattggctgaaattgacaggagtatctaagacaaaagatactccagaaaataaagggatcggggagggatgatggagaagtgaccttacggttatcatgaaaagggctgtgtgtcaagacagcattacacctagtgggaattggaaggatttagctgtactttatgtctcagaatgtgctaatgtgattacctcatattagctattatgtgtgccctatgaataatgtcatcccagtgcttctgtagaataggagtggagctgcaggcccttcaaaacaatcctaggcagagtctgagtaatcctgcacatctgaatcaccagcaaaagacaagtttcaatttggattcagaaaatacatgatgcaaacctttctcagccctggaagggagggaaggcatgggaagaagcaggattggactggaaggactggctgtctttcctgcgtgctctccctttgacctgcttggcacaccctgcttccaaaatggcccatgtggttgacagtctgcagggatgtgaatagaagcccaagacgtcgggctcggtgcatctcgaagcagggccgcagtcttaagcacaagacaggcacattccgctcacagcatttctttctagtctgagcaaaatcttcccacaaggccaaaatcccaacggctggacatgaacagggcgtatatgtttttccccttccaagctcttttgttgcattttattgtttttcctacctagatattaggctgtctccttgatgcgaaacatccttcctttctagaatttccaggaagcacaattgcctcccacatttagatttaatgtaattcaaaccaaagtttgaggctatttctcctaattcaggaaaagctgtgagcttggcaaccc

SEQ ID NO: 479 - DNA, 2409 bp, Homo sapiens
agccgcagccggagcccgagccgcggggcgggtgcgaagatgcacacgacccagaaggacacgacgtacaccaagatcttcgtcggggggctgccctaccacaccaccgacgccagcctgcgcaagtacttcgaggtcttcggcgagatcgaggaggcggtggtcatcaccgaccggcagacgggcaagtcccggggctatggatttgtcaccatggctgaccgggctgctgccgaaagggcctgcaaggatcccaatcccatcattgatggcagaaaggccaacgtgaacctggcatacttaggagcaaaaccaaggatcatgcaaccaggttttgcctttggtgttcaacaacttcatccagcccttatacaaagacctttcgggatacctgcccactatgtctatccgcaggcttttgtgcagccgggagtggtcattccacacgtccagccgacagcagctgccgactccaccacccctatgcagcctctccagctgctgcaggatatgttactgctgggggctatggctacgcagtccagcagccaatcaccgcagcggcacctgggacagctgccgccgccgctgcagcagctgctgccgctgcagcatttggccagtaccagcctcagcagctgcagacagaccgaatgcaatagaccagccatctgatcaaagttgaattgttttctctttccctcccaattttccaatttttagtagctaataagagagttaacattgacttaacagctttaaaaaaaaaaacagccatgctattgtgaagcagagttattattttttttatactccaggtagtgttctagatgagaaagaggtaagaatgaggggaatgggcacaattttggaaatcaatcccaaagagcctgagtaaatgaaaggccactacgaaatgacgccaggagtaacaacggaacttcacttttgtaacgggatttttatttttgctctttttatagtatcagggaagcaaactgccttttacaagttagaaaatgctgtttgaatctagttgaaccagggaatacagagcgagcaatatgtagcttgaattacatttaaaagcagattttttacaaacaaaatggcgaaagcactgattgtcatttttagcagtcacttaaggcctatagaacttttttcaagtcggaaggtcctgttcttactatctcaaaaatgggcatcgaacaatcaatctaggagcgtggcggtgggtaaaatggtggacaggcaccaaagctattttctcatctgtcctgtggatgagtggaactgtggaacaagtgatgtggaattaatgggtgcaacagctgtacagacaatcaataacacacacagttctggaaagaacacatcacttgtgcttgtttgatgagcttgtcacattctaatccctctccccatcctgtttcaattttgggaaacttgtatctgctggtgtcagcaattctgattctgaaataggatcaggcttttactacaacagccttctctttctatttattgtgtcgactcgtggcttatgaataaaggcaggcaaagtttgcagaactgtcttaaggacatttattttttttccctttttaagtaattttacactttagtatctatttcagagtcatatttaaaactatttattagtgactacagtacatgagacaacaaggttactgagattacaattcttcaaaggttaatgataatgtggtttatactgtgccttaatagtaatgctatttaagatatttatttttaagttttactatgctgcactctaaagaaaggaactttagatgtgacactgtaaaattatgtattcatctcatggcataaattatttagtaagtctagatgtagcgtattaaatattaacctattcaactaaagatgttgacttggatttatttaaattcatatgtgcactgtataagagagtactcttacattaacacattttagtttagtttttagatttttttttaaacgatatattgctagtttcatgcttcctcctctgattttgcctgtgtagatttcatttattggtaattcattagtttaacactattatgtagtttttaaatgctgctttacatttttcttctgaaactgcaatacttgcaatttttattcttaaactaaattgaatactattttacactgtattggatttttatacttgaacaatttcatacaagggaagacaggttagcatttttatggactttctccattatcactggatttattttaagtattcccatactagacagtgttatgtaatgtagacatgactctcctgtgcaaattatttattcgttgtgtatattgctttataacatttcagatcttctaatctattcacttgtattaaatataattttt

SEQ ID NO: 480 - DNA, 2210 bp, Homo sapiens
gaggctacagctgtgcgcagtggcgcggctgctaagtagcagcaggtgggagactagggtctgcgctcgcggcgaccgcggaggagggtgggcgcctgcggaggtgtcctcgctcacttcggggggcccagagtctcgggtgaggagccagccggcctcgcgttccctcggacggttgcccaatggcagcccaggtggcagcccgggaggcgcgagacttcagagaagccccgactcttcgcctaacctcgggggccggcctggaggcagtgggcgctgtgttgctcgaggaggaggaggagaacgaggaggaggcggcggccaggagagcgcggagtttcgcccaagacgcgcgggtgcgcttcctcggcggccgcctggcgatgatgctggggttcacggaggagaaatggagccagtatttggaaagcgaggacaaccggcaggttcttggggagtttctggaaagcaccagcccggcttgccttgtgtttagcttcgccgcctcggggcgccttgcggcttcccaggaggtaagaggcgacgggcaaggggacctgcccatccaacaaaactacccaggggagacagcccagtcgctcccctttggattcccgcggggcgctcactcgggcactttaacaaacctggcttgaagtccccatcctgaggcccgcaggactcctccccacgtgcacccactctgcagttcagcagctgcaggttagtttcctaagtcagcagtttgtatctgaccgagaatcccgcgttgagcctgttcgaccaggataacccaagaacaccagcgctttctttagctgcttgggtgttaggcgcaaggtgggctttctgtgccaaaaaacttgcgtttcagttgctcttgggtcactctggagtcacatcctttaaaaaatgtggtgtttggcagagcgcatataactcgtcacgtattttgattacgtgccaacaacacttcaccccaggcgaaaacattaagtccttaaaaaggaaggcccctgcaatctccgcacacatgggtgtttactgaacatttagagggaacagttccctcctttcttctttttcttccttttctttttgaatttcgatgatttgtccactaaaaggttaacgtatcacctaacgtacagcacttgtatttagtatttttcaagtatgatgagtttggagcaagattcacaatttttaagtagcgcaatgctcagtttaacatgttatatcgttttatcactaggtgtggtcattgtaatagttgggaaataggatctcagagaagaaagagtaataggaaggctgccttatggtattgtgaattttgaattcttttgttttaggactctcctaattgtaactttaaagaaaataagtttgtcagtagacaaggcaatagaacacaactctagtattacctaagttaaatagttattataatgttcaatggaatgactcagtagttgtggaaatgttagcatgttttggttatacggttctattctttgatagaaatacaaattaacctcttgggcctgtctttatctcaatttggcttatttccaaaccagagaagagtataaaaaataaccctttaggattgaaacattctacatgcctacgtgctccttatttgtttttagttataagattttttttttggtgtataatgaactggtataattggcatgcctttaaaaggtgatatttccacaccagtaatgctgtgaaattagcgttataaaagaacaaagaaaactgtatactcgctgcatactagggaagagccgtagaaggaccttgtttatagggcaggcaagatgccaggttttgtttcttctgctagcaatacagctacaagttggatatagtaaatcctgcttgttaacaagaaaactacttgaactaattatcttgctcttgttttagattccaagagatgcaaaccataaacttgtttttatttccaagaagattactgaaagcattggagtaaatgacttttctcaagtggttttatttggagagttacctgcgttgtctcttggacatgtatctgctttccttgatgaggtactggtctgtctttaatatttaaagctttcacttatctccatgacatttggaattatttaggacaactccgataattaaaaaaagaagagctaggaggggaagggaaggggatgggggtggtt

SEQ ID NO: 481 - DNA, 2623 bp, Homo sapiens
aaaatgtaacaagcattggacccgaaatgagggagcccagctggggtctttgggtgaaaagtgtcctcaacctcttcaaaagcagaggtgcaaatggtccccaggcagcgaggcaggcaaggcttctaggtgaagcccccggcccccagagaggggaacctcttcctgtgatgggtacaccgggatgtttaaccactggttttctgggaacgagatgcaaaccctggctcagcatagggccaaagacgctgacaagaggatttctcactgtgagagaagtgagccaccagatagagaggacactcaaacagccccgtgcagaggccaatatagaaaggataaaatagccagcatcaacttaccggctttgtaagagagcctttataactgaatccactgccccggtcaagccttcagatgactgcagctctagcctacatctggctgcaatctcaggtgttcagatcaagggaaactactctaagaggctacacttgaggaacaacaaccaaggagcttcaactgcatctggatttcaggagtctggaaaacttttcttttgagctattgacagcctttaacaactgagtaaagtgtactcctgtgaacaaaattcagagcctgtttgtttctctctacctgatttctccagaatttggaaactatttgtgagtattcttaacttatggaaacatagttatttgcataagtgcaataagaatctgttttcatttgtaacaggacacaattggaaaaactggttattttaccaaggcttttactggaatggtgtgctttcttttaaggaatcaaacttgacttatagagccaataaaagccccttggaaacactggccttatacattgtctacacagtctctgtgtagggttcctaacctgtgagtaaagaatgtcactttttaacagtcccaggagcccccaagttatcttgggacctgaataggaaaggaatttacccaataatagatatttgagtgtacaaacccatggctgggctcagcttcagaaaaaagtcttatctgagattccttatagaacagagttccatcaaagccaatttaaaaagcctatgtgaaaaataattattcttgctgcactttgtatgaataatcaggccaagtataataaagtaaatcagtcttacagtgatttgtctttagtaaaaatgggaaactggagagagaaaaaaaattgtttcaagaactatggtacaactgttactagattctagtctcattcactgtttttgaatttttttctgcaatttagactgactcttcttatttctgttaaccaaccagtgatctctggctgctgctcagaagaactaagaaggatgggtaatataaaatccagatcaatattcttattctgggcacatattggaatcagctaacaaccccatatcagtttggttccaacaattgcccagttcatggaaagcctctaattttgtttatttgggatgattttgcttattttgctttactattgtggaatatattgctgttgtactctttgtgtaggaatgtaggatatgcttgctgaatgttttcttaaattgaacccttattcctcttccaggtaccatcttttgttggaactcagttacaaataaccctcaccataccagcactttctgaatgagctcctctctaccctgaaggcaaaagacccaatagttaggctggaatattatcacccctattcagcctgaagaagttacagaaaatggatcttcatctgtctacaacccttaggattaagggttctcttataatagggaggggggaattgtcagaggcatttgaatcaaagcaactccatttcacacaggggctaagtgaaataaggctaagacctactaggctgcattcccaggaggttaagacattctaagtcacaggatgagacaggagagcggcataagatgcaggtcagaaagatcttgtggataaaacaggttgcagtaaagaagccagccaaaacatcaaaaccaagatggcgacaaaagtgacttctggtcgtctgcactgctacattcccgccagcaccacggcagtttacaaatgccatggcaatgtcaggaggttgccctacatgttctaaaatggggaggaaccctcagttccaggaattgcccacccctttcctggaaaactcatgaataatccaccctttgtttagcatataaacaagaaataaccataaaaatgggcaactaggtgtgcaccactgctcttcttatggagtagccattctttcattcctttactttcataataaacttgctttcacttaaaaaaaaacttgacccttaccttatgccatctataaaaattaactcacaatgaatcaggaggtattcctttttcctgactgcctttgaactgggacatcatttttttccctgtcttcagacttgaactgaaacatcagcttttcttgagtctcaacctgctgttctttggactagaactgcaccattggctctcttgggtttccagcttaacaactgtagatcttggaacttggcagctttcataaatacatgagttaatttcttaaaataaatatattcatatgtatgtatataaaatac

SEQ ID NO: 482 - DNA, 2145 bp, Homo sapiens
acaccaccctgcagcaggcctggccaccggcctcagcgcttctgggagaaggtcagccaggtggaagatggagagggcttctggactgagccctggaggggggctaggggccaccagcaggcagatgagccctgggacccagctggccaacccacctgaccacggtgacaaggactgcttgggaaggataagcccaggttcgggaaagcaaattcaggctgcaggacagctgcccgggccccccacaagcctggcaccagcccagggaagactgaggagcctcactccatggggactgcaaacacctgaacacagcgaacctgaaggtatagggcatcttcaggctgctactgaggcggtcctgccgcactcaacccagaacctcatcactaaaaggaacctcatggttcaggctagagtgcagtggcgcgatctcggctcactgaaacctccgcctcccaggttcaagcaattctcctgcttcagcctcccaagtagctaggagtacagacatggtctcactctgttatccaggctagagtgcagtggtgtgatctcagctcacttcaacctctggctcaagtgatccccccacctcagcctccccaagtagctgggactacaggcacacgccaccaggcccagataattttttgtattttcagtaaaaacagggtctcgccatgttgcccagactggtcttaaactcctgagctcaagcgatgtgcctgccttggcctccccaagtgctgggattagaggcataagccaccatgtctggcccccagtggcttctaatccgccctatctatccatcaagcctgggtggggtgggcttgctcagtgtccttcagattccttcatcaattaactcttttgtgtacgagggtgtcccaaaagcagcagccgcgagtagaatttgccttgggtcattgctgtagtctcccgcatccaggaaagatctaggccgctcgctttccacaaaccttctggctgaaacaagccacttacctggctgcagtgaagacactgatgccgctactgaagctggagtcacaggaaccatctggacctcctgggagaggaagaggaacaaggggtcatgaaaggctgttggctctcttgaataaacaagacccctgtgacaagcacacacagaactctccagagccccataccttgattcaggctcttcaaaaggaccatggctctggagccctgaggacccaaccaacgcccagtcattctcgatagtccccaagcttgtaagtctgtagtcacagtgatctcacaaggaggggacaccagtgctaaacacatctgtcaaatctcagaagggatcactggcctgaggggaatggatgtttaaaatgacagataatacccagcatccttagctatcaggaaaatgcaaatccaaaccacaagatactactgtacacccatcaggatggctaaaataaaagacaaataatagcaagtgttgatgagaatgtggagaaactggaaccctcgtacattgctggtgggaatgtaaaatggtgcaagctgctttggagaacagtctggccattcctccaaaggctaaacatagtcaccacatgactcagcagctccactcctaggtatatgccaaagagaaatgaaaacttatggccacatgaaaccttgtatatcaatcatgttcacatcagcattatctacaatagccaaaaagcagaagcaacccaaatatctatcaacagatgaatggataaatgaggtgtggtatagccatacaatggactattatttggcaataaaaagggatgaagtactgatgcacgccataaaaatgaactttaaaaacattgtgttaagtgaaagaagccagtcataaaagactacatattgtatccctttctcgaaagtgtttagaacaggcaaacctatggagacggaaaatggactggaggttgcctaggactggaggagacgggggaatagggtataatggctaatggattctttcaagggcacggaaaatattctaaaattgattgtggtgatggttacataaccctgtgaatctacaaagtcactgaattgtacacttgatgttgggtgaattgtgtggtacatgaattctatctcaataaagggctt

SEQ ID NO: 483 - DNA, 3318 bp, Homo sapiens
gactgctaagagggggttaaagggggacgatgtgaaggagagaacctgtggtccttcagaaggcgaagaagaaagaaaggggaagcagtgaagaaagggacggagatactgggacagggagaaaaaagttgtggagagtagcttttaaggagtcatttggtggccatggatccaacgtgctcttctgagtgcatttataacctcatacccagtgacttgaaggagcctccccagcctcctaggtacatatccatttttaaggcaactgtaaaagatgacatgcaaaaagctaaaactgcaatgaaaactatgggaccagcaaaagttgaagtaccttctccaaaggatttcctaaagaaacattcaaaggagaaaactctaccacccaaaaaaaactttgatcggaacgtgcccaaaaagcctgctgtgccattgaagactgatcatcctgtcatgggaatacagagtggaaaaaattttataaatacaaatgcagctgatatcatcatgggagtggctaaaaagcctaaaccaatttatgttgataaaagaactggagacaagcatgatcttgagccttcaggactagttccaaagtacatcaataaaaaggattatggtgtcacacctgaatacatatgtaagcgaaacgaggaaataaagaaagcccaagaagactatgatcgttatatccaggaaaaccttaagaaagcagctatgaaaaggctctccgatgaagaaagggaggcagttttgcaggggctgaaaaagaactgggaagaggtgcataaagaattccagtccctctcggtctttatagattctataccaaagaagatccgcaagcagaggctggaagaagaaatgaaacaactagaacacgacattggcataattgaaaagcacaagattatttatattgccaataacgcatgataccaacagcacaactttgaaaactgttaagtattttgaactggaaatagtaacacgtgccttcttgctactctaaactgtctccaacacattgtttctgagctccacaaatgcaaaagatgtattttcctgtggcccatgacatttgcagttattcccagtgagaaatattttcagtattcgtaacactgtatatgatgaaaggcttctatttggaggaagaaaaattaagaagacaacttacaaaatcaagatgacaacttataaaggcatcattgaggatgattaaggagaatagcctcctttctagcataccaacctcgatactcttattttattccacaactcactatgcatatcttatttaaatgtttttttccttttggtcctttctacttatctattttgtgaattctaaagttacatttgtaagattacataatctattaagcaataagtttatgttagtagagctgttttcaacccaaaaataagaaaaaatagctctaaatatctaaaaggaaaaggttattttatgaaattttaaattagaaaaatttggtaaaatatatgcaactataaaatatcagagaaataacaatttctactgcttacactggtttttatcctctggacaacataaaaaacaaaatatgggagtctttcaggcttttttcacaaacacagaatttggaagccttatagaaaagcttattttggttacttaaagaaaagtagtttatatacaattattttttgaaaattcacttgaaacttgtccatatgagtatctttattcctttattaacttagggcagatataaaataaaggataatatatgacaaattctcacttaccaagaatggttggttgctatttagggtaggctaacagctgtgacagtacactccaaaatgtataattacgtaaacacatattcaattcttgctaacatagcagtactttgctgtgagcaggtcagcaggaacccttttctgcagtcactcagggacccagacttacagagtgggtaggatgcatctgatccagagttagggagaggcacgtacaggccaggcctagaaatgatgcatatcattcccgtttgcatcgctaagtaagcaacttaagttgctttaacaaactaactccaaatctcagtttcctgataaagatacatttttcatttacatcactgtgcaatgtgactaagggtaggggtataagtctgttccatgcagtcactcagggacccagtctccttttgtctggtgactctgttgatccaggcagtctttctctgccaattcaggatgagatgtttaggtaagtattttatttgtgaaatgattgctatacatactcatttttaaataattcaaaatcagtagcaatgcaaaaatattctgattactttagccttatggatattatgctttgaagtcatgagtgggagttgccttaaatgttaaaatgaaaactttgtggttttaacagctaattcttttgctttctgtaaatgtctactaaagaatctagacttttctctatggtctacagtgttgtcctagatgaacattgttgcctttctttcacagagccttcagagggaaacattcccatccattgttcctggaaaggtgatccctaccacgggatcccaaacttggatagagccagttcaacctcccccaatccatacacatacatacctaggtcatcctatcacccaaaagagggacaaacatctgacttggacagctgaccagtgactgatcagattctctctctcttgagagcatgaattaagagacatggagactgcagtcacttgggagtagacacctgaaactaaaaagtcaaacttcattatgcagctagtttgacttggtttctcttcctgttcaaaggaagaatgggtagaataaagatttgatgtggtctggccccttgtctatgatctttttagcttgatttcttgaaatgctgcttcttccctacccactgtaactggcattcccatagtactgaggtactagagacctctgagatctgcacacatggttccctccacccagaaaactgcccttttctttctctcatcctacatagctgcctggcaaatccctagtcttcatcagctcacatcacatttccatgacaatcccctttgattcctcagaatctggccttcctttatagcactggtcatattgtattgtgcatatctggttatttgcctgttttccatgaacatttcaagcttatgggggagaagacactgtatacattttcatctgcattccttagaatctgcataacagctggtatagagaaggtactcaaaaaatccttaatgaataaagtaatggatcgtaccc

SEQ ID NO: 484 - DNA, 3723 bp, Homo sapiens
tgcttaatccgtttctggaggaagagtatgacacccacttgtgatggggtccttgtgcggtggggaccggggccggcgggctccaggccagcacacctaacccatggatgtggaacctacggccgagaaggaatgttgcatgagtcggatcccagtccattgtcagtggagggtgagggtgaccccatctgctatttttgtgctcatcctcatacaaccatttggggatgtgcctattagggctccgtaagaactcagatgcctgggaagcccagcccctcaggtgcccccacacacagccttcccttgacgcctacatttctaggcacatgtgaggcatctttcctggagccccgagccagccctgtccctccccagtgcagcatggcactcaggagatacaggctggacatggggcagtcgttctggggaggcctggcctagcagccacccacctgagccctcccggccaggcttcgtgctggggtgggccatgtgccaggacaggagggtcccggcggaaagccagccccggactcatcgtgacattgagatcccactggagggtaggggtggtaataaacttctccctctcctcctcccgctgcagccctccaccctccttccctgcagctctactcttttctttgtagccctcctccttatccagccctccacccctcccctggcagccctactccctccccttcctcctcctgtctgcagccttcaactccctcctcctcctatacttctctccctcatcttccctcaggacccagccctaatgccagcaccccaagccttcgctgacccttagcagggaagctcccgactgggtgcacgcggccgtgcccaggaactctggttcgggcctgctgcagggctcgtttgcctctccagcggtggctctcaggtgctgcggtgccgtggccaaggagccacacaagaaggcccacgacctgtgtccctcagctttgtgcatctgcttctccgggacggggcccccttgagggcaggcctggtggaccaccctgtttcccatgaggccttgcacaggccttcctgtggacactggacacgggtgactgaacctgaagtgtgagatgtttctaagatctcatgaagtgtgagatgtttctaaaatctctacatgggccgaccacaacctgctatcttctgctactgtgtgccatgctagagctcccctaccctgggaacaaacgccagggtgccctgcggcccggctctcctcggttcccctgatccatccagggaacaaacgccagggtgccctgcggcccggctctcctcggttcccctgatccgcccagagaacaaacgccagggtgccctgcggcccggctctcctcagttcccctgatccatccagggaacaaatgccaggtgccctgaggcctggctctcctcagtcctccgatcgggtccagtccattttcattcatttcactttggtctcctgtctgtctgtgcctctgggccaaactcattgcagggccatggccccgggcaggccccaccttcctgctttctgatgcagcgatattcttccctttttaggacctcactctgtcgcccaggctggagtgcagtggcgcagtcttggctcattgcagcctctgcctcccgggttcaagtgattcttgtgcctcagcctcctgagtagctggaattgcaggcgcctgccaccacgcctggctaatttttctatttttcatagagatggggttttgccatgttggccaggctggtctcgaactcctgacctcaagggatccacccacctcggcctcccaaagtgctggaattacaggtgtgagccaccgcacccagctgacattctcctcttaaagcctgtctgatgccagctcaggccacagggcacattaggcttctgacaaagctggaggacaaggccccctcgcatgccccatcctctcctcgcccccccctcccccgagtgcctccttcgaagccctgcctccctctatcatgccctccccccacgcagcctcaagaaacatgaagaggggacctctggggtggtctggcaacgcctgcctggtggacagcagatgggagagaaggaaagcagccggtaggagaagagacagaggaaaggggaggaggaagcccatgctcaaggtgcccctcctgcccaggcttcctgccagatgcttcttggatcaaatactttgttatatttccagcacaagaaagtgatgttacaaacactaagagaattcagagaaacagcaggatttaaagtagcacacagagatctttgtgcatactttcagttcaaagacagagtggaagagatgacccatttttaacagcaacaaaaagataaaaatccccatgcgtaaaaggaatgtgaaaccctaaatgggaaaaactttaaatagaccataaagacaccaaagtcgattttaacaccaccatggtttgaatgaattccccaaaagttcatgtgttggaaacctggactccaatgcagcagtgctgggatgggattctggggaggtgattggctcatgaggactaatccattcatggactaatgggttctcagggagtggagcagttatcaccagggggctggttataaaagccagctttgccgtctctcatgagaccctcacataatgcccggcaccacttgagactgcagagtcttgaccagcaagaaggtcctcaccagatgcaactcctataccttggactccctgcctccagaactgtaagaaataaaattcttttctttataacttacccactctgtggtattcagtcatagcaacagaaaatgaattaagacagaaagaaagaccatgttcctggataagaaaactctcctaagcaagacaattctacaaaagtaaatttataaatgtaatgtaatccttataaaaacgccgcatgcttttccccagatctagaaaactaattataaagttcatgtgagagaggaagtgcacaggagtgtaaaaatagccaggaaaactctgcaaaagaaatggagaggtcctctgcccccgaaccatctcctggcctccgtaatggaaccacatgacaccaggacccatgtaggcaagcaggcccagggacatgaaaacccggggacagaccccagtgcctagaacattcagtctataaggtagcatatgataccggtgaggaaaggatggacttgttaatacaagtggttaaacgttaaccacttggagaaagacgaaaatgaatctgcacttcataccatacactaagacaaattccaaatgggtcaaaagtactaggaaaaagtgaattccttcatcaccggggagtgggcaaaatcttcttaaatatgacttaaaacccaggagtgataaaagacaaaatgtatactgggaaaaaagttttataacatagcacattttcaaagtgtcggtgacttgagtgggaagcagggcagtgactgtcggggactgagggtggggggatggtgttgaacgggcgcggggtctccttctggcgtgatgaaggctttggaagcacacagaagtgatggttgtacgttatgaatgtattaaatgctgctaaattgtagactttaagagatggttaaaatggtgaatttttttaaccatctataggactctgataaaaatgttgttttatgtatattttacctcaataaaaattataacttaaaatgag

SEQ ID NO: 485 - DNA, 3244 bp, Homo sapiens
ttgggaagacatccggcatccgtaaaatggagtaatgattccgaccctgcaggttttctgggaggattaaatgagttacattttaaagatgcctggtacatgcctgccaggagaaggcacaacatatgaactccctccctcttccctccacccctcctcagctcctgtgacatcaggagggacctgccctgccctgctcacagaggctgggtgggaggctcccatcatggccttcactgaggctgcctctgcagttggaccaagctggacacacagcggggccagcaggtcttcctcaagccggacgagccgccgccgccgccgcagccatgcgccgacagcctgcaggcggggccagcaggtcttcctcaagccggacgagccgccgccgccgccgcagccatgcgccgacagcctgcaggacgccttgctgagtctgggctctgtcatcgacatttcaggcctgcaacgtgctgtcaaggaggccctgtcagctgtgctcccccgagtggaaactgtctacacctacctactggatggtgagtcccagctggtgtgtgaggaccccccacatgagctgccccaggaggggaaagtccgggaggctatcatctcccagaagcggctgggctgcaatgggctgggcttctcagacctgccagggaagcccttggccaggctggtggctccactggctcctgatacccaagtgctggtcatgccgctagcggacaaggaggctggggccgtggcagctgtcatcttggtgcactgtggccagctgagtgataatgaggaatggagcctgcaggcggtggagaagcataccctggtcgccctgcggagggtgcaggtcctgcagcagcgcgggcccagggaggctccccgagccgtccagaaccccccggaggggacggcggaagaccagaagggcggggcggcgtacaccgaccgcgaccgcaagatcctccaactgtgcggggaactctacgacctggatgcctcttccctgcagctcaaagtgctccaatacctgcagcaggagacccgggcatcccgctgctgcctcctgctggtgtcggaggacaatctccagctttcttgcaaggtcatcggagacaaagtgctcggggaagaggtcagctttcccttgacaggatgcctgggccaggtggtggaagacaagaagtccatccagctgaaggacctcacctccgaggatgtacaacagctgcagagcatgttgggctgtgagctgcaggccatgctctgtgtccctgtcatcagccgggccactgaccaggtggtggccttggcctgcgccttcaacaagctagaaggagacttgttcaccgacgaggacgagcatgtgatccagcactgcttccactacaccagcaccgtgctcaccagcaccctggccttccagaaggaacagaaactcaagtgtgagtgccaggctcttctccaagtggcaaagaacctcttcacccacctggatgacgtctctgtcctgctccaggagatcatcacggaggccagaaacctcagcaacgcagagatctgctctgtgttcctgctggatcagaatgagctggtggccaaggtgttcgacgggggcgtggtggatgatgagagctatgagatccgcatcccggccgatcagggcatcgcgggacacgtggcgaccacgggccagatcctgaacatccctgacgcatatgcccatccgcttttctaccgcggcgtggacgacagcaccggcttccgcacgcgcaacatcctctgcttccccatcaagaacgagaaccaggaggtcatcggtgtggccgagctggtgaacaagatcaatgggccatggttcagcaagttcgacgaggacctggcgacggccttctccatctactgcggcatcagcatcgcccattctctcctatacaaaaaagtgaatgaggctcagtatcgcagccacctggccaatgagatgatgatgtaccacatgaaggtctccgacgatgagtataccaaacttctccatgatgggatccagcctgtggctgccattgactccaattttgcaagtttcacctatacccctcgttccctgcccgaggatgacacgtccatggccatcctgagcatgctgcaggacatgaatttcatcaacaactacaaaattgactgcccgaccctggcccggttctgtttgatggtgaagaagggctaccgggatcccccctaccacaactggatgcacgccttttctgtctcccacttctgctacctgctctacaagaacctggagctcaccaactacctcgaggacatcgagatctttgccttgtttatttcctgcatgtgtcatgacctggaccacagaggcacaaacaactctttccaggtggcctcgaaatctgtgctggctgcgctctacagctctgagggctccgtcatggagaggcaccactttgctcaggccatcgccatcctcaacacccacggctgcaacatctttgatcatttctcccggaaggactatcagcgcatgctggatctgatgcgggacatcatcttggccacagacctggcccaccatctccgcatcttcaaggacctccagaagatggctgaggtgggctacgaccgaaacaacaagcagcaccacagacttctcctctgcctcctcatgacctcctgtgacctctctgaccagaccaagggctggaagactacgagaaagatcgcggagctgatctacaaagaattcttctcccagggagacctggagaaggccatgggcaacaggccgatggagatgatggaccgggagaaggcctatatccctgagctgcaaatcagcttcatggagcacattgcgatgcccatctacaagctgttgcaggacctgttccccttggcctgagccccttacccattcctgcagccagtgagagacctggcctcagccctggcagggctctctcttcaaggccatatccacctgtgccctggggcttgggagaccccatagggccgggactcttgggtcagcccggccactggcttctctctttttctccgtttcattctgtgtgcgttgtggggtgggggagggggtccacctgccttacctttctgagttgcctttagagagatgcgtttttctaggactctgtgcaactgtcgtatatggtcccgtgggctgaccgctttgtacatgagaataaatctatttctttctacc

SEQ ID NO: 486 - DNA, 2232 bp, Homo sapiens
aaatgctaagagacttttatgcttctcaatatccagaggtaaaagaattttttgtggattctgtgtcacaattcaacaattcttcctttgagaaaggagagcagcgcacccggaagaaatctgataaaagagaatctcttataaaaccaaggctgtcagattctgaaaccttgtcatttaaagattctaccaacaaaatttctcaagtttgcagcctaaaaacatataaaagaaaatcagttaagtttcagaatcatatttcctatagagaagaggtgttttttaatgatgcagaaactaagaaatcacctgttagttctactcaagagattgacagtgggaaaaacagccaggcatccgaagatactgtgacatcccgttctctgaacagtgagtctgaaacacgtgagagaaggttagaaaataccatgaaagaccaacaggacctcacaagaacgggcatttcaagaaaagaaccccttctcaaattggaaaacaaaaagatagaaaatccagtgctggaaaatacttctgtgataagcttacttggtgatacctctattcttgatgacctttttaaaagtcatgggaacagtcccacacaactgccaaagaaagttctttcagggcccatggaaaaagcaaaacagagaccaaaagatttctgggacatcttgaatgagcagaatgatgagagtcttagtaaactcacagacttggcagtaatagagactctgtgtgaaaaagcacctctagcagcaccctttaaaaggagagaagagccagcaacttctctttggaaatcaaatgagaaatttttatggaagaaatttagcccaagtgatacagccaatacacagagtaccacataagcatataaatgaattaccgcaccagtaaactgctgccatcactgtttacggcactggattccacactgattctattatcttgaacacagttgttgacatatatttttattaaattattgctttaggattttttgaagtctaaagtattgtcatggatctgtttttcttgatatttgatttgatctttcaagaatatgattgtatttatagtataaacctctgttatgaattagaaaagattctaggtttgttaataggagacctgggacatctttcttactatattacataatgatgtgacacttgccccggtgagcattgtttcccagtatgaaagatgaagagtctgtaccgaatcagcatgagtgtccttccagtttaaaaaagctttgcttcgctctcctaatggctcataggctgaatcatgtctgcccctcaaatcaggtgtataccaatgtgttttttactagcacttgggaaagttattaagtattttctttttccctgggcatcatgttctattattattttagaaaaaagtcataattggtactgaatatatggtatatataatattaaaatggtaattttgcaacagctcaaaattaaaaggttaatgttatacgctttactatatgagctgtgattactaccattagccacagataccagtgcctcaactttttatgtacctattgtgatttaatgtaaataaaggtttgtatagtacttttgtagttcttaagtatgaagaaatgggtaaactttttattttgttagaaactgttatattttgagtgtaatatttatggtttatagcaaaatgaatgtgcttattgttgaatgcatgtatttagaagcctttactcagcccctgtgttctgtgctaggagcttgagctctacaggtaaggcagagctaccggtgaatgaaaggaaatcatgtcagtgaaaaatcatggtggaaagcccctggcatcacatgtgcatgctgtaggcaggacctgagctgcctccgctgcaggttcagatgcaccgctgcagctgtccttcagttagttcacagggctgcaagaggaggacacatccctccagaaaacagcctgagccgggaactggctgtgctaaagagcactgctatcaagttgaggagagagggcttccgtgtactcaggatgtagagtcattgctcagaagtgaacaaaaaatcaaaaacaaaagtcttctcaagggactgatcggccaagtatgcttttctttagagcaatgttttgccctagagaattgtaaaatttatgtcatgactcagtacatatgtgttcgtacatatatgattggaataaaatgtttatgaaatattt

SEQ ID NO: 487 - DNA, 2681 bp, Homo sapiens
tttatactaaatctcatttttattccaacattttactcccgctcggtgagtaccttctcagtggcattcttgtcctattcttttttttgtccttttttttggttttttgttttttttgtttttgttttttttctttttttccacttctttgattattgtttatatttgggaaagctggaggagcatggttttgagccttttcctgaatccaagtttttctagcatgcgatcgttctgtagacaaggcgctgtgtctcggagtccgcggcgaccgtgcccgctgggagcgtctcccaagtccagcaaaatgtgcaactggttttatggaaaaagcgatgtgaagtatggtgcctatttttttcctttgtaaaaataaaaagcatgtttctaactctttttttgcatactctttttctgataacatttttgtataggtgggatttacggcagtgtttacaagtttgtggtcttgcaatactggtgcaaaccactgagcaaagacattaattttatattttttgtgccctttttggaagccggtgaaaacaaattcgtttttttccctcctgtttttgatacccattgataacatgaaacttttcttacagctggtgattgggatcatttttaagcaaaatacttttttcctcctttaaattaactatgacttttgcacatttgacttttttaaaaaaccgagataattttatgatagatatcctgatatctatatctatattgtcccttatttctcccccttccctccccgtaattcaattttcaaatgatggcagtggaaggtttttctggaaaaaaaaaaaatgaagtgcggtttggtttccttgtcaacggaggatgaagtgaacagctgagcagctcgcagagagcaggattaaagcaaggagagccaatcatgactggcaaaacacagaccagcaacgtcaccaataagaatgaccccaagtccatcaactcccgtgttttcatcggcaatctaaatacggcaattgtcaagaaagttgacattgaagccattttttcaaagtatggaaaaatagttggatgttccgttcacaaaggttatgcatttgtacagtacatgagtgagcgacatgcaagagctgcagtggctggagaaaatgccagagtcatcgccggccaaccacttgatatcaacatggcaggagagcccaaaccatacagaccaaaacctggaaacaagaggcccctttctgcactttacagcggttatgtctttgactatgattactacagagatgatttctacaatcggttatttgattaccacgggcgtgtgcctccacctccccgtgcagtaattccgctgaagcgtcccagagtggcagtcacaacgactcgcagggggaaaggagtcttttccatgaaaggtggatcgagatctactgccagtgggtcaacaggttctaaattgaaatcagatgagttacagaccatcaagaaagaattaacccagatcaaaactaaaattgactccttgctagggcgcctggagaagattgagaaacagcagaaggcggaggcagaagctcagaagaagcaattggaagagagtctagtgctgatccaagaggaatgtgtgtcagagattgcagatcactctacagaggagcctgctgaaggagggccagatgccgatggagaagagatgacagatgggatagaggaggacttcgatgaagatgggggtcatgagctgtttctacagataaagtgatctgaaataacgcatgatgccgcaaagcagaaaagagaaactgtgacaacccccagaaatgtgaaaggaggtttcttactggacagcagcatctttggttcaatttatataaaaacccaaataaataaaatggacagtattgctcagttttagaaattccatttcttctatgttttaagctgtacaattgtcaggtttttatggtttaaattgtaaatgtgttttcccctttgctaattatgttttttttttcagtcttaaaatgtgaaaggcatttatgaatggtaagggagacactatatacaaatgtatatttgtaaaagctatttttatgattagcatgtttcactgttgatcatatataaagtcaggtgatattgcaattctgtatttaaagcttatttccaacaatgtcatgtaagaaaagatgcatcttatgctagtttttataatttatttataatttatagtttaaagtacttcagatcataatgataaaatacttgaaaaagttatatttctgccctgtataagcaccctttttattaataaagaatgcagatatttcagatgtgatataatagttaaagaactgttggtttgatctgtgattaagttgagcatgctccgctctactgaactaaatgatccaattattacttcagtctggatatgagattccatggacaagtaaggactagattgccaaggaaaagactgtcttgcccttggatccaaaagtttaaattagtgcatacatcatgtcatttcacctcctgttcctaggaactctccattcccaagcattgccagtgttttccagataatcttagctgttgtcttgtgctgtggaaatggaagaaaccatcttcacagactgtaggagaattcaacatataatttcttaataaatactgtttctttt

SEQ ID NO: 488 - DNA, 3453 bp, Homo sapiens
acgtgtcagagatcacccaggaggtggcagcagaggtctgccgggaaggcctgaagggactggagatgctggtgctcacggcgactcccgtcacccctaaggccctactgcacttcaacagcatctgccggaacctcaagtccattgtggtccagattgggattgcggattatttcaaagagcccagcagccctgaggcccagaagctgtttgaggacatggtgacaaaactccaggctctgcgacggaggcccggcttctctaagattctgcacatcaaggtggaaggcggctgctaacccgggtagggggcggcagggcccctgccagccccacaccagggcactctctttggacctcagagggaccctggtttggactagacctttggaggccgagtgttatccctggcttctggagggggactgtcaagtctcctgtcctcctcctggagcagcagagcaacaggcctgacccagggcactgcctccccagtacaggggcttggacagaagctgccctccgacccccaccctaccccggctggagtagcctctggcacagccagtgaggagctgtcaccaccagcgcctggtgtcatcacctggaggatctgcaataaccacccagtggctcctcagctgttctggctggcctctccttcctgaggcccagcctcctggtcaggagcatctggggccccaagccaatgggggctccacaaggcagctcagacttggcaaggagggctcttctcctcaaccttgctgcagccttctgggggcaccccttcagacagcctgcccaggctgtggatccacatttcctgggggtaccacagccagacctaggggcctgggcacgtggtcagccaaaagctgggggcagcagtacagtggggtagtgggggtgggtttggaaaggaaacagtcacccagaacttctccccaggatgagaccacccttccaaggtgggggattgccagggggagaaaacttatttattgctgtaagacaggacccctcctcccaacctcataccccaccgcacaccagagctaaattcaaagctgaaaggcgcacgtttctatacctacattcattcctgagggaccctccagagggtcaaggtcccagccccaggcagccctgtcacagtgagaagtagttcctgtccttaaggaatttccttctaatccaggtgcttgggcaggaacccgatggccttcgggtcaccaaggctgtctgggagggaggcacagggccgccctctgtgctgaggccgtggaggaagccaggaggagggtggcttgctttgcttccttgtctaattagcttgcttgaagatgtggccttggcagggagccagacccatggggccaaggaagaggaagagcatcctcaatagactcactcccccttccttggtctccacgggccccgtggactgagggctgcattggggtcttctgcctaggggaagtgctggacctgagctggagccacttggcttagaagccacaggattcacttttcactggcctttgcagtccccaaaggatcaggtctcagaaccaaggctccaaaggctgaggtctccccagttcctcctctcagaactcccacagtagctcagaggccgggggtcctgccaactttcatttggaaagttctttcgaacatctaaactagatctatcttagggtttctttctctcctagataggatcagctcccagccctagccattaggctgctggtcctggcgggggatggggtcccctcgttacccagtccttcccagggacccaacttcctaacacaacctggcttggacatgaagaccctcccccaggttaccttgtaaagagtcctccagagctgggatcccatgggcgcagcagcacacccagctcccatggcgtcactccctagctctgtcccagcttttgctatcattgctgacttttcctcctgtggctcattctgtccctgccctttgaaaacctaaaataccaagggtgtcatgctggcaactccctgcccagtcctgcacaaagccttggctgtgtgtggcaccccttgcctcctaccccagagcagctggctccattggcttctccctgcaccagccctgtcctcaggggtcaggaaaaagcagcacagctttctttcctctcctccagaggcctggaagggaggtggaggtccagtaagggcctggctgccttggatttcttggtcctgccttgccaactgcaccctgtagctcctgctccctgtgaccccagaaccagaggtgctgccttccctgtctcctagacaaagcacaaagggatgccctgcttggcttgagcctgcccaactgaaggattttctctgccccagggaccttccatccctgaatacaaggctctaggcaacttctctctgggtggtacacactagaatgcctggcattagccctagaaaggaggttggggtgtacgggtagtgagctagggtgggagaaaggtggtgctgaaaggacagatgctagttgtagtttcactcactcattcattcattagtgcaacagtactgagcaccacctgcactagaggcagaggggtgaacaagatacccttctgcctggggggatgtccacttcccatgggtttggctatttccaggaaagcccctcagtcctccaccctgttctggctgtgtgtgaaggatgtgtgtgagcaggcccaatcctttgcagcaagaatgagaggtcagagtattccattgcacacgcaccctggggctgacagacttgtgccccctagccttcatgcatgcccaagcactggcagctttgcagcccctgccccaccagccccttgacgctcttcttttgttctctcctcggggatgagctctgctgctgagtagggagcttttgcttgctgggaggctctatgcatggatttttttggtgaccatacagctagggctgaagatgggaacagggacagagggcctggctatccctagaagcacttcatccatctttacccacccaaacgggatcccttcacatctcatacccagtaagatgcaagaaaggaatatctgagagcaagcagccctgctccaggggccccaggtatgtgtagaggcccagtgggggtggccacttggtgtttctaccaccccctgccatccagtctggccccagtacctacctgggaggttggtgtacttggcttaagtacttcatgctttattcaggctgcttccccacagcaccggcaggaaatgaaggtgcacttatatgcatccctgcaggaataaagagtgggtggcctgcccagcccagcaccacggcctttccccagccaggagagaccacctaaggatcaaggcagctcctgttttcttggttctgtgacactcgagtctgagccagcccctcaggaattgcctc

SEQ ID NO: 489 - DNA, 3509 bp, Homo sapiens
tgcgatgagttcgcacatcctcctttagctcagagaagtttgtcattaccgactttctgaagcctacttctgtcagctcatcaaagtcattctccatcctgctttgttccattgctggcgaggagctgcgatcctttggaggagaagggatgtcaggtttttggaattttcagcttttgtgctctggtttctccccacctttgtggttttatctacccttggtctttgatgatggcgacctacagatggggttttggggtggatgtcttttttgttgatgttgatgctattcctttctgtgtgttagttttccttgtaacagtcaggtccctcagcttcaggtctgttggagtttgctggaagtccactccagaccctcaaacagggatttcttggtgttgcctattctctcccatgtgtctaaatcaagggagaggtgtatatatgctttcttcctatttgttggtagtatgttggctagtatttttgcaagaaaagaaattgaaaaagtaaatatattatatcaaaatattgggaaaatggggcccttaatacacaagatctgtgtctgcactgcgtcaagaactctcttcacttgaatgctgcatgtaaaattcaacccaatttatgcaaagtagttgaagccctgtgtcagttctctgtgctgcaagacatgatggtagtttacagggagagtctgggtgccctgagttggctcatctgtggcaaatgtactgagcacacgctgcccatttttgctctgtccccagagcagtcaccctccaccctgtatttagaaggatagttttatttctcttgaaggaaaaatgcctttggtttctgtgaccactccattctgtctcccatcagatcatctgggaggttttgttgtctaatgtctgttggttaaatcttctatcatccctgtcctgcctggctcatcaggaatctgcaggagtctgaagaggaggaagtcccccaggagtcctgggatgaaggttattcgactccctcaattcctcctgaaatgttggcctcgtacaagtcttacagcagcacatttcactcattagaggaacagcaagtctgcatggctgttgacataggcagtgagtactccattgtgaaggtgataaagctccagttcatggcccaggtagaccccataatctttgggccttgtgccccttgttgggctgagatttgccatcactgtgggctgaacctatatatcaatgtagatttcaatcactctggagtcgagtctgaagcacaggcatggggtgggtcagtgagctttgctctcttcctagtctcaggccatgcccgtgccaacctggactgactgtcacgacattgaactcaaggcaggtgtggcaaactcacaccaaactatgtagcacatgcccaggagttgtctgtcagatcagctcatctgaattaaatgtctcttgccagctacaaaattccttatgagttttgttcccaaagcatgtctgtgtggttctttacctgcccaaggccagtgtcacccttgtctacctctcagtgaaagatgtgacccaggtttcactgaatttattcccattttctgtgtcttctaagttcgcttgttttagctcatctgtccgtcatgttcctggtatgttttctagataaatggctgacttttcacccacaaaagccataatagctgatgctactgtgtagaaccaagttacattttgactcaagagctggttcattgcaccccctcatcaaatctctgtgtccacaatctcataaactatcaaattctgggtatttgatgagagaaagcttaatattgaagtatctctcctatgaggtgttagaactatttgcctacaatttattggggaaaaaaatcgcgcatttgtgtacataaacctaggacagagcacatagggaagataacattccaacacaggggaattttgcccaaggctcatgaaagaacccaagccagttttctcaagacttgacctcaggcctactggaatatttctctcaaagtctcctgttctcacactgacaagactgatgtccctgtgttaggattggacagaggaatgtttctgtgtgcaaggaaggactgcttaatgtaagagggcccatctgaatttatttgcaggacatcggtgggatcaagtgaaaaaggaggaccaagaggcaacaggtcccaggctcagcagggagctgctggatgagaaagggcctgaagtcttgcaggactcactggatagatgttattcaactccttcaggttgtcttgaactgactgactcatgccagccctacagaagtgccttttacgtattggagcaacagcgtgttggcttggctgttgacatggatgaaattgaaaagtaccaagaagtggaagaagaccaagacccatcatgccccaggctcagcagggagctgctggatgagaaagagcctgaagtcttgcaggactcactgggtagatggtattcgactccttcaggttatcttgaactgcctgacttaggccagccctacagcagtgctgtttactcattggaggaacagtaccttggcttggctcttgacttggacagaattaaaaaggaccaagaagaggaagaagaccaaggcccaccatgccccaggtaactgagcaattgtgaacagctacttctgtgttgacatctggagactcctggttcagggaaaacagagcgggctgacattatcgattacatcttttcaagcaagcctgaattattcctactaacattgctgttggttttcattgcagtagatatttaggtttctatttcttcctccccttatcatttactaacctactgtaggtggaccagacttcaaaaactctattctcatggcgactgcatggaaatttgagcacattttatggaaaattattgagctcagtcttttcatgatccctgtatgctgtgtgtcctgagggcactaactcagagtgtcctgttactccctcatcagtgtgtcatctggacaattcactgagctcgttctctgtgtgtgtgtgtttgtgtgtgtgtgtgtgtgtgtgtgtgtgtgtgtctatctgtctttctctttcattcttttccatttggccccgttgtgtcccaacatgaaggcaataatttgttacctcattaatggatctatccttttagttttttaaccacttccctatgctacccatgaaacctagttggggctctgttgtgtctgatttcccctggcttattctttactttttcctccttttccaggctcagcagggagctgctggaggtagtagagcctgaagtcttgcaggactcactggatagatgttattcaactccttccagttgtcttgaacagcctgactcctgccagccctatggaagttccttttatgcattggaggaaaaacatgttggcttttctcttgacgtgggagaaattgaaaagaaggggaaggggaagaaaagaaggggaagaagatc

SEQ ID NO: 490 - DNA, 2893 bp, Homo sapiens
taaaagcggcccggggcggccggcgcggcgcagaccctcggtgggcagcgcactccagtcttcccaggctagcggctgcagggagctccggcccgcggcccctccgcctcaagtctgggagctgccggtcccactctgtctttgcctatggggattcgagagtttcccagcggcgcacccaggggcaagagcattgccgttggcatgaggaggtcaccggacgtcagcccccggagactgtccgacatcagcccccagctccggcagctcaagtacttggtggtggacgaggcgattaaggaggatctgaaatggtcgcgctccgtggaggatctcaccagcgggccggtggggctcacgtccatcgaggagcggatcctgcgcatcactggctactatggctaccagccctgggcagcgagctgcaaaagggaggagcgcccccgggactccccgggcccggcggaggcccaggcaccggccggggtggaggccggcgggagagcgagtcgccgctgctggacgtgctcccgggcgcaactcaagaagatcttctggggcgtggcggtcgtgctgtgcgtgtgctcctcgtgggcgggctccacgcagctcgccaagctgaccttcaggaagttcgacgcgcccttcaccctcacgtggtttgccaccaactggaactttttattcttcccgttgtactacgtggggcacgtctgcaagtccacagagaagcagtctgtgaagcagcgatacagggaatgctgtcgattttttggagacaatggcttgactttgaaggtgttttttaccaaggcagcaccctttggtgttctttggacactcacaaactacctgtacttacatgcaataaagaaaataaacactacggatgtctccgtgttgttctgctgcaacaaagcttttgtgttcttgctctcatggatcgttctcagggacagattcatgggagtgaggattgtggccgccatcctcgccatcgctggcattgtgatgatgacctacgctgatggcttccacagccactccgtcatcggcatcgcactggtggtggcctcagcatcgatgtctgccctctacaaggttttgttcaagctcctcctgggcagtgctaagtttggagaagccgccttatttttgtccatcttgggtgtgtttaacatcctcttcatcacctgcattcctattatcctctactttaccaaagtggaatactggagctcttttgatgacattccatggggaaacctttgtggattttcagttcttttattgacattcaatattgtattaaattttggaattgccgttacatatcccactctgatgtctcttggaatcgtcctcagcatacctgtgaatgcagtgattgatcactacaccagtcagatcgtcttcaatggggtccgggtcatcgccatcatcatcatcggcctgggttttctcctcctgctcctgccagaggagtgggatgtctggttgatcaagctgctcacccgactcaaagtgaggaagaaggaggagcctgcagagggcgctgccgacctgagctcaggacctcagagcaagaacagaagagcccgcccttccttcgcccgctaacaccactcctctagaactcggtggtaatgactgggaggtctattcctgccgggaggaacctcagttgggtaaggtgtacatacctgtacagttttggtcatctgcggtaagttctatggtatttattggcatgtccaatttgcttgcacttttccacatcagaccttccacttaagggtaccaattcaatacaaaagagaaaagaagaacctctcagtgcttttccaacgaatgtaaagtgggtttaaaagttccctgcgtagatcgttttggatggctgacgttcttgacaagccagccatcagggcaagtgttttgaatcttagcaagtgttttgaatcttagcaactgaacatgacattgcacactgtgattatttttcagctatggtaggtcatattttgttttataccagagctgtactcttaattttaaggaatttcaatgaaccaaaagataactgtcaatttatttggatggatggatggagggatggaaggagggagggaaggatgtctgggatgtgaagaggcaaggcagaaatggatgatgaacatcaaaaactgtcagaggacaggtctgtgccaggtaccaggaaggacaagataagtccaagccccggctggcctgctctcacgtgtctgtgtaagatcatgcaagagaaatcacagtgccttctacagaattttcgtctttacctatgtgaagcgaggtgacgtgatacgtcactggcgccgtcttataatttagatgtaaaaatctttagaaacaaataaaactctctatatatgtgtatgtctgtgtacaaaaaaatgacagagctgatggccagtgtatacagagcgtggcccgcggtgtacaatacccatataaggtacattgtgcaggaggggaattgctggctgcttttacttcctgaccaagactgaaaaattatttactgaaatctgtaaacctttttatgaaacttttaagcaccaggctgtttacttacacaatttaggtctgccagaaaattctatctgtgatagatctgtaaagagggtcaggggttagagtttactatttttgaagtttacattgttacatatgaaatggaaacattattttgaaacgttgtcataacccaatggtgcattctgtaaccatggagtcttctgtttcctgggggaaaggggcattcatgacctgaactttttagcaaattattattctcagtttccattacctgtttggccaaacagattaataaaatatttgaaaaagaagcgtt

SEQ ID NO: 491 - DNA, 2133 bp, Homo sapiens
aagtaaactttttaattccatcacaatatgttctagatctttgacagactgaaagacatagaatgtcaaaaggtgagactctctcatgtggctaaacaccctcctactgcagatacagaactgagcccaagagcattcacatgctggtgagaggtggtggccaggggcaggcagatggttgcaccactctcagggtcagcatcctccccagtgtggcatgggggaggggaggggagggggcacggggcctgggaggctgtagcctaaaggcacgcagcgggcaagagactactgggcggacccctgccagccttcagttccatgagcgtctggtgccaggacgctccttgtgggctctgccctgggagaagtgcccttgcccagtgctccttctcggtgtctgtgacgtgctgtctccagtcctcctcattagcataccttggccgacctttggctcatggaaaaacactttgctcttctcggaacaatttctttttcacaactgagcaaatgactgatgaggtgaccacactcatgaccatactcatctgttggtggtgggtggggggtggactggatgaggacagcattgggcaacactctttctggcctccccactgcagggagccacaattactgtgggaggccagggtagtccagggtttccctttgggccatcagcattccaactgctcctcctacttctggcctctggagaactaaattaccaccatgcacttcccattccacctgtgcctcagcccgagggtcctgctcttcctgcatattcaagctgatctttctagggagtagcctgcactgtgccagcactacccccttgtcacaggcagcacctccctgtgctgggggagcctcagtctgcccttgggctcaggcccctaggctcaggttagctgacattcccaggaaatcctacaacttctcctttcctttcatggctgtaagacacagtccactatcagtctcattgtaaaagacatttctaaagagtgtcctcctttctttcccaacactagcagggacagtaagtgatgtttcctgggagatgctatggtgttatttttgcactacaagggctctgaagactgccaggcttgaaatgaagaacgatgtcacctgcctatcacagccaggtgacaatggacaaggggcttcacctctgagctgttttccagctgcactgggcacattcctcccctcaccctgactcacaaggtgttagcaataatggacacttctctaccttctgccacactctgaacaatgccacacttccatcaaatggattcatcccaaaggtaaagcccatcacttctagagggagaaaggtaatgttttcctaccacttttatttgatctcatttagaaggtacttgaggaatagagaagactgggttttctctgggattatacttaggcatttcttaacgactgggacatgttctgaaaaatctgtcattacacaatttcatcattgtgctatcatggagcatacacacccgaccctagatggcatagcctactccacacctaggctgtacagtatggcctgttgctcaaggctacacacctgtacagcatgttactgtactggatactgtaggcaactgtaacacagtggtatttgtgtatctaaacgtatataaacacagaaaaggtatagtaaaagatggtataatttcatgggaccaccatccgatacaccatccatcaccaacagaaacatggttatgaggcacaggactgtaactgcagcccctgccatgaggtcaatggcagcctggatagggggattggacttcatgtttgcccactcttctggtctcatggaaggcagctctctggagcttatgacaggcaccacatatccctggggggaggcaagagttcaccattagtccaagtctgcagcctcccattctctaggcctgcagccaaattactggacctaaacttctgggagccatgaactgggctctacattgttccaaaggaaaggggctcaaggaatcagtgcagcttagcaattgtcccttagaaagctcacagatcaaaaacctcccctgcgtatcaattctacagccaccagcagcacttcaactgacctttctg

SEQ ID NO: 492 - DNA, 3765 bp, Homo sapiens
ggcttctcccttggcctcccctgaaatctcattctcattgatttctgtttatttgtcctatcttacccagccctcctcaatcttggctgcagttagaatcacccagagattttttttttttttttggagaatgtgcaggccactccctcagaagccgggactttaggccaggttctggccttgaccagttgttgccagctgtggctcgtgaccttgacagatgattctcagatgccacctgcaaggctgtcatggatgaactgattttcctgcatccattcagtgctcaccgagtaacatcggggtttgcggcagcccaacccaccagccgcctgttttgggtggaacagtccacattcttgcagtcattctcgtattacttggttcccagaagcctcccccgggcctgttctggacccgctcactcttgttcatttgctcctcttccatgtatggttcatttgctgctcttccatgtatggttcagagcccaggctgggctcctgccgcccagtgtgaagagaggacccttggccagccccgtcgtgggccttccttccccggctgttgctgaggatgcttctgtttgatctcaaccctgagccgagtaactcacactgagcccatggtctcctaggagcttggggtcttttccgtggccagaactttctcttcttgcactttgtttttccttacgggatttcatcttgttagtttcaagcctttgttgcatctcatcgaaaacttctgagtctctgtgctgctttggtctccctcatctctgagtgtcagccctgctccaataagcttgtccggttccctttctccatctgggtcatcaatgtacatgatggctcatgggaggtcgggcactgcagcaacctctgagaccttcctccttgtggatctgaaacaggagagttccctgacccctcgcgggacttgcaacaggggcgtggcttatttgcgctcaaactccttacaggaggggtagcaagcagattggcaggtgcaggagctgggtgagtgcttttgggcgttggccccatggtagtgtctagacaattaatgctgttttagcagttgctatctgtggatggctaagtgttcaaccagctcagtggagagtcagggtgacagccttttacaccctgccatcttggtacctgggtccttgtctggtgtccaggaagaatcgggtcatacaggctttgaaggatggtgattgcagggatttcattgagtggtggaggtggttctcagggggatgcatgaggagctggaaaggggatggagtgggaagatgatcttcccctggagttcagctgtcccacggccgacctcctctctgactgtccgcagccatactcctctcgatgttcagatgctccttctcttttcttctctgccgtgccgttctgccactctgccagtcttctgctcttctgctcttggagcctggggtttggggtttctacgggtacaggatagggaggcatggcgggccaaaagcaacacttgagtttgaaaacaggaatacctgttcccatttagggccgcaggtttccaagctcgagggtggggcctttgccagggaactgccctgttctatccagtatttccctgtctcctgtccatgtcagattcaggaatggccactcctgggcagaggcattgggcctgctcccagctgacctctgtgcactaaagccagccgtgttctccttcctgtccccaagactgtcagggagagaccaagtccatgcatgcttcggtctcctacattaccagcttagtaatcctctgaaaaaagaaaatcacgttatatagttggtgtgcttttgtgtgactgagtgactttttttttcttttttcttggcaaatctgggataaaatatattaaaacaatttgtattttataaacctaccacgacacacagaattgatctcatctgcgtctgcagcaggtcaatggcagagcgtgtgcgggcctgtgctggtgtacctgcaagctgcctcccttgcttgctgttcggtgccttcactcctgcaaacatacaatgtattggaaaagcaaagcgggtgtaaggcacgtaagaatcatccacgggttactaaaccggcctgggtgtggtgcatggacatgccacgtctcttcaaagattcttcctgttctatgatcgtggtggggtgcctggaagaagtgtgaattttgtgcacgtgtctgacctgagctgatgtggctgaaatgagaggggctgcaggctcgtcccacggtggctgtgtcccaggagcagagtccacatggatgacggagccttcagaggggcggggcatggtcctgcccaggtggcagggactccagcgatgggttctggtctcagggcagcaggtgtccggtcagccagcgccgagagatcagtccagtgagaatttggggtgttaacgggttccccatgcccttggcaggttttttcctgtgggaaggatgtggttgccgaaattataccacatcctgtgggaaccatcatgatggttgccgaaattatagaataaaatatttaagatgtttggctgcatgatgaaaatgacatgtgtgggtaaaattgtcagtcatagaactggaaaatcttgaaaagtccagctctcatccattagaaaggaaatcattgtgataaggttgaaaaatgtagaacgagataaaagtcctcatacaagtctctgtacatgcaattgttcattaaagggcctctttctggtggttctgatgccgtttgtaggttgggaggtgagaagttttattcctgaggctccttagaattatggtcgcttaactgaattcgtcttctaaaaaaagcatcaagctttcttccctgtataatcttaatattgtggaacttttaccttttcttaacctttataaaagtagtgccatttcctccctcctccctcacctcccatcccccttccttgtcagcctaaagttgaatcagagatgtcactgacgaatgtggtgcttgcaattacctgttcattcacttctcactccctgttaatatgcaggtgagcccccggtgttgagctcaggatgtgccgtgaacttgactgcagacgggtccagcaactgtgcagagtggggacctgcctgcagccaccctgtgtgttcaacaaagcccagcccagcaaaacaccacagccccccaatccccaagcaagggcccccaaccttcccttagaaacccagagaggccaggtgggcagacaccccttcctgttcacggaattaactaaactgtatccgttatgggtggaaagaaataatggcttttacgaagcccaatatagaggggcagaaatgagaaaaatctttattctaaacacttacgaagttaggcaagaaaagtgtcttgcagagagagcatggggatgcgtttcaggaggaagttggtttttggaagggccgctttgtaggaatagcagctcaggaaactggccggaggatgcactgtcagtgcacagggggccacgagggtcctggcaccggggccggcgctacctcctgcaggtgggctgcctgggaggaggagtgaggcaaccgctcccatgggggtacagctcccggggggggggcagtgcagtggcaccctacatgcagggcccggttcttcagcatcaccagagctgggcgcagacccatgcttgctgcccattgcccctcctggagtgacagccagcagggcgctgctggggtcctgtttatttttc

SEQ ID NO: 493 - DNA, 2361 bp, Homo sapiens
agcgtcttcgctgttgcccttagggacggctgtgggcctgctgggggtgggggcccgaagcgccagagatggctgctcagcgagggatgcccagctccgccgtgagggtcctggaagaggcgttgggcatgggtttgacggcagccggggacgcgagggacacggcggacgcggtggcggctgagggcgcctactacctggaacgtatccttcccgtggaggcgcggcccgctgcgctggcgggtaatgggtgttgggacgaaggcgagggcctcccactggcggcgccttttgagccttggggccactccggaggagcctctgttggacttcaagataccagatgacaattttagcatcccagaaggtgaagaagatctggcaaaagcaattcagatggcccaagaacaggctacagatactgaaattttggaacggaaaacagttcttccttcaaagcatgcagtacctgaagtaatagaagactttctctgcaatttcttgatcaaaatgggaatgaccagaactcttgattgctttcagtctgaatggtatgagttaatacagaaaggagtgactgaacttagaactgttgggaatgttccagatgtctacacccagattatgcttttggaaaatgagaacaaaaatttaaagaaagatttgaagcactacaaacaagcagctgacaaagctagagaagatttgctgaaaattcagaaagaacgtgattttcatcgaatgcatcataagcgaatagtccaggaaaaaaacaaattaattaatgacctcaaagggttgaagttacattatgcatcttatgaaccgactataagggtgttacatgagaaacaccacactttactgaaggagaaaatgctgacctccttggaaagagacaaagtagttgggcagatttctggacttcaagaaacattgaagaaactgcaaagaggacatagttaccatggtcctcaaattaaaggtaaatgtaaaatgtgatgaagctctcatttaatatagtttggtgatttctcaaccttatcagtgattaatattctagagatatttaaaagtgagtaagtggtggctatttcacaaattaaaattttaataaaaagattaagaagaaatatagatatcatactgtatggattaattatagagaaaaacaagtcaactataatggaaggacttctgcttctggtcattatacctggtgccagactagccttctctgtgtaaataactctaaagctaagctgtaagatcagacaactacttttaggcagtagaaaacagacagctcaagtaacagaaggcaattgacagaaggaaaatttataaggtgagctctgccatcaccatggctttgggtctgtggaaagttccaaactgagctttgtggagatggaagccaataagagcatgacaatcctgataattggaaatgtcagagaccctagttcacagcttttgaagccactggaatctgtagggaaagacaccagagaagagagctgcaatgaggagtggctcagtttgtgagggagtttactatgagtccttagctgaggctgcaatactatacataacaacactacctgacacttacaagagagatacaattatataggatcaagaggaggccagagattgtagaagttaagtagtgatgcgaaacattgcaaatctggccatgcctgggtggaaagacctctttcacaccttgttaacaacacagtaacattcagcatcccatatccgccttataaaaccaggaacaaagcttacacagcattcttagagaggacacagaatttggagtttgagtcttgccaagttatagggccttgagaaacatttagggctttccatggatccaccctaacgaagcataaaattaagcctaggattttagggtcatcagccaaaaatggaactgccttctagaacaaaaaatgacatccttttgaggaagacagtcatccagagtctttacaatcttttacccacattgcctagtacataattaaacatttctagatatgaataggaacaggaaaatgtgacccataatcaagacaacaagcaataaatggaaacctacccttaagtagctaaactgttgcatttagcagatagaaagtgctaaagcagatactttgattatgttcaaggacttaatggaaaatactaataagtgaacagatggggaatttaagcaaagaaatgagaacaagcatacattccaaaaaaaaaaaaaaaaaaaaaagaagaaagataaaagattaaaggaaaacttgcctatttaacatatataaaattaaagtcccaaagaagagaatgaaaatggagcat

SEQ ID NO: 494 - DNA, 2591 bp, Homo sapiens
taaataaaggttttgtttaaaacattttttttgacaaagatatttttaaaaacaactctcagagatgagaagcaccgacctaaaggtgagtagcttgggcataagcacaggaaagtctcctgtgtgctgtgtgatgggtctgaaccttattcatctgcaggaagcctctcagtttgggctggtcaagcagctgtgcttgttggcagagacagcttgcttcctccctttatctaccagatacaccctcttccttggcctaaacttgagggaggtgatgttgggtacaaagaccccaattctgtggcatcattacagcaagaaagtttttgagcagtcggcagaggagaaatactacttcagagcactgggagggaggggggtggctgactttttttctaggtctaaaataaaacccagaggatgggcgggatgaagacaaaaggagggatgaaacagaagtgaaacagcagatagaatcatgaacgaaaatgagagcatccagaaagactaaaaattctcatacacctgttctttgaacatctcagaaagttggtcttttgactcaaacaattaaaattacaagtggccttccttggaaatctgtctcaaatctctgaatagctatagctctggcagctgcgttgggacagttatttcagtgtcccagaggaaagatattttggggtttagtccttgccagaaataagaagccaagggaaaaggagaaacattacagaatttccaaaaatattttgatagcaatgcaaaactttgtagaggcttgaagaaaaactagaatacactcttattttaaggacgcctagtggactggctctgtattttggccagtagattattatgtttgtcagatattcggaagggcctgtaagttcatggatatacacatttgagtgtgtgtgtatactgtgtgtgtgtgtatttgtatgtatgcatgcattggtttataatatatgttctcagtcactgttgtgatttgtatatatggactagattagttttatttaagttttaaaataatataggccttttcctatttaggaaaatgagagcgataacatcaggtaagtctggtgggaaagttaaacagggaagtcttcagttagagatttaaagttggactataccacttaagcatcaaataagacctgacccatctgcagtcatcaaggcagttctggctcattaccgtactcaagaaccttttgtaggtctggctgggaaatcatttgttcctaagaaagcttgctgtttttctcctccagcctttcttccctgtaccagctcctacgtcccttgcattgcttaggaaaagtctctttctttctcttctttccttctttttttttttttttttttggagatggggtctggctctatcacccaggctgaagtgcagtggtacgatcatagctcactgcagactccaactcctggcctcaaactgtcctcccaccttagcctcccgcacagctaagactgcaggcacgcgccatcctaccttgcttggaagagtttgtttctactgtgtcccagtcttagtggttaaaggactttgcttctcccccagcagtttggcaataagactgtttaatgggttctcatttttattagtgaaaactattattgttctgtaatattttatttgttacaatgtgttcattttctccactaacacccaagggcggtgttgtacagggtacagttttgaaaataaaaaataaaaataaaacaacgttaattatgccttaaaggttggcagatgtggatttaagaattattacattgtacaggtatccctcagtcctgtgcatgttaataaatatctttccatcagtcaacttgtctgggcagccaaatctgtagaatcagtttttgattaaagctaccaaaagtggcaaagctttgcttatctcagcaaagaaggttttcatgcaatttgggacagaggaataaacatttccgtggtaaaaaataaaagtacagggtttgaaggaacaagattttcttaagtcatccaagtgtgaggccctgaaggataggtagctaatactgagtagaattcagattggagttctcctccagaactcagcaattgagtaaacaatacgttatctgctccataaagtgtgtaaaacaaactcaccctagtggctctctttttaactttctctgtgataaggaaaagaaattgtatatttatttaaaaagaatgaatgaatgaatgaaagactattttcattcacatgattatacctgaaggaatttgttttgtttctttgaattttaaaatattgacactggggctgggcatggtggttcgcgcctgtaatcccggcactttgggaggctgaggtcaggagtttgagatcagcctggccaacatggtgaaaccctatctctactaaaaatacaaaaattagctgggcatggtggtgggcgcctgtaatcccagctacttgggaggctgaggcagaagaattgcttgaacccgggaggcggaggttgcggtgggccgggattgtgccgctgcactccagcctgggcaactgagcaagattccatctcaagag

SEQ ID NO: 495 - DNA, 2431 bp, Homo sapiens
caactcagtacagagaagtgtgatgagcaagcaagggcctgggccacgcccagcagtcctttctgtttgtcagaaatgcagatgacttctcagtttaagatcaagcaattcataaaattaaaataataacagctcaacttaagcaagcgcttttatgttctagtcacttaccctagcacttgaggtttgtcaatttaattctcataacaaccccagaggaagataagaagataatatcgtcccttatttaccaactgggacaatttactgttgtccaagtgctctgggcaggacagaagggtgtgggtgtgctgcttccaggcttggaacaggaggtagaacaatgaacaatgacagaaagtattaataggccaggcacggtggctcacacctgcaatcccggcactttgggaggccaagaagggcggatcactcgaggtcaggagtttgagaccagcctggccaccacggtaaaaccctgtctctaccaaaaatacaaatattagctaggcatggtggtgcatgcctgtaatcccagctacttgggaagctgagtcagaagaatcacttgaatccaggaggcagaggttgcagtgagccgagattgtgccactgcactccaggctgggtgacagaggtaagattctgtctcaaaaaaaaaagaaagaaatattaatagaagtaggaaaaggttggagggaggtctcagggtagggcaggttctgaatggcacgaaataatggccaggctactccgccgtatgaatgcccatcagctgagcctaacaggcaggcctccagacacaccgcagccagttcctgagggcttttgtgtgtcagggtgcaggtctgctgggctgccagccaacttgacatcacctctcttgcctgccaataaaactgaaccttctaacgaggttatccattcctgattccctgggctcataacccttctaggtggcctttctggtcactcaggggtgggccttcatacctgcgtctctttacttcctcccaccatcactctaaggcctctccctgggagctggctgagctcactcctgcacatttggctgtctttagaactcctggtcccaaattgcagttctggcccctctggctgctggggaacataacctctgcctgctccccaggggctcaccgtgtgggggagcaaatcatgtatatccagtgctgtgagtggctccagtcatggaggagcaaggatgagttctgcctggaagaatctgggaaggcttcctggaggagggaacaatggcatggaccttgaagagtcagaagctttcaattcattccattcaagcattgctctcatgtggcattcaagcattctatagtgcttgccgtgactcaggcgcacagtgcaaaaggaagcacatctttctctgccatgaggacttattagtgtctgaagagctttttctggactataggagaaagtcatggtctccctcactaataaacactgaccctgcttcggatgagctaacagccctgctcagaaagcatgacacccatcctgttcacttttccctgccccggtcaaaccaccaagccctagatttcattgccaagtatcctgtatttactgggaatggacatcacagtagcatgccttcctagccacatctatgaggttttgttcattttcattctgctttttgtttgagctaaacctgccttgggaggcagaaaagaaaagataacatctgattcccccgatcaaccaaccaatcaactaggtcagggccacgtaaattcattcaggacaagcactgaggtcaaactccccagtgatcctcaccctcctccagaatttccacttcccgaaatgaagcaaagagcggtagacaggagtcatcccttcttgtggctcccaacctggggcagccccctgcctccctttagatgggcaatcggcttagaaagtggaggggaagccagtgtggatctactcacagaatgttcttttggtttccagccaggattgctacagttgtgattggaggagttgtggctgtgcccatggtgctcagtgccatgggcttcactgcggcgggaatcgcctcgtcctccatagcagccaagatgatgtccgcggcggccattgccaatgggggtggagttgcctcgggcagccttgtggctactctgcagtcactgggagcaactggactctccggattgaccaagttcatcctgggctccattgggtctgccattgcggctgtcattgcgaggttctactagctccctgcccctcgccctgcagagaagagaaccatgccaggggagaaggcacccagccatcctgacccagcgaggagccaactatcccaaatatacctggggtgaaatataccaaattctgcatctccagaggaaaataagaaataaagatgaattgttgc

SEQ ID NO: 496 - DNA, 2951 bp, Homo sapiens
aatatgttctcccattccataagttgccttttcactctgttgatcattgcctttgttgtgcaaaagttttaaagtttgacagccccattggtctctttttgctttggttgcctgtgtgttcgatgttcttagaaataaggattcaggtacaagtagttcattcaggagggcagggaagacttgcaggaaaatgatgcaaaagagaaactgcagaatgatccttcccaatgggtggaggagctgggtatttgtgcaccatttcctgtcagtcattggttgggggttgcttgtgggggatgttaattccttggcacttctgatttgccatgcagggaagcagaacagcattctgtggttccagcaaaacctccaggtacagagatgcagatgctggcagtttggtagctttttggagcacttgaagtggtggggtttaaacaaagcaagtagagcattggcagcatctgccacatcccaaataatcacaggtcctgggtgctagtactgattctgtttgcattgctgtaaaggaatacctgagactgagtaatttataaagaaaagagatttatttggctcatggttctgcaggctgtacaagaagcatggcaccagcatccacttctggagaggcctcaggaagcttccaatcatggcagaaaagaaaggggcgccagcatatgtagatcacatggcaagacagaggaggcaagagttggtgggaggtgcctggctcttttaaataatcagctctcaggaataattgcaggaattcatagctcaagaactcacttattactgtgaggacggcactaagccattcatgagggatccaaccccatgacccaaacacctcccactaggctgcaccttcaacactggggatcaaatttcagcatgagatttgcaggggacaaatatccaaactgtatcagtcactaacaagctatttgactttggatgtcatgtgaccctgtgcctcagtttcctcaaaagcaaaatgggagatttataatatcctctttccaagtagaatacaaactccttaaggccaggcactctgctttggacactcttttccagggtatggggctagatcatttgcacacttcatcttgctgcctcttctggaaataactttaatcaagacctttaggagacttgggacatgcagaatgcgtgtctttgcaaaagacatgacaatgtcaccatccatgtggctacttctacactaagacatctcttgatgttctcaacacagctctggaagcagattcagtagatgctactcgagtcatcggatgaagcaggaaatagggacacagagctgtgtatgcactaggcgcttaccaatgcttggcacagccaccgactgaaatgttccctatatttttggctgtatggcaggtgcttgatcacagattccctatgtatgtgtcactttgaatagatacatattctaaagtgtcacccacagccattaagtatgcagagattctccttggaatgggccattaactaccatttatgaactggtctaaatcccaagaatggtgcacccaaggatgaccttggttcaggtgtcagtaagttatgctgcacagcattttgctcatgctgcagtccctggtctgcaggcgggataattatcacacattcaataggcatgtcctttccatattcatgggttttcacttcttggttgtttgctcgcttccaagtactctctgaattagtctctcaatttttttctgacttctataaaatgaaggattaatttccatcaggaatcacccatgtttataaataatctccaaaagtgactttttggctgttcagcttatatagttatttttgagatgtgacaggtcatggttattacttgggacttctgaacagggagcctgatgaaattattccaaagttagaggtgtgtcttcatggttcccattttgtcctaagattgcaacataagaacacatggctgaaaagtttttttttcattttgatccattctctctttctctgcatactctccagcctccttctaagaagcttgtgagtttgcctctctctttctcatatatatatatatatatgtcaacatgtgtgtatactcaacttgattaaaaaaaacaagaagaaattgaggtcacagcaaaatgaaggtgtacacataagatctccagggcaggaaaggctggtaggtacacaaatgctggtccgagggtcttaggcagatatgagagattgttacagatttggctcttaacctcttagcagccaaagcaaagaaacactatccacagaactcaccatgtcattagaggataaaatatgattacttagcagaagctcagagttttctattagtaggtgtacaggtttttacaaagggcagcatatcacactgtcctggatagagctatgatgaaatgcgggtgggtttgtgctgtgggctgtgtgtagggcgtggctgctgtgtctgtgtgttgtgggggaaggttcgggagctctctaaggagctaaggtccatgggaatgggagtgggcactcacactgagtgtggtggtcctgtgtagctcagactgaaagaggacttggagaccaccttcctgtgcaggccagcctggacctctgacacactcgtaacatggccctggctgggcttggtggttcacacctgtaatcctagaactttgggaggccaaggtgggcggatcaacctcaggtgtgaggtcaggagtttgagaccagcctcaccaacatggagaaatcccatctctactaaaaatacaaaattagccaggcatggtgacgcatgcctgtaatcccagctactcgggaggctgacgcaggagaatcacttgaacctgggaggcggaggttgcagtgagctgagattgcaccattgcattccagcctgggcaacaagagcgaaactccgtctc

SEQ ID NO: 497 - DNA, 2264 bp, Homo sapiens
gactcagaattttgaatagtttctttgctaaattcaccatctggagagcctgtgattgattagttttggcctcactattaagtgtcaatataatcaatgggaattactaggctagggtcattacatagataatttgcctgctgtgtaaataaaaatgaaattgtttaaattttgtgcaagagaaagtgaaaataaggagttacgatttgtttgttagagaaagtggaggccattggaatgacagtttttggaagtgtggagcagtttggctaagaataggaatgaaggatatttttttccagtttatcatagccagagtgaggaagtgttattccctctcttgcttgcatacattgccagtagtgcctactttacgtaaaacagaaaggggctcatactcatcttatgggagagaatcaaacttacagggttgccaccagagtctccttggaggtgacatggatatgggcaacccaggaaccctttcgcccaccaaacctggttcccagtactatcagtattctagcaataatccccgaaggaggcctcttcacagtagtgccatggaggtacagacaaagaaagttcgaaaagttcctccaggtttgccatcttcagtctatgctccatcagcaagcactgccgactacaatagggactcgccaggctatccttcctccaaaccagcaaccagcactttccctagctccttcttcatgcaagatggccatcacagcagtgacccttggagctcctccagtgggatgaatcagcctggctatgcaggaatgttgggcaactcttctcatattccacagtccagcagctactgtagcctgcatccacatgaacgtttgagctatccatcacactcctcagcagacatcaattccagtcttcctccgatgtccactttccatcgtagtggtacaaaccattacagcacctcttcctgtacgcctcctgccaacgggacagacagtataatggcaaatagaggaagcggggcagccggcagctcccagactggagatgctctggggaaagcacttgcttcgatctattctccagatcacactaacaacagcttttcatcaaacccttcaactcctgttggctctcctccatctctctcagcaggcacagctgtttggtctagaaatggaggacaggcctcatcgtctcctaattatgaaggacccttacactctttgcaaagccgaattgaagatcgtttagaaagactggatgatgctattcatgttctccggaaccatgcagtgggcccatccacagctatgcctggtggtcatggggacatgcatggaatcattggaccttctcataatggagccatgggtggtctgggctcagggtatggaaccggccttctttcagccaacagacattcactcatggtggggacccatcgtgaagatggcgtggccctgagaggcagccattctcttctgccaaaccaggttccggttccacagcttcctgtccagtctgcgacttcccctgacctgaacccaccccaggacccttacagaggcatgccaccaggactacaggggcagagtgtctcctctggcagctctgagatcaaatccgatgacgagggtgatgagaacctgcaagacacgaaatcttcggaggacaagaaattagatgacgacaagaaggatatcaaatcaattactaggtcaagatctagcaataatgacgatgaggacctgacaccagagcagaaggcagagcgtgagaaggagcggaggatggccaacaatgcccgagagcgtctgcgggtccgtgacatcaacgaggctttcaaagagctcggccgcatggtgcagctccacctcaagagtgacaagccccagaccaagctcctgatcctccaccaggcggtggccgtcatcctcagtctggagcagcaagtccgagaaaggaatctgaatccgaaagctgcgtgtctgaaaagaagggaggaagagaaggtgtcctcagagcctccccctctctccttggccggcccacaccctggaatgggagacgcatcgaatcacatgggacagatgtaaaagggtccaagttgccacattgcttcattaaaacaagagaccacttccttaacagctgtattatcttaaacccacataaacacttctccttaacccccatttttgtaatataagacaagtctgagtagttatgaatcgcagacgcaagaggtttcagcattcccaattatcaaaaaacag

SEQ ID NO: 498 - DNA, 3079 bp, Homo sapiens
tcagaactgcccacaagatttcctaagcgtgcagccggtcagtagcgcgtcctcatccggtctctgcaaatctgactcttgcttgtatcggagaggtgggactgaccacatcaccaacatgttaattcatgaaacgtgggctagctccattgaggctctcatgcgcaagaacaaaatcattgtggatgatgcagaggaagctgacactgagcctgtttctggtggctctccctcgcaagcagagaagtgtgcaaatagattagctgcgagcaggatgtgcagtgggccaactctgcttgttcaggagtctctcgattgcccgaggaaagactctgttaccgaatgtaaacagcccccagtgtcatctttgagcaaaactgcttctcttacaaaccacagccctttagattctaaaaaagaaacttcctcgtgccaggaccctgtaccaataaaccacaaaaggcgatcactttgctcgagggaagtgcctttgattcagattgaaacagatcagagagaagcctgtgctggggaacctgaacccttcctttccaaaagcagcctcctagaggaagcagaagggcattcgaatgacaaaaacatcccagatgtggtgagaggtggagacacagccgtgagcgcttgtcaaatccatagtgacagccttgataccagagatgtaccagaggctgaagcctccacagaagccagagcccccgatgaggcccccaaccctccaagcagcagcgaggagagcacaggcagctggacccagcttgccaatgaggaagacaacccagatgacacaagtagctttctccagctcagtgagcgatccatgagcaatggcaacagtagtgccactagcagtcttggcattatggatctggacatttatcaggaaagcatgccatcttctcccatgattaatgaattagtagaagaaaagaagattcttaaaggacagtcagaaagcacagaggcacctgcatctggaccgcctacgggaacagccagcccccagaggagcctgctggtgatcaactttgacctggagccagagtgtccagatgccgagctccgagccactctgcagtggatagctgcctctgaactggggattcccaccatctactttaagaaatctcaggaaaacagaattgaaaagtttctagatgtcgtgcagctggttcatcggaagtcctggaaagtgggtgatatcttccatgcagttgtccagtactgcaaaatgcatgaggagcagaaggatgggagactgagtctctttgactggctcttggaactgggataataaggcagtctgccgtatagatcattccttccctttattccaacttagattacagtggtttgttctaaatgctctaaacattctcaaaacatcacatcacattagcagaactataaaaaaaaatctgctactcagatccactgcatacagaataagtcagaggaaaagcaaaatataggtctgtccaaattcatacaacttgtgggtgagttccaaagagcttggattagaagggctggacaaagagagaattcaatggggcccaaattagaatgcttataatgagacccaatctccaggaaaacaacactcacataagtttaatcatataaaatgatttgtaatgtctctaattagatgaatcaactagaaacaaactcagtggtcaaaataatttttaagagtattccgtaacctatattttacttttctgattatattaaggggctgccagcccggagaaatacttaagatatgggtgagaaatccccagacttttatacaaaagatttccactttcaaatcaatgtcagtagacattgataaaagtatagcagcatcctctactgaggtgatttcatttattccctgcagcccactgataaatatctcacttctcccaaatagtatgtggactcccagctaagcagaaaactattgtcattcaactgaaggagaggaagataaaagattgtcttgtttccatcactgtattacttgtgtaacatgattacataattcttatcctaagagaaagctttcatatttaaaaaaaagtcttttcagataaaatctgcttgtgtcttgaataatatgaaatacaaactttcactttattttattgtaaattataaagagattattgtcttaaataatatattgagttagcttcaagcttcctaaaatatgaagagattgttgtctaaagtcacatattgacattgagctcagtggcctgtttcatcacgtatgtgctgctacctgtacagcagacatgccgctccagtgacatttataatgacagaagcagggtaatggtcttgtgtttgacatgatcagttaggatcatagactttccctgactcgtagatattagccttgaattgggggaaaagaagactttgacacattttagttattttaataacagagatttactcttttgaaaaataaaggtatctaatgtctccctaataagtcttctttccttccaactaaatgacctacacggacttttattttcttgatcaaagaggtgtttattaaggacttctggataactatacttttactctatttttaaagatcacaaagtaattttaaatatgaacaggttcccataccatgaatgctggcctcaccttctctatcatccacattttgaaatgcaaagaaagctcccttgtaagccatacttccttccccactcccatcctaggatacttgcccagtgctcattaggcatttcttattcagatagtccaaatttaggttattatgcttaatttgacacattaactaaatgcccagttttaaaatatatccatcaattcacgctgaaatgtgcttctttgtgctatcaaatggaatagaatacacttattttttaaacaatcccagaatactgtgtgtagacttttgttgtgctcaaataaatgtttacttatcttacaaagctcaaatactggattgtaaccatgtgatgaagttatctatgttgtacctaacattgcaaattaatcaataaatctctgttgtcagattgtt

SEQ ID NO: 499 - DNA, 3139 bp, Homo sapiens
aatgaggtggtgattgacagaggcccctcctcctacctgtccaatgtggatgtctacctggacggacacctcatcaccacggtgcagggttacggtaaggcccgcagcactgtcctggggccctgagcgtccctcgggcgggagtgacgcctgcgcctgtccctgtcaggagtgatcgtgtccaccccgacgggcagcacggcgtatgcggccgcggccggggcctccatgatccaccccaacgtgccggccatcatgatcacgcccatctgcccccactcgctgtccttccggcccatcgtggtccccgcaggggtcgagctgaaggtcagagccaacgacactccttttccggtttgtgagtcatttgaccccgtgcaacacaaagccgggacctagcaccccgctctgccatgctggctccagcctcagacgcggcctcgtcatcctagggccatcctgtgccccctcagatgcaagccttcccttgctggtgcccgagttctgtccatcaaggtgcccagggcccgggtctgaggggctttctgccattgttggtctctggcggtgctgagctgggccggtgcctgtaggacgtgcactccaccgtccgcaaggcagggtcagagctgcccaaccttcgacctctggcgagcactcaggggtgggtgcctagaagcgtcctccccacagctgggggcccacacctctccctgcttgaccctcagatcatgctgtcacctgaagcaaggaacacagcatgggtgtcctttgatggacggaagagacaagagatccgccatggagacaggtgtgggctgcatgccgggctgggcgctgcctgccaacctcctccccgggccaggcagcgcctgccctcttgcggttggcctgtagacacagcttgtcccctagggcaccacagggcctgagtccctgggtcttgcagcatcacagtcggggcacccgtcctgggggcagcgggtcgcatacggtggcacatgcaggcctggccccagcagaggcctgagggtgtcccccctggcactgctgcccacccccacccacctcctgggacctcacccctgagggccctggggcagagtttgtcagttccctgcaccgtcccctccaggacctgggatggctctgtcccagcacccatggggcactgctcaagcctgcctcggggaggggctgcccggccccacaggaaaagagtcccggccattcccagggagggagggaggaagggttcttggccgggggtgggcctttctggaagccctggctcaggctgctgctctcccgtcccagcatcagcatcactacctcatgctacccgctcccctccatctgtgtgcgggaccccgtgagcgactggtttgagagcctcgcccagtgcctgcattggaacgtccggaagaagcaagcccacttcgaggaggaggaggaggaggaggaggagggctaggtcaagcccctatccaggcccgaatccttccgctgccctccaagcgccctctggggacagaccaatctgcgtgtgtctgtgaccgcctgtctcagtggcacggccacttcctttctgtagctgggttagagcctgggtctgccttttgtccagatcagctgtttttttaaaatgtctgactttttttgcatttctaaagaagcgtgagaaatgggctgggagtgcttctgtcctgctgacaccccgcggtgggtccctggagcgcggcctccagctgccgcaatttccatgccaggatatttttccgcaaatcagtcggttgaaattcagaggagtcagaatgactcgacctgtccttcaatgttgataataaatgtctcagccaaaaaccttccttgagctgccatgcttttccccttgacctgcacctcttcccctaaaacttctgcagggaagcccctggcggaggcgccattgaaagcatggtcttgccagtggctggcaaggcggttttgttctgctcagtttctggagagggttggatgcgtcccctgccatccagccctccccgcttgaggccagcactgagtctgggacactcagcgggaagggggctggcatcgccagcgacccacacattcctcacgtagcttctgctcccaggaaggtagtttaaatcctgtatatactttttagagactcttttaaactttctgaagtgctgatgtacatactttctcgtacacacttttgtgaagatttcaaggggaagggagttgtctgccattcaatgtttacatttatgttctgcaagacgctgtcctcagggaccattaggggaccattctgttcagtgcgatcctgatggtccgggagatgagggtttccggggctagtgatcgtgatcccttttatttgcaactgtagtgagaatttttcacactaacacagcgagggactcaacacgctgattctcctcctgtctctcccgtgagtctccagcctgcccagcaccagcagctgtggagcacgtggatgctgcctaccccggcgcccgcgtcttccacgggcacaggtgtgtggaggccgtggtcggaccctggtgtcctggttactgctgcccgggtgtcttttttttgagtaactgctctctgagttttgcacacgaagttgccctcatctgctggagatcgataaggaaggcacaagacgttctcctctgcccgtgaggagcttcccgcagccgcctggcccagcctgggcacgttctccgaggcatgtgtctccctgctcaccctcgtctgggcacctcagcatctgtggacttgagcgtccaaaaaccctgagtgtgattctgggcagccggcctggcttgaagtccgccatgaccctgggcacaggggaagcccagccgtgggcttaggagagagggaccagcgcccagcgttagggctggaagacggcagtgttcagaattccagccgctcatctgaacacagaaggtgtgaactgacctctaaagcagcgtgagatgggaatgatctagaaaactttggatttttgaagtaaattttaatgtttcatattaatttcttgaaaatgtattaaatgtcattgaaagccttattacgcttttcagatcctttcaataaacaagacttgtag

SEQ ID NO: 500 - DNA, 3134 bp, Homo sapiens
ttgtttggaattcttctggaaggaagatttatctccccccccccattgatgtattgattcattgatttattggctgatttgttttaattgaagctttattttttattattactttttgagacgcagtttcgctcttgttgcctaggctggagtgcaatggcgcatctccgcctcccaggttcaaaccattctcctgccttcagcctcccaggtagctgggattgcgggcgtgcgccaccatgcccggctaattttgtatttttagtagagacggggtttctccatgttggtcaggctggtctcgaactcccaacctcaggtgatccgcctgcttcggcctcccaaagtgctgggattgcaggcatgagccaccgcacctcgccgaagttttatttttatcaatggaatacatgtatgtagtttgcaaagttaaggcttataggggaaaagaatagctacctaaagtcttactgttatttctgttggtacttctaaataacatgcttacttttccatgtgtacgtttttccgttttatattgggttggatcatatgaaattgccagtattcaaccatttttttatctgcaaaactggcaatttcatatggtccaacctaataacctaatctttttcttcctgcttcttgtccagatgattattgtgtgacatggagttgcttcgttttgattgttgtggattgtgactgcacctgcccctcagctgacctggttcagggatcagcctctgagctcagcccctgctttgggctcctcctgcccagatggcatctcgggcctgggtgagaaagggctgcagggtatgaggtcagcctttgctgtgatcactgccccccagtgggccagcctggagctgccagctgggcagctgggggcagggcctcgggggctgcctgagctctgtctgctttgctgacgctgtgaccaatctcgtgctcatcagtgatctgggccccaggcagaccacctttctgggtccatggccattagtccagtgctccaggtgtagccttaggccaaccattgaaccctttgagtctcagtttccccatctgtttaagatgaggattgttcaaccttccagatgggcttctgtggtgatagaatggcaggtacttgtcctgaggccatcagagctgctggtgacaggacaccttcctgaactcctccaggcgcctctgatctctccttagctgctgttgtgttaccttcaggtcagtgagaagctgcccaggacagggtctggaggtctagaccccaggcttagctcaacctgtcttgccccaagaccatagccaagtgctctgtgcctcagtctccccatctgtgccaggtggttggtgccaatcctctgaggcctccaggtgcctgagagctgcggtgtctgtagtgtgagcccctgtcccctcatccttctctgaggctgggccctgcccaacctgctccagggaccagtggtcttgggaagcttgggctgactgggattgcagactccgggtctggtgtatagggcccttggcaaatccctattcctttctgggcctccttgaagagacagtgggctgagcttctaggctccctttgattcttctgtgtgtggcccagaatgggacagacagactgagctgggcacagaaataccatagtgacagaaccattcgaagaccctgccctgatggaggccccgggccaggggaggaggcacagtcaggctgtcagctgaatggaaaattacactttcgatgagtctgttatcgagtagagattagtggggccaagaactaatctggggggcaagtgatccttcctgagccctgaagagtaagcagctgtcaactagatgaacggggagagaacattccaggcagaagaaacagtaaagatcctgccgtggggtgaggtggagccgggagagggcggacagggaccctagcaaggtctcagagcacgagggagttcgagctttgccctaaggcttgggaagcctttggaggatttgaaggctggaagtaacaccatcagatgtgggttttgaaaagctccctctggctgccagggagaatggggtgggcacgggtttgagagcagggagcccaaggaccaagctttgctgttgtttaggagatgagatgacagtggctctgtccagagtagtgactgtggggatggatccaaagggtggatttgagtttagggggaattgacaggtcatggtggctcgatgtatgagagaagtgtcagggcaattttgtggcctgggcacctggctggaagatgggggcatggatgctgagtgggagaagtgtatttgacagagggaaggtgaggagtttgatgtggacctggctgggatggaagtggctgtgggaggatggggcagaggcctctggttgcacaggcaccaggctggcattcgaggccagagcctgggatggaggtgtagaccatgggtgggggcagggggagtccaggcagcttctgagaggccagaccttgcagggtcaattatgggccctgaggtgggggccctgaggagggcctctccagtgattgtgatccagagccaggcaggggcgttcctgtcttccaacaacacctgccagcagttcagggatcctgggtttagggggaggtacccagcagcgcctcacaccctctctctccccccagatcctgctcatctctgattacttctatgccttcctgcggcgggagtactacctcacacatggcctctacttgaccgccaaggatggcacagaggccatgctcgtgctcaagtaggcctggctggcacagggctgcatggacctcagggggctgtggggccagaagctgggccaagccctccagccagagttgccagcaggcgagtgcttgggcagaagaggttcgagtccagggtcacaagtctctggtaccaaaagggacccatggctgactgacagcaaggcctatggggaagaactgggagctccccaacttggacccccaccttgtggctctgcacaccaaggagccccctcccagacaggaaggagaagaggcaggtgagcagggcttgttagattgtggctacttaataaatgttttttgttatgaagtctaaaaaaat

SEQ ID NO: 501 - DNA, 3512 bp, Homo sapiens
gaatattaggatttcacaaattctccagatgtttctaatgtgcagccagccttgagaaccactattctaggtcagcagttctcaaactggaggctgcctcagaatctcttggagagctccttgattatgggccccgccccagagttatttggtgaggccagggtggagcatctctaacaagttcccaggtgatgccaatgctggtccagggactgcacttggaggctcatggctctagatgatcctttaatgagattggccctgttctgctgccctgttctttttcctggttgggggttggtggacccttccttccctcagtctgactcaggcgtgagacttcttaaaggtaccagcttttctttttctgaacattttagcattcagataaatattatgacatatttttaaagcaaagtaacatagatttcttctcccggggctaggagcctcagagtctgcctgaattaagaatttatctgtgcctaagattaggatgcatttagtgatctgagctaaggggttggtggatctgcagcaataggttcagcctgtgcctgggtgagggtcaccttgtgaccggcgctgggtaggatctgagtaccacacacttggccctctagcatggggaggacctgtctggtccacctgggggaaagcctggttttctgatgcagacccagccctctgcccacctccacatctgtgcacaaacatggaaggtagcaatgaggaaacacacagcaccaggactgccgtgagcccaggagctagggttagagcctcacttctttatgcatttccttttctatcatactttggaacaggcttgagctgaaaccagagagttagtacctggtttctgcctcaatctagtctccctcctccaaagatgcccccacaacgtgggcaacttcaacccccatgagagctcagaattccacattcagcgacaaagttgacaagagcctctggagatctcaaagacttattaaaagtggaaatggctactgttttactgaggcagggtgaaaacacaactcacttcctaggatcgaacccagcaaattcactcagcccccaggtaactgaggactcagttgaaggaaaataattttgagcccctgaaaatagatgctataaagctgtgtatcaagggccaaccattttgctaatatcacatatctcacggcatttgctttgattttaaattcagttctagtgaacttggttctgatttctaatgacaaagcaaactaagagaatgatgacatgtgctagataaagcaagaagtggcagctaatagcctaaattgtgatggcattaagaagaccaaaactagtttacttgttcaacgacagcttgtctttggaaaaaaaaaaacactacattaaggataagaaaatatgtccgggcatggtggctcacatctgtaatcccagcattttgggaggctggggcgggagatcgcttgagctcgggagttgacgaccagcctgggcaacatggcaaaaccctgtctcaataaagaatacaaaagcacacctgtggtcagtcccagctactcgggaggttgaggtgggagactggcttgggcccgggaggcggaggttgcggtgggctgaggtcatgccactgcactccagcctgggtgacagagccagaccctgtctcaaaataataattaaaaaagaccaaaactaaatacatatctcaggaaccatcaagtagcctgaggtcgttggtcgtttagtggggaagagagggagaatatcttataataaccccgggagcaacacagcatttcagctcagttcaccctgtgacatccaggacatgcagaggtaaaaaagcgttccaacaatgttcaatacactgtctaagaaggcagggctgcgttttatccactttagaattatttccatccccaaacacttaaaatactttcacaaaagtcttggtgcttaaaagataaatgctcagtgacctggaagttcacataaatgaaacggttgatgatctgatgatgaaggataggcgagatgggtaaactcactctttttttttttttgggatggagtctcactctgtcacccaggctggagtgcggtggcgtgatctcggctcacggcaacctccgcctcccgggttcgagtgattctcctgcctcagcctcccgagtagctgggattacaggcgcccaccactttgcccagctaatttttggtatttttagtagagacggggccaccattttggccaggctggttgtgaactcctgacctcgtgattcgcccacctcctcctcccagggtgctgggattataggtgtgggccaccgtgcccggccaaactcactcttttgaacttaacattttccccctgacattggagactctcctgctacctctctcctaagaaaaaagggcaggtggtggggggacaagccccttccaccttcccatctccaagggactttgcagtgtgggtgatggtgtggctgatcatcctctttctgcacctctgattctgcttgtgttgtccttattgtgtggggcaggagggtcaggacttcagctaggggtgtgctggctctgcagtgactcaggcctgggtgttttttggtgaatttaaaaagatgaccatttctgggggaaagtgacacttttactttctccacaccttcaccatccattttcttactggacttcgctgcgttcctgcaaggaggacagggcagagagtagcaaccctccttgccgaggcccagaaagatagcgtggtgtgcccagggcacccatggtgggtgatggacatctccttttgggtgccaaggcttcctcaaggtgggaggaactggagggcaggggacggtggccagtgtcccgctctagccctctagggcacctttttctcccctctgaagttgttaggctgatctggagtctgctccaggcctgggcttcaccctggcctcatgccctgcccagcacctgtgtggagggacctgttcgtattcattcctctttgggggccaagctcagggcacccgaaccagcagccttgggtggctgaacctagtgggacagaagggaggcagttgtatctggcagagtcacccaaggccacaggcctgagcaaagcaggagagcggggcaagctggggtcagggaccatggtgctggccccctgctgctctggccatgtgggaggcagctggaggggtcccaagtggcagctcctgccagactaccccggactcccgagcccatcgtcctgtactcttctccagtgggacgtctggccctcactgtggctagcttctgggcaagtccctctgctcaaaatcactttatggggcagctggtgccccctggggctcccacactctgcacatacaatttagggacctggcagggtcttggtggcctgcagcttccctttctggaaccgactcgcctcccatcagagagccataactcttcttcaatacagtattgtttgaactttg

SEQ ID NO: 502 - DNA, 2697 bp, Homo sapiens
tgtgccccgtgcagccctcagcccagcttggcagtggccgctgtcctctgagacgggaggagagctgcccagcctgacagcccgagggatatggaaacagcttggcccactgcggcccggtcagccactaactgtcacttctccctctgctcttatcttgctgctgctggccttttcctcggtaagtaagtgccagcgccgtctttgctgccatcagtcccactgctctgcgggccatttggggcgtgcattttgtcctgtttcctggcatgaggcgctctgcggacagacggggagggaagagcaggcctcgctcctcccccccaagcatgtggtgggagctcttgaggtctgtgcacgaggctgtcctcgctgccatgtcccgcacacacctggcaccgctgcagagtggccggggcgtctgtgtctgtacgtgtgtgcgaggcaccccttgtttctggattttgcctgggtcttctcagcgggacggcgcgtgccggcttgcgtgtgggggcctcctgaagctgcctgtgccgcgacagggcctgcctaacctctcttcccgtctccttccaggtccagggagtcggtagtaagggatggcgggacgtcaccacctttttttcggggaaagcagagggccccttggacagcccctcggagggccacagttatcagaacagcggtctggaccacttccaaaacagcaacatagaccagagcttctgggagacctttggaagtgctgagcccaccaagacccgcaagtccccgagcagcgacagctggacgtgcgcggacacctccaccgagaggaggagctcggacagctgggaggtgtggggctcggcctccaccaacaggaacagcaacagcgacggcggggagggcggggagggcaccaagaaggcagtgccgccggccgtgcccactgatgatggctgggacaaccagaactggtagggcccactgcgcccccgtccccagcgcccccgggcgacttcgtgtttgcactctgccctcgtcgttcctcctccttccatttgacccaagaatcagcaactgcagtgtgaggacagcgtctcgggaggcaggaccctagggagacccgggtgtgcgccgcctgcgcgtggggagtcttcggtgcgtgggggcggcttgctgtccagcctgtgtgggggccgtcccgtcccacactcccctgggcattcttggactcaaggccggggctctgcgtggcttgctgggaggtgggctgcagcacagaggcctgtgactgcgttccagcggccagttcactacgcagtatctctggggcctgggaccagccacgtgccgagctgtcagcgacgtgaggtgtcccttctcgttgagatatttaactttggttttgctctagttctttctttttgaagagagtgactggagtggtaaagatggaaatgctggaaatgatactggcgctcacgctgccatccgaccaccctcggctcccgagtccacgcctgcctgggcctgtgctgtcagacccgcgtcggtcgtaaccctctgtggctcccctgcatcagcaccgtcccaccaccaagttcaccaggttcaccagacacggcctccacaatagccacacccacacctgagctgttctcagtgctggaacttgaccatcctggaacaccctggaagaaaaaggagcgcagggtgggccctcggccctgatgcaggagggtgcgatagcggacgtggccaggcaggaggggccgggttcaggagctgagcaggggatgcctgtgcgtggtgcctgggtctagggaagctccagccccaggatggggctgccctgcacaccggtgcccgccacatgccaaccctcacctccccgaggactggatgatgtgctgccacgtgtgactcgtctcccttgtctgccctgtgtgaccctcagtcttggccagccatgcatgcgcccgaagctcgtgcagtttgtacgtgaggtgctctcctccctgccaccatgctcatcactctggccttggccatgctccctggtcaccccacttcccggtcgccgtctgcagcactcctggagcagcctgggcccttcagcccctgtgctcgtcccaccctagggactcagccacttgcagaacaggatgggaccgagatttcagcgagccctcctggcgcccggtcctccctgtgggcaccagccctcttggtagctggtgtggagggccggtgtccttggttgccacggagggatttgatcaccgaagcagccacctgctgtagttggacctgaggtcagaggcggggcatcagaggctcaaggtgctgagaagccaccgggaaagcagccagcacaaagggcccaggaagccagcccccgagagctgagcgtgggggtctttgagtgtctttctccaagctgagacgtgggcggccgcgtggtatctcccgagggctgcttggaccctggtgggctgagtgctccgaggaggggtggactccaccttggacagtgggatgtggtgttccacatgtgcctgtttccacgccagcaccttgacttggcagcatggagccaaggtgcgggcaggtgggcctgggaccggtgctggggcctctccttgctgtgtgtgagggcccaggtggaaggcgcggacctgacagcattccaataaagcatacgggaacatg

SEQ ID NO: 503 - DNA, 2471 bp, Homo sapiens
gagagcaagacggcagcatctacggttctttctgctcaggaatgggaacccagagtgggcagtagagcggaggcaagccatgcagaggcaggagcagatgagaccctagatgccacgagaagctaaacatgtggggaaaataaagagcagattaactcaggaaaattatatggggagctcttatgctactctgaagatctgagactcgttggagaatttacaatcccaaattaactcagggagaattccaactagactctgaaatgaattagatggagatttaaaatagggcaatttagtgggaagagatacttaatttgaagacagaatcatgaataaactggaggataagcaggaccagatgataccatgaagagaagtttacaggccctctattgccaactgttaactgtcctgctgacggtgtgctgcatgaagaggaagaagaagaccgccaacccggagaacaacctgagctactggaacaacaccatcaccatggactacttcaacaggcatgctgtggagctgcccagggagatccagtcccttgaaacctctgaggaccagctctcagagccccgctccccagccaatggcgactatagagacactgggatggtccttgttaaccccttctgtcaagaaacactgtttgtgggaaacgatcaagtatctgagatctaactacagcaggcatcactttgccattccgtatttttcgtctctaaattataaatatacaaatatatatattataaatataacctttgtgtaaccctgacttaatgagaaacattttcagctttttttcctatgaattgtcaacatcttttttacaagtgtggtttaaaaaaaaaaaaactttacagaatgatctgtggctttataaaataaaggtatttctaagcaaagcagttgcattgattgcttctcttaataactattcttgagcacctggggatcccaggaaccctggtcaggtgaggtaagagactgacctcctgtagaagctgaatgttacagtggtcaagcgcacgattctttgagtgattcttaaagctctggttcctcttgatttggtgtgaccccatttcctcccttctcatacgcacacctgtaaagggaactggaccgcctcaggggaagacggcagactcatgcacagagaaggaaaagggaacatctcatcacctctgaggatgagtaccctggagccttatgacggcaccattggatgtcatgtttaattccatccaagttgtggatggcaggcaggagcatggagccctcaggaatccatggaggacatcaaggcatcccaaggccatattcccctaacattacttccactgctaacaacaggactgcctttccctggtgggaaaatgctccctttatgcccattcctgtatcccctccaacacccacatctgcattaaacacccgtgcctttctcttggagagggtttagatgcagatcccggccctggagctttaaaatgcttgcccttccttcttcaaggatcaaatgtttattggggttcagctttgttttctcaaaaggccatggtatcgtgcccctgaggaacatgtttatctaagaagctttgaggtagtagagcgataatttttgaaaccttcctcctgcaatctttaaaaaagaaaaaaaagattgcccaaacaaatcatttgggagaagacatcattatactcctacttggcactgcaaacctgctcgcagcaccagccggtggacttgccatccagctctcagcttccactgctccccttgttcccggccggctggctgcctccccgtgctgtgtccagcacggccaacaacgtcagaccctcagagacgcccaaggggcttccagaggtggccgcttctctattttttcctgattgtggctgagagagatgattactgctttgacacttcctttctctaaaagaaaaatagtttgatagtatattttgaatatagatgctcttatagtcagattgggaattgaacttgaatattgggtcatatgtttgtgttgttgctgtagtctatcatgacttttttctttctgcattttccttaaaaaaaaaaaaaagatggccttcaaaagtgtgttctcaatgttgtatgaacctccttcacatgagttcggttgttgtctctcttcaaagactcttcaacccacaaagaagcaactaaatgtttctctaagtttaattttctagcgtgttgttgtcttacctttttaaccttaccataatatttctgttaactgttacatttaatataccaatgtgtgtaagtatacagagaaaaatctgtttgtaaagtaaaatttatatataatatatgtaatcaaagatacatatgttatatatacatatgtggatgtatgacttatttttccttatccacagatttcagctaccatgtatatataaataaacttattttattagcc

SEQ ID NO: 504 - DNA, 3724 bp, Homo sapiens
atccagcgcagccgggagacagatgcgaggcggcggtcagcaggtgccgaacccacggccaggcttccgtggccagcagccctagaggaatggccatcctgtccctgcgagcccctgggccctggcaggcgatgcaggtatgggcagacaggacgctgttgactccgcacaccggcgtgacttctcaggttctcggggtggcagctgcagtgatgacaccgcttcctggtggtcacgccgcgggcaggacgcgggaggccaggtgggatgctatggaatatgatgagaagctggcccgtttccggcaggcccacctcaaccccttcaacaagcagtctgggccgagacagcatgagcagggccctggggaggaggtcccggacgtcactcctgaagaggccctgcctgagctgccccctggggagccggaattccgctgccctgaacgcgtgatggatctcggcctgtctgaggaccacttctcccgccctgtgggtctgttcctggcctctgacgtccagcagctgcggcaggcgatcgaggagtgcaagcaggtgattctggagctgcccgagcagtcggagaagcagaaggatgccgtggtgcgactcatccacctccggctgaagctccaggagctgaaggaccccaatgaggatgagccaaacatccgagtgctccttgagcaccgcttttacaaggagaagagcaagagcgtcaagcagacctgtgacaagtgtaacaccatcatctgggggctcattcagacctggtacacctgcacagggtgttattaccgctgtcacagtaagtgcttgaacctcatctccaagccctgtgtgagctccaaagtcagccaccaagctgaatacgaactgaacatctgccctgagacagggctggacagccaggattaccgctgtgccgagtgccgggcgcccatctctctgcggggtgtgcccagtgcggccaggcagtgcgactacaccggccagtactactgcagccactgccactggaacgacctggctgtgatccctgcacgcgttgtacacaactgggactttgagcctcgaaaggtttctcgctgcagcatgcgctacctggcgctgatggtgtctcggcccgtactcaggctccgggagatcaaccctctgctgttcagctacgtggaggagctggtggagattcgcaagctgcgccaggacatcctgctcatgaagccgtacttcatcacctgcagggaggccatggaggctcgtctgctgctgcagctccaggatcggcagcattttgtggagaacgacgagatgtactctgtccaggacctcctggacgtgcatgccggccgcctgggctgctcgctcaccgagatccacacgctcttcgccaagcacatcaagctggactgcgagcggtgccaggccaagggcttcgtgtgtgagctctgcagagagggcgacgtgctgttcccgttcgacagccacacgtctgtgtgcgccgactgctccgcggtcttccacagggactgctactacgacaactccaccacttgtcccaagtgtgcccggctcagcctgaggaagcagtcgctcttccaggagccaggtcccgatgtggaggcctagcgccgaggaacagtgctgggcaccccgcctggcccgccaggacccaccctgccaacatcaagttgttccttctgctccggagacccctggggtgcggccctggccccctccacccctgctgggccagagcgggtgggcagtgtcaaggcccgctgtctcccaggtgcttgctgggactcggggcggctgcacctggctgtcacctgggtgtgctgctgtgaggggtccttgcgtggcccccatccttcccccaacgcagaactccatgggcagggagctggggggacatctcacctcccccatggcacagagccctccacacccctggaccagggcatccgggccctagaaattccacagctcccgtcctggccaccctggaagctcatcaggccaagacccggacagagcttcagaggagtgttgagtgacacctgaggatgcggctgcacacactcagccaagggccgagtctcacctgcggtggggtttcggctctgcctgggggctccatccctttcagccactcgtggccttggggatttctggttgtccccagctgggactgttcacagttgtcacctgcagacctgcctctccctggcctgaggttcaaaggcctcatcggatggtcagtacagtggggtcacctgttgtttctatacaacagcagggaaggggccatggagcttttccctgctgggtgctcctgctttggcccagcccacctttcctggtgctccaagctaggaggctgtggccccagcctgaggagggtgtcctggcctccaggtgtgcagcaggggctgtgtgctgggggaggttccagttaggcgatgggatcctgcagtggtctggtggcatttcttggaaccagatttacctgaggagctctgtcctgctccctgtggagggctccagatagctcagaaatgaccagccaatggccttttgtttgggggcctgaggtcaagagagctgagagtattcgctcgactgagcacattcaggaagatcagggcaggcgtgtgggaggtccctcactccacgggacagaggcccctgggcagcagaggaaacctacagctctgggtgaggggacacttggctttggtgtttgcactttacagatcctgcggtccacgaggggcctcaggagaggacgtgtcaggacgtggcttcccagccttctgccttgggcagtgggggtgctcctgtctgtccttttcccccacaccctggactgtgcttggctgttggtgcacatggttggcacacggtgggcagagggcagagaatgccactgcttggttattggtcccctttgaccaggaaacccaagaggagacacctcagtcagcagaaaggccacctggctcactggctcattccaggagtgggagagacggcagggtctcctctttgtcctccggcatcaggaaggggatggtgtccactccccactgtggtggctttaggcaaggttcttattgtctgctctgcctcggtttccccatctggaaaatgggggcaggggtcctgacctacctcaggtggaacggtgagcagggaacatgtcggagtccttcagagaatgtgatgtgaggttggatcaacagtgtgggttcctgtcctgtttccccttcctctttggggctgaggaggaggttaaaggccaaatgctgtttcccaacaccccaaagtctgcacacgtctcatgaatgcatcacatttctgtcatatggatattagccattccgaaatctgtgtaatcaacttcacattattcaagttacaaatcactgtgtccatagaaaaactgtgctggtatttgctggacaaagggttgggccccttttatttttacctgccacccagcatctcccccacctgccccttctgggtgacacagccggtaaacggaatcacgtatggttctttctgtgggtctgtggcacagcaggaagagcccggtgccgccagcaccttgtggaagaccacacatgggtggtcccacagcatgggaccaggctggcctgagggatgcccagttgtaacaatgctgctgtcactgtctcattaaatatacatccttt

SEQ ID NO: 505 - DNA, 2906 bp, Homo sapiens
gatttctagcccaaccaggctggtggcctctaccatacatagaagtaccatccacccttacagtaaaagcctccctcctgctcacaaaggaagcctaaagcccaagatttccctctccttgttttattcatttttgcacatctctgttgctctaacagaaatgaactggaatctgcacaggttctctcctgccctgaaagttctgcctggtttccttggcctctgatggcattgaagctttcacaatccctcctgcatctccaccttccctgtcttgctccaggctcctggctccatgccttcctgtgtcaaaaaggctttgccaagaattacttcacctcctaaccaggcttctgccctcagggctcccccagtgtcttgggagtgtcttgggccacacgactgcctcttagaaagttccaaccttgcccccaattcaaatttctcctcccctctttccactctccctcccagaaactcctgatttccagaaaacctcagatttccaggccaggtcactcattccttcctctcatctccctcttcctccatctaccttcctccattcaccttcctccattcctaatttcttttccctggtcttgctataatctccagctctaaaaatcagagctctcaatgaaaacaatggaagaataagacattctttcggtcttctgtttgcctcactggtgtatccttcatctcctgcccctgtgagttgataccccagtgcacggagccaagggcttttcccctctgagctctgggagggaagggaatggagctctgggtttgagatgtcatggcctgtgatagtcagtttggttcctgccactagcaagtcccctgaagctcccaacccagcctgatgttagcccagaagctcctgctctggccaaagactcctatccttgagggctctcagccactgctccaacacacttgcccccttcctgcttgtgtatgtcacttatcctcctttgtccacaaagacttgagggcctcctgagtctccaagcatggaggaatatccatgccaacatccctgccatcaaactcaatccattttcttcagagataccttgtctgtcaccagcctccaacttcatattccttccacaggcaactgtgcacttgacccaaggtaaaatgaaagggctgccaatcactcggactccagaaggtgcctgccctgagaagagctggcatgttacctcccacatacatttcctgtcatcctgtccgaatctgggaaattttgcactggagtattttcaagaaagcgcattgtgttttaatgaagtatttttcagggttccaatgttattttttataaatgcagcattttaatggcagattcaatatgaaggacatgtcttcctgggctctatatttgattttggaaggcagcatactctaggagaaaaaaagcatagggctgaggctctgaagacacagcttccagccctggctttgtctccgagggggagtcatgttccccactcagtgcctcagtttccccatctgtaaaatgaggggctttgactagatgagctctgaagtttcatccagctcttacactgtagggctttcattccctgccagcacctgctctccccgttcctccccacctccactgagctgcacacatcccacaatgcctgccccacagcgatgtcctcagatgtcctggacagcccccgcactcctcactagagcctggggtgggcctgatgggctcggccacccagggatgccctcgtacctgaagtttaagggcctaaccattcaataggtcaccaactgtgtgccatggaagccctcttgtaaagacacacctaaaccatcctaagtgactgtggaattctggggaattctgagtttggagtttccatttggatacggtccttatagctggagggaggcggttccaatttcagagagggagctggctggagagaaaggtctggaggttggcccataagggcatgaagtttgtacttgagggcagctgggaaattcatttcaagctgcagaggaacgtgttcacaggctgttgtgtggcaatgaatgtcatgataacccactctggaatatgtgtcctgaagaccaagtctggacactgaggctccattccaactggaggaggaggcatctccatctgggctgctaggaaggggcactcatcccatcctagtacctttgtagcccttcgtcatgacactaccgtcctcccggtgaaggcttgtgaagcaagaatggagagtccaagtttgtgatattcaaacccatcttgtaaatcagcaaacacattaaccttccatcagtcagagaaataatgttgtggctgtgtgtttccttaatgctctccctcctgagggaggagaagaccctgctcaactttgctgcccaccctgcagtgacccctgaatgcctcaccatgggaggactcattcattggctttgtagtggcaaatattcctctagttctataactcaactagacattttgtagtaaagaattcttgaaattctctaataaaaagcaattcttactgtaatatttttagtttggggacacaatttcctaaggggggattaatgaacatttttatgcattagcccaatttatgaattccatgtttattatatggtagtactgatgaaaagtacctttctatctgtatctttgcagtttcttcgttactcatatgtaagcctcatggtaagcagtgctctagtaactgcttctctgtacaaatctcatcgttctacttacctgtcaaagcacattctacatgtactgtaaacagatacactttagtaagacttagtcttaaggatttttccacttttgtcagtaacagatatttatggattaaaaaataaagccgtttcaacat

SEQ ID NO: 506 - DNA, 3684 bp, Homo sapiens
cgtataaaagcttcccagattctggcatcaagaggagctgaacttttccaggccacaattgtaaaagctgtaaaggcaagaattgaggaagagaagaagtccatggaccagctgaagcgacagatggatcgcatcaaggccaggcaacagaaatataaaaagggtaaggagaggatgctgagcttgacccaggagccaggggaaggccaggacatgcaaaaactctctgaagaggatgatgaaagagaagcagacaaacagaaagccaagggcaaaaaaaagcagtggtggcggccttgggttgatcatgcttccagtaggttttctcgatcctcttacaacctcatcgactctaacccttatatccttgaccagaattcaggcgttcccgtgacccatgtgttccatgcatggtttgatccttgtgacttgatagggggtcggagtgtaggaaaattttaatgtcagtgggtctttgagcccggggtccaattcttccagagacatcagcacagacgttctgacattcttgtgctggctgtagaaagccaaacacgtggcttatagactctagggcataatttatgggctcagaaagggaagaagaattgaatattatattgcccaattctgaggtcgagagccctattcacatacatattttatggctaaatacccttactaaaaatgagcttgggctccaccttggactctgatttaaggatgatcattctattcaaagggtcagtgaccctttctctgtaaggcactaggcatggatgccagtgagcctcccctcccctcattcccacagctttgattttatttgcatttaaggatttttggcaatttattaaatagaaagatgagggataacttaaaatgcactcactttcttactacgcctcctccccaatttcaaaaaggcactctaaattccaatgcccacatgtggcacagccttcaagccacctgatgctcagagacgaccaatgaacagcaaaaaccagaaaactatttttaaaagcagatcctgatagccacatagaatgcagtgtgtttccctcctgatcataaagatgaatgaggaattctggaactcagtggctatatttgctctgcttagcaaagaaaatatcactataggtcgatgggattatagtggaatgccccattccaatccagtcctctttaaatttcatagaatattgaataattattattttgcaagttacgtataatgtcgtcttcagtctttacatgatgtctccatacttgcagctaatctaactggacaaggaatatcactgagacaaataacatcacacaattgtaggagtgaatccactaggaggatatttagaatcactaggaaatcaaataaagtagaacttcttcccatacctaattattggtttcacatagatctgacgttggcctctctctcccaagacataattttctaaatcggcaagctagtttttaataaagcaatatttgaaatttgcttggtatatctggatgtaatcaaatttaatcccaaatattgaatttcaacattacaacaaaaaaagaaaaacacaagattagaaagagttttatttaattttctccccaagtccaaagacaaaagattccagtcggagtccagtgtgactcttctatttactgttcagggtatgacagtcacgctaacaatctggtaaatgcagtgcacaaatgcctatttctatcaagtcacaagtaaactgtgcttttctttatgtttttaaagggcctctgctaatttagagagacctatccatttcaaaattgtgtcatattgaatgttttttcacctcacctggggtaaattcccaccgcggtcattgtggttgcctttcctttcctcatgtaaaaatcgcatttgcaaaggaattggatatggtctgtgataactatcttacaagttgtaataatataaagaacttcctgtgaatgttgttgactttagattttctggttcatttcaccctcattatatcaagttattgaagattgatgttaaactacatgtgccttgttacaaaaccttatgatgcaataatgcagaaatgtgtgtaattcatagtttggaatcatattcagactgtggtgttaaattttttgctgcaaaatgtatttctttttacaagtgaatgaagaatgaaagggaaagaatgtgtgctgtattgttgtgtctatgatgagttccagaatttatctttagatctggaagtactttgttggaagcccttaatttgatcttttgagtaactgggctttcaaacagctatttcttagagaagccaagtgtaagaattagtgtagttggatacacatgtgtaaatctattgacaatacaaaaatgttgctatgttcttgatgttattagtaagcagtgaagattttagcatggtctgtatagggacagatttcctacttccatacctatgtacacacacaagattgcattattgctgttcaatgataccttccattccaataccttatgtttcaatattggttcagtactgcctaaattaataccaagcttcatcttattgataaatatctgaaacagaaggccaagttctgaggataaaagtagtggaatttaaaaagttaatttccaacttagtaatttagcagtaacatcaacatccatgatatgtatgtggacacaggctggagtcaggttcgccatctgagctaacaaacacgtgtgtaagagcttttctactcactaatttaacagatggcatgaatgaaaatgtgctctgtcattttcctagtttcatttcaataacattttataaggaaataagagacttttttacattttcttttttcttatgtgataattccactagctcacataaatattggtggtttctaatggtaaaatcaatgttaccactgcttgagatgaaaaccttttgaacttgtccatatgaataaaagttatcgaaggtatgattgaatacaatttaagctaatgttgattttggaacctataatgagggtaaaattctcgatcttataatagtctgtgttttcccaaacgaccacgtgatgtagagtccacatcactttcctgcaaatctctcggtttatgtgaaggcattactttaatggtcttcttcactatcaaatgtaatgctgtaactttggtttgttcttgcttattctcacttgtgttgtattgcatttatttcccaaggcctggacccagtactctgggcctggttctttcttcaaaatgaaaataacgaatgacagtgcttctgttcaaggatataaggcccaattcacccactgtgtatcttcatgaatggaggcttcagatttttctgaaatcgtgggcaaaattacttaacttttggccatgtgaagtgatattcaagcaattaattttaaacaagccaaggttttccattaccttacaatgtataggcccaaaagacaacttaagatcaaaatatgtcatccaaaagatgcctgagcatttgaaaacctgaatataatttgaaaatatgttttcctgcgatgatgggacattgcttgtagcatcagaaatgtatatgttgggcctcttttctctggtagactttaaataatgatcaaactgataaagatttaatttattaaatttccttaaatctc

SEQ ID NO: 507 - DNA, 2275 bp, Homo sapiens
actggaccagaggagttaagaaaccaagatggtttggggtatggggtggggacggcaaaaggggtaagagctggcttctgtagccacctgtcccttctatttttcagcgaaggtcagtgtatttagtgtaattaccccttctaaacagtgtcctagtccctcccttccctctccttgagtgcattttgaattaaagcctatattgaaaagaatggaggtgagacttactgatttgggtgttttcttacaggacggttttccgtctggtcgcttagctttgttaggtgagcctgtggctgagggaggaggccggtggtccactgctgacctcctgtgcttgtccttgggtagggttctcttctgtcacggtttaactcttttttctgcccgcttcctgcttccatctccctccacccttatcacagtcccagtgcttactttccttctttctttgcctggcctctcattattctatttctttcggccggcttttcttgcacatctcttttgtaggagacttaaatttggcaaacctgggttccatttctctcctgtcttttccccattttccagccactttgggagggagagggtgggcaaactgtaacctctttgtatcaattttcgtgatctgagagggtgaagacggtaatgttcttctactcacttcacaactggttgggtagctcagagggaaataagtaaaatgtcttgaggctgtggcagtgcttgattggttctgctgtgtatatataaatggtttctacacacggaaacagagttgtgagtcccatgccttttttggcggggggctatctacttgcctggtgattgccctttcccttacaagctgtacatcctctttaccatccctccttctctccttccacagctccccttccacctctgttggtttctgcctccctttgtttcctcagtccttatacccacaccctccccacggaagggcataaagaaaggtgtgaagtttccaaaggaatttctgttccctgaatagcaggtctgatgaatggaatctgaaggggctctgcagggaggagtatgatctgttgtccgagggagatttggggaaaaagaaatatttttaccagccatgaatgtggcagagaggacacatggcaccaataggttggttaaggggcaggggaggaaagactggtgggaagtgagcagctggagggaaaagaggagcccttggtgctgtagaactgcggggagaaaggcatgaagagagcaacgcccagaacatctgagtgagaggctgccttctgatgatgctgcaaaggagagctgcttggcttcaaggcacccaggattgattgcaggaatatctggatgtgagttagttgaaaaccgagtgttaccgcaagaggtgtaaaaatccaggttcatgtttgcacacatcaaaagtattgtgatattttcataaaagaatttctggaaaaaatgagtattaaccaatggtagatgcaactttaaatgctatcagtaagtcattttcttctgaataaagcctttcttaagaaagcaccacaggaaatagaacgagtactgttaatgatgaaaagaacttttgcaactccagaaagctaatgtctattggatttcttccaaagtggttaaaggtgattaattccattgtgctaacagaatattacttaataacgatttaatttgtctaaactgttgtgaatacaatccaggatacacttgcacagtaggaaaacattaataaccctgtgactgttactaagactatagtgtcattgtaatgtttcttaattctcctctcctttcttacctagtgtagtaaaacaggttatctctctcctactgttttgcttgctatacgtttaattaataataatatcaacattgtttccgcatcccaggcatttaagctaactcactgagcctcttaatattgccatgatgtaggtgcttgatactgtttgggtctgtgtccctagccaaatgtcatctctaattgtaatccccacatgtcgagggaggtcctagtgggaggtgattggatcatgggggtggtttcctccatgctgttcttgtgatagtgagggagttctcatgagatctgatggttataaagtgtggcacttccttgctatctctctctcctgccaccatgtaagacgtgccttcctgctgcttcaccttctgccatgattgtaagtttcatgaggcctcccagccatgtggaactgtgagtcaattaaacctctttcatttataaatt

SEQ ID NO: 508 - DNA, 2247 bp, Homo sapiens
agaacatatccgtgttcatgctgtccacgtatcagacagacttcatcctggtgctcaagcgggacctgccctttgtcacccacacgttgtcatcagagttcaccatcctgtggtcagtggctagactgtagcagccgagaacctcggcatcaccagtggcttcgtgaagcccaagctggtccagatgccggtcatccacccactgtccagcccgagcaacaggttctgtgtcaccagcctggaccccgacacgctgcctgctgttgccacactcctcatggatgtcatgtcctacttcaatggggccttggtgtaccttgttgtagtgtttgaaaacatctgaggctgcatccatctccagcaccccataaagcaacagcttgcagaacccggctaggaggcggcgccgctggtgtagccgctctatctgtaaatgatcctcctgggaatcacctggctcacatggaaggcaaaagggaatcacagacttaagcttcctgccctatatttctgagctacacccaagccccagcccttactgagccccaggtatagagtcactgcaccactgcccaggtctcccggctggatgaagacgtggtccatgaggaagctggctagctcagactggagagtagcttcaggaaaaaagacaagtggcctaaggaaatcacggcccccaactatcatctgagggctaaagatgagaagtagatcacttaataagacaaaagcctgtagggggaaaagaaaggatgtttaaaaggacagaatgtttcccaaggtagaaatgacactgtcaatttctccttggaatgggggcagggatactcgccttgttgctcccacttgagtcagtactcacctgctcctggatctcagtatccacatctgagaggcaactctggcagagttcacagaaggccaccattctgtccctcaaactcgacagctgcttctgtgggcacagtggcttgaaggggaagaatgaagacacagactcctctgttcccattatcccatctaagacccacactcacctgggaagcatctgatttagaaatgtgggttagtgtccagagaatggaaaaatagacaagagtcaaggctggcaggataacctgtaacaacaaagggtttgaaaaatgaggtttgggttaggagagggagagacagatagccagaaacacaccagtgaagaggagagaaaatgagtaaagggagagctaattccttttccagtggaaaatgagtgatattctggacattcttcagaggcatctacacgaagtagaaatgtcaccgctccctaatttactctacgtcttctagaatccctcaatattatccttggcttccaggaaatccaagaagaccctggaagtagagtccaccttctaagagaggaatgtaagaggtgacccccacccacctgatcttcctcgctttgtccactccacgcactgagacttgacacacctagtggccacctagaacgtaggtccttaaaatctagccccccagcccccaacccatctctagcctgtccactcacctggtgaggaacctctcctgtgtccacagccttctgcaggagttggcaacatggctcatagagctcccagcgagtcaggtcatgagtgctttgggggagaaaggggaatgttatactggaaaagaacagagggaaccaactccacagacaccagtaaaaacgggatggggaagaggaggaaagccactcacttgtagaaggcagagaggcgtttcagagtggctgccagattatatacctcatcctcatctaggaaggacgactgagaaggaaagaagatccacaacagcatttcccccagaactcatcagtccacatcccccgtcttgcagcccctcccacccttgtttggggtgtcccattgtccagccccagctcctacctgtaacagctcttcaagctcctgctggaagcggtcagtcagcaaatctactagctggctgcgggcaaagtccgcccggctgaagaaagtgaattcgggattacagagcaggtagagggcatgcgccccagcctcaagcaccgctggctctgcatgcttcaccaccacctcctggagttgctgcaggaacagctccaggtgctgagaagaaaaggcagaagatggtgtgctgtggggatgggaggaggacactcttctggcgggaagtggaacggggttaaaagcattaaacttcaaggataagatgcct

SEQ ID NO: 509 - DNA, 3550 bp, Homo sapiens
gtgtgtgataattctgtcttttgtcacagttgacgaagtgtgtgattcctacccgcagaaagcccatcttcccacccgggtttcttgtcttttctgtctgaagccaactccttcctcgggtctgtacccccttttccctcccatgcctctcgtctcccatgagggtaactcaggaccaaagagcattgtgacccttggagaaactgaggttggccagcaggtcaacctgacgatgggtcagggccatcgtctcattctgcgtggagcacggggacctttgtccgggcaggagtcgtcagcgggccgccctgaatcctgggagatgcttccctccacactcgcatttgccctgctgtggactcttgtatgtgaggcactcttcacttagggtgttgtcttgttcttttttgttttctgagacggggtctcattctgtctacccaggctggagtgcagtggcacagtcatagcctactggagcctcaacctcccaggctcaagtgatcctcctgcctcggccgccaagtagctgggaccacagatgcacaccaccacactggctaatctttaaaaaatattttgtagaggccaggcgcagtggctcacacctgtgatctcagcactttgggaggccgaggtgggtggatcacttgaggtcaggagtctgagaccagcctggccaacatggtgaaaccccatctctactaaaaataattagctgggcgtggttgtgcacgcctataatcccagccactcgagaggctgaggcaggagaattgcttgaacctgagaggcataggttgcagtgagctgagattgcatcactgcgctccagcctgggcaacagaaaaaaaaaaattttttagagacatggtctcactatgttgcccaggcttgtctcaaactcctgagctcaagcaatcttcccacttcccaaagtgctgggactataggtgtgggccactgcgcctggcccatttgtcttgttcttgaagcttccagtccagcaggccccaccgcatatccagtgctgcagagtgcagggtttgctctgcctgtcagaggagccagggcacagcaagggcactgcagttgggagtccactgggcgtcagtcactgcccccacccccacatcagccaaggtcggtctccgctggccttgcaccacgcacagagcactggctcatgccaagaagcagaattcaaactttgatgttgccgccaactagttttgtgatcctgggtaagtaagtggctttgaatctccaaatcctagaagaatgaccagagagtctgccacgggccagtccctgggctgcatgttgtaatggtatcattgtgtttcatgctccctcaagcctgttgctttgttttaaaggtgaggaactgaggcttgcagtttttgtgcagtcatggcaagttcagtggcaaagccaacgtcaagtttcagggccgcagagcctcttctgtactgcctgggtggcagtgctgcagggacccactctatcgctgctttcacattgcttttccctttgtaagcagcacaacccaactgttgttttttttttttttttgagtaggagtttcactcttgttcccctggctggagtgtaatggcacgatcttggctcactgcaacctccgcctcccaggttcaagcgattctcctgcctcagcctcctgagtagctgggattacaggcacccgccaccacgcctggctaatttttgtatttttagtagagacagggcttccccatgttggccaggctggtcttgaactcctgacctcaagtgatccacccgcctcggcctcccaaagtactgggattacaggcatgagccactgcacccagccttttgtttttgagatggggtgtcactctgtcacctaggctggagtgcaatggtacaatcacacctcatagcagcctccatctcccgggcttaagtgatcctcccgagcagctgggatcacaggcactcaccaccacagttggctaattttttgtagaagagggggtttcaccatgttgcccaaactggtgtcaaactcctgggctcaagcaatctgcctgcctcagcctcccaaagtgctgggattcaggcatgagccactgctcccagcctacaacccaactttcttttttttgagacagagttcgctctgttgcctaggctggagtggaatggcgtgatttcggctcactgcaacctctgcctcccaggttcaagtgattctcctgcctcagcctcccgagtagctgagattacaggcgcgtgccaccacgccaggttaatttttgtatttttagtagtgatagggtttcgccatgttggccaggttgatctcgaactcctggcctcaggtgatctacctgccttggcctcccaaagtgctgggattacaggcgtgagccactgcgcccggccgacacccaactttcagagcatctttggttcctggggtgagagaagccagaccccagcaccagtcctatcccacagggagctcggtgctgccacctctgcagctgcagaacccggcaggctctggagagctgctccccggtgggaggtagcagaatggagccagcgcacccctttcccgatgtctcgaggcccttctgctcaaaattcttttgtaggcaccggtaacctgattctaaggtccccaggagatggatcacctgatgacatgagaatgtcttgtttttggaaagcctggtcatgcaatttagcagaaggtttgcggtgaggtggaaggcatttatttgctttgtcttgctaaccctcaaaatcaaagcctgtcccagcctgacagcttccagcagaaagtgtcagaaccagaggcccagccaaggcccaggcagggcaggcggtcctcctgggccctggcattgttcttacaaatggagggcatggccatcttctctttcagggacaggctggcctgacatggaaggtgaaacaaggcagcagcccctgcctccaggagaactctgcagactgcagtgccggggagctgaggggtcctgggaaggagctatggagtcccatccagcaggttacagccacatcctctaaatgggcgcgatttgtcctgccacctagaaaaagttcacatgtggacagtgagcagccaaggtctcttcagagggaccccaggccagctggtccagcacaggctaagcaagggacccccagagcacaggcctcaagagaaggcctcagcaggcccactgccgctgtccagcttcctcgggccacacaccccgtcacatctgggtctgagaggccttgcgggaagacctcatgggacgcaaggactccctgggcagagggtgggcccctggtcctggaggcacagaatcctcgacccacacgactatgtgacctctttataactggggaagacttcgatgatgatgtgtgatctgggactggcaggttattaatcgagatacacttgttaggagggacagggttcccctaaggcacttttaaagatactctgtaagaaccattaacaataaacttactgtcaatc

SEQ ID NO: 510 - DNA, 3693 bp, Homo sapiens
ggccttttttttttttttttttttttttacaacttttcagaatagatgaacactgaagcttcagtgtttaaacctctcctggtgttttgtgctcaagaagttggtatcgggttgttttaacagtcgtcatctttatcaagtaatacggaaaaactgggcagagcttttaaagaatgaatgacgatgacacaggcgttttctgcttacagatttcctcacatccttattaggctattaggatcagctctgtcgtgtgctcagttttcatgttttcttcttcatgtgaaggttgtagctcaagaaggattgctgtactctgacattctcatcagagtttcagagtccatctgatttctttcagcagtaaagattgtaactactcattggcttttagctagcatttcatttttaatggctctaccattttaaaattctccattctttcatggagatcagtttatcccagggatgtgtgtgtacacgtgtgtttataaagaacagtggatgagctgcttcactcaggttttcaacagcagcctgaaactctacttcatacaattttatatcaagtcagcttttctctgtggccagaccctccgtcttagtgtttctttcactggtggctgggaaggcatcccttcagcggggaaggcactgtgcctcatgtttaaaatgttctgcattctcctacagagtttctcgtgtgggatgatgtattctgtgatccaactctgaccagctgaaatcattttctaattttagcataaagcatacttcctttgactttttcaagaaaggagaaacaaaaccagacactgctttgacgttgttgctagaagggatgtcttacataattttatccatctatacattatttcctatgaaaagatgaccttacagtggcttcatagcatgacctgcatctcacacaattccctcccccatgcagggactagaatgtgatcgttgcaggaagttgatggcttctattcttgaaattgtggcattagctgctgtgtggccgtccctctcagcctgtgttttgaaggtcgcgcacttcctcagaatgccggccccactccgtttccagttcacagcgccacgcagcttgttctcccattaaatgcaccttactattgttggctaatttgaggtcattattggctgattttgagaatgacttatttaacttttctcatttaactgtcattgtgatggaatattttgggttttccaggaatataaaatgcattaatggcacaccgctctaagaagttaatttttgattaactttgttttgattaaagttgagttttctaagaacataattggttttaataccagggtttggcagtgttcagtaaagagccagatggtaaacgttctctgctttacaggttcaggcctcttgcagctgtactctgcccttggaacacaacagcagttttagacaggcacaggcctgcctgtgtgccaggaaaacttttttaaaaaacaaaactaagcgatcaggccttagtttcgcccagtactttatcaccaggtgaaggataatacgtggctgggggggaatcaccttccttcttacagccacatgccctgtgtgcttttgtgaaattctcatctttttactagatgaagtaccttttttctataaatgttactccgtagctaataaatgtggctagtggatgtcttttgagtgctggggccccagctagagctgcccctcctgtctggggcagacgccgtgaggagccccacgctcggcccaggtggcgcgagctagtgtttggccccaaaaactgactgctgagagccagagatacgaatgaaatgataaatcctgaggtttatttcacatggagtgtttaaagagcagaaggaagtgcgtgataagtgccctttcgcggtgagcacgcgagtctcatgttctctgcccttcccgctctgtgcccttggcagctcccctcccacccggtcactccgtccagcaagcacgcagacagcaagcccgcgccgctgacgcccgcctaccacacgctgccccacccctcccaccacggcaccccgcacaccaccatcaactggggacccctggagcctccgaaaacacccaagccctggagcctgagctgcctgcggcccgcgcctcccctccggccctcagctgctctctgctacaaggaggatcttagtaagagccctaagaccatgaaaaagctgctgcccaagcgcaaacctgaacggaagccttcagatgaggagttcgcgtcccggaaaagcacagctgctttggaagaagatgctcagattctgaaagtcattgaagcttactgcaccagcgccaaaacaaggcaaacactcaattcaacatggcaaggcactgacctgatgcataatcacgtcttggctgatgatgaccaaccaagcctagactccctggggcgtcgcagtagcctttctcgtttggagccttcagacccctcggaagactctgactatgacagtatatggacagcccatagttacagaatgggttctacatctcgtaagagctgttgctcatatatctctcaccagaactaatgcacttctgagcttttcttaacaaatgcttgttgtatcgcagcctgcttttcttagatgttttcttgctgttccttgtctcttttatgtgatattttaacaacttttgagagtgttcctgatatttcccattgtactttgtggaggcttaactgccgatgcgagtatacattcgaatgactgactgttggagggaggtggtgtgttcacgtgagcctacatccgagggtgctcttcgtaaggggtagttgttgttttatagctccaaatggtttttttattctcagtgtagcaactgtttgatttctttctggatacagctgtatgaacacttttctattttatactgaaatcacacaggtttgtgatctaagtgccagaaccatggaggagactctggccttatctgtagggacctaaattttttaagtgctatgaacactgatcaagtagttgtggagagatgagaagaatatatgcagcaaaggtgctgtgagcccagttccaacggctgtgttctggtaatcgtgcagaacagcatgtgggctctgggccttggcaggtgcacagacgggcgggcgtcacgtgtgttcagagcttgtctccacctcacggctctgtgctcttctgtgtgctgcgttgtggccgtgaagtgggagctctcctttccaaaggcagagcttactgtcatggctcagatgttcactcgcatcttcaccccaaacttccctgaattgcagtgatttctgttataaggcacatagcaagcctgtaccactctacagtaaaatctctacactaacagtttaaagcccgaaagctgaagcattcagcctctgcaagtgtagactactggactgtagtagaggcatttggaatacttacaaagtcaagtgctgtggcttcagttcccccggctccccacccctgacatccatacttatgttgtctggaagagccatggacacatcattattttcagcaaccagctgcagtgaaactccatttacagcaaccccatagtataaaaccacaatgcctcattgtaatgggatattgaagttcattgaagaattactaggttgccatgtggctcacttattt

SEQ ID NO: 511 - DNA, 2664 bp, Homo sapiens
agttcactcagacacgcagctggaccggacagggcggcttccgggtttggcgcggcctttgtctcttgctgcagccggagctccggtctcgtcttcactgctgtttgtcctctgctcctagaggcccagactctgtggctctgtgacctgcaggtattgggagatccacagctaagactccaggaccctctggaagcctagaaatggtattgctgtgtctaatttagacctgatcacctgtctggagcaaggaaaagagccctggaatatgaagagacacgagatggtagccaaacccccagctatgtgttctcattttgccaaagaccttaggccagagcaatatataaaaaattctttccaacaagtgatactgagaagatatggaaaatgtggatatcagaaaggctgtgaaagtgtggatgagcataagttgcacaaaggaggtcacaagggacttaaccggtgtgtgacaactacccagagcaaaatagttcagtgtgacaaatacgtgaaagtctttcataaatattcaaatgcaaagagacataagataagacatactggaaaaaatcctttcaaatgtaaagaatgtggcaaatcattttgcatgctttcacaactaactcaacatgagataattcatactggagaaaaaccctacaaatgtgaagaatgtggcaaagcttttaaaaagtcctcaaaccttacgaatcataagataattcatactggagagaaaccctacaaatgtgaagaatgtggaaaagcttttaaccagtcctcaactcttactagacataagataattcatactggagagaaactctacaaatgtgaagaatgtggcaaagcttttaaccggtcctcaaaccttactaaacataagatagttcatactggagagaaaccctacaaatgtgaagaatgtggcaaagcttttaaacagtcctcaaaccttactaatcacaagaaaattcatactggagagaaaccctacaaatgtggagaatgtggcaaagcctttaccctatcttcacaccttactacacataagaggattcatactggtgagaaaccctacaaatgtgaagaatgtggcaaagcttttagtgtattttcaacccttactaaacataagataattcatactgaagagaaaccctacaaatgtgaagaatgtggcaaagcttttaaccggtcctcacaccttactaatcataaggtaattcatactggagagaaaccctacaaatgtgaagaatgtggtaaagcctttaccaagtcctcaactcttacttatcataaggtaattcatactggaaagaaaccctacaaatgtgaagaatgtggtaaagcctttagtatattctcaatccttactaaacataaagtaattcatactgaagacaaaccctacaaatgtgaagaatgtggcaaaacttttaactactcctcaaattttactaatcataaaaaaattcatactggagagaaaccctataagtgtgaagaatgtggcaaaagctttattctgtcctctcatcttactacacataagataattcatactggagagaaaccctacaaatgtaaagaatgtggcaaagcttttaaccagtcctcaacccttatgaaacataagataattcatactggagagaaaccctacaaatgtgaagaatgtggcaaagcctttaaccagtccccaaaccttactaaacataagagaattcataccaaagagaaaccctacaaatgtaaataatgtgtcaaatcctttagtgtattttcaacttttattaaaacacaagataattcatactggagagaaatcctacaaatgtgataaatgtggcaaagcctttaactggctcttaatccttatgaaacaaaagataattcatactagagagaaaccctacaaatgtaaagaatgtggcaaagctgctgcagaggctggagttccggctggtgcccgggcagcgcttcgggctgcaggagcaggccacactcaagccactggaccccgtgctgtgcaccctgcggccccgcggctggcagcccgcacccccaccacccccctgctgagggggcctccaggcaggacgagactcctcgggcaagggccgtgcccgcccacctctgctgcccacggccacccacccttctcccctgccccgtcccctgggccacccttcacgctggcttccagcgggccctctgccgaccgcctgcttcacacccctcagcgctccctgtcgcctgcggactccatggcccttcctggactggcccttgcccaactcccagccaccaccactgtccctaccactgagcccttgcacaggccacttgctcagacgagacaccctaactcttgctcactccctaaagccctcttcaggggtcacctcctccaagaagccctccttgccaccccccgccggcaggggcccctcctctgtgctccctcggtcacctgtgctacctctaacaccacactgaccacactgtatcgtgagtgtccgttgacgtgaccaattgccctgccaggctgtcagcgcctcaagggtagggtctgcgtgtgatttgtctctgagccccctgtgcccacccagggcccggcacagagtcgatgctcaataaatgtgtgttgactgc

SEQ ID NO: 512 - DNA, 2843 bp, Homo sapiens
atggggtctcactgtgttgcccaagttggcttgagactcctgggctcaagcgatttgcccgcctcagcctcctgaagtgctgggattacaggtgtgagccactgtgcccagccctgagatgctttcttctcttgttcgtgcaccttgttctttgtaagggcttccagagacgctgactggtcatgttctctctcaactcacagcctcaatcctggccctgtttctccaggcctggtgatagggtctgcctcccagcccctccctccatgaactcatcccttcctcatgcagatcactcggcagcagtaccagaacgggctgctggcttctcgcatggagaacagccctcagtttcccatagacgggtgcaccacccacatggagaacttggccgagaagtctgagctgcctgtggtggacgagaccacaactcttctcaacgagcgtaactccttgctgcacaaagcctcccacgagaatgccatctgacaggagggcccggggccccctgcccaccctgcgggggcctccccagtgggcccacatgaagagagggaacctgttagtccagaaaggatacggatagatagcctgtctgactgaacagccagatggcccccagcctatgggggatctggcctctgccagggacctctgagtagctctgaggtggcactgtccagccctggatagggggggcagtgggccagctaccgtaagcaaaggctgttttttactgagagaatttctaaagtaggctcatcacttttttttaaatatcattttgggaagggaagacagggttaaggaactttatttaaaaaaaaaatatttttttcctaaaaactataaaagaggaagggtttcttgtcccgggaagcaacggacataatctgttcccagccatggccttccagcttgtgtccctgattcagggagctctcccttcctcctcctcctcctcctccggaggtgggatcccagagcctgccagtggaggcttatctgttgggaggaagacagctcttcacagaagcaaagaacaaaatggcatggagatcagctgcctgagcacctgcgctgtagcttatctgacaacgctgaggccacgagctcctgggtagctgtgatcagggacatgataatctgagctatgcagaggagcacatctgttgtcaactgctgtacccagaaatctagaactctgccgacagcctctcctggtgagtcgggactcagctgaggacacatccccaccctgcctcccatctggccctttggacaactggccctttgtgacagggctgactcaagtgttaggcagggtctcaggcctttgattgctcacccctgctccccaggccctgccctcacttttaccaaaggttctccctcggcgggagggcatctgtgttggaggtgatttgtctgggttcttccttttggttccagaaggaactgtcagtcatcagcatctgcgttgttagcagtcagtaccacccccgccccacaatgacagtcaaggctgacttgttgactgaagcctttttcccagaccccttatttcgaatccccaagcttcagtccctcttgggggtggagacaagaggacatgtgggaagccacggaagcaggttctttatgtcctctcctctgtggctggcaaggctcacctggccttatccacccacttatggaacctcaggagaggagggctcctcctaaaggcatgcagcttgcagcccctctttctcacacgtgtgatcctagcgtgagaggtcatcctgcccttgctgaagttagtagtactgtactaagagctctgccctcatgtgaattcctgccctggcgcctcttccctggggctgaatcaggccctgctgcaaaactccaggcttcccagggttggggaggctgtgggaccaaggtccatgttggtccttccactgggtgcagcaggagctgggtcccgagagcctggcaggtgaaactctgcaggccttccgcctgattattatttattcactcctttcctcaccccaagtgccctgctctccaggtgcctagagtatcctaactcttaggaccagggattgtcttgcaccaagtatgcctacccctggccagtctgaggtctcctagccatagaactgactcctggaagcctggagagaaggtggtgacacccatgggttctcaactgtaaggaaaaaagacaccagacttttgttccctagtgggggaaagcccttagtcttgtacaggagcagcttgctcccaagtccttttggaagctggcagagctatattcctgacagccctgactgccaggtagagcaaaagacattggtgggggtatgtgaagcaaaaggggcaggtgcacacacctccacagtgacctctgtgcacacggttaccaccaactggctggccctcctcctcttccctggcccattgatcatcccttctcacagagggtcatcattatttccaaatattgtttgtctgatgacttcctcttcccagtgcaatttttcccttcctatttcaacctctggttcctgggatgagccataccctggaactggcccacccactgtgtcttccacgtaagggagacctttgcaaagggcatccaaatgggtaggcaggtgacagccgccgtatttattttgcataatattttaatttgtatatttttgtgatttattttggcgttatgagtttgactctcggggagttttgttgttatgactcttgtgtcttttgtcacaaaacaatgatatttgctaaacgatatatggaatttatttttgattggtaataaaaaatcaaatatgtat

SEQ ID NO: 513 - DNA, 2140 bp, Homo sapiens
agaagtagacaattcttcacgggaagacaacggaaatccaaggaaagctacgaaggctgttatcagagaaaaatttcctcgaagcactttagctgtcactttgaagtgttagtgacatcctttggcagtgattaaatgtgccacatgccactaatcttgtttagaatccttaaagaggacagcagcccttacacaggatgcttcgatctgatgacgatggtgtttatgcagtgatgtgtggctcacaggcacgtatacaacaccatcaactcttccatctcatacctcatcagagctttccatctgatcccatttggagaaggatatcacacctgaggaatccacgtgtaagctattgctcttgtatgagttcaggtgcacacgcactgtggacgcacactgcactgtgccccccaacggctgacaacgtggagccgggatgcaggagcatccgccttctccaagtgagttctcggcactgccgtgctttcactaaccctttatttacttctgctagtagactttcaacgccactgagtgctagaagaatttaagaatgttaaaatagatatgatgagaatactgttttttgaacatcttcacatatgaagagtaaaagtcagaggatagagcttcggattatctcatagaagaaaaacaccttcgcattacatgtggcatgagccattcgcgggtattatatcttcttcatttgctattgttttcttttaaagcatctcaccaagcactcgcttcactgtgcattttatattctggttttatttcccagttcacaattttattcagaatcttaaattaactgtccttgggaagtatacaactagttttacccaaaggatggctgaaaatgcattgtcttcaacacaagataaattaacctgttttccttgcgatgtttcccatgaggagtttgatcgtttgcaccttattctcttcggggaacttaggaaaaaccacatggaggttgtcttctcgatggcgcaaccatgaactggacacgtttcttgacttaatcaagttatgtcctatttttgcccgtattgatctttatgtcactgaaagccaatgtgtacatttgtcagtgtcagagcaccctctgaccaactcaactctgatctcttgttgttaaaatcccacccggtgacctgcttgggttcccccagctaggcgagagttgagtccttagtaatttcaggcggggcccagagatcatggaagagatgcgggtagtggtgaatcgtaccgagattttcaagctccatcttaatcagtgtagaataatggaagcttttttaaattcagcaggcaagcactataattaaactcgcatgtcatcaatattccatcagggtgcaactcagccgcctgtctccctgcctcgtgccttgggtggctgggctgtcttcatcatgctgggcccagcagcaggctatttgccagggcacccactgtggacactctgccttcccagggtagccccgggccacagaacctgccactaggcattgcccattattccatttttctctcctaatgattttctgttgttgttcagagggagtctcgttctgtctcccaggctggagtgtagtggcatgatcttggctcactgcaacctccacctcctgggttcaagcaattctcgtgcctcagcctcccaagtagctgggattacaggcatgtgccaccatgcccgactaatttttgtatgtttagtagagacagggtttcaccatgttggccaggctggtctccaacttctggcctcatgtaatccgcccgcctcagcctcccaaagtgctgggattacaggcgtgagccgccctgcctggccctaataatgtttttaaggaggtgaataattcccatcgacttaactcatcccagagatttaggtccagcagagccaggcccacacagttattgaatcagacacgagaagacggaatcgacatggcaatcagcatttagacaggctactaagtgctgccatcaatcaccttctcttcccagaaaagtacagatgtctccctggatttcttactaataaccagaaatacagctgtccaggccctgcacatattttgtatcacttgataaaaatagctaatagcattct

SEQ ID NO: 514 - DNA, 2854 bp, Homo sapiens
taaaaatattccaaaagtagctgagaatgttgcagataagaatgaagaaccctcaagcaatcatattccacatgggaaagaacaaatcaaaagaggtggtgatgcagggatgcctggaatagaagagaatgacctagcaaaagttgatgatcttccccctgctttaaggaagcctcctatttcagtttctcaacatgaaagtcatcaagcaatctcccatcttccaactggacaacctctctccccaaatatgcctccagattcacacataaaccacaatggaaaccccggtacttcaaaacagaatccttccagtcctcttcagcgtttaattccaggctcaaacttggacagtgaacccagaattcaaacagatatactaaagcaggctaccaaggacagagtcagtgatttccataaattgaagcaaaatgatgaagaacgagagcttcaaatggatcctgcagactatggaaagcaacatttcaatgatgtcctttaagtcctaaaggaatgcttcagaaaacctaaagtgctgtaaaatgaaatcattctactttgtcctttctgacttttgttgtaaagacgaattgtatcagttgtaaagatacattgagatagaattaaggaaaaactttaatgaaggaatgtacccatgtacatatgtgaactttttcatattgtattatcaaggtatagacttttttggttatgatacagttaagccaaaaacagctaatctttgcatctaaagcaaactaatgtatatttcacattttattgagccgacttatttccacaaatagataaacaggacaaaatagttgtacaggttatatgtggcatagcataaccacagtaagaacagaacagatattcagcagaaaactttttatactctaattcttttttttttttttttttgagacagagttttagtcttgtttcccaggctggagtgcaatggcacaatcttggctcactgcaacctccgcctcctgggttcaggcaattttcctgcctcagcctcccaagtagctgggattacaggcacccaccaccatgcccagctaatttttgtatttttaatagagagctaataattgtatatttaataaagacgggtttcaccatgttggccaggctggtcttgaactcctgacctcaggtgatcctcctgcattggcctcccaaagtgctggaattccaggcatgagccactgcgcccagtctacacactaattcttgttagcccaacagctgttctgttctatctacccctcatttcacgctcaaggagtcatacctagaatagttacacacaagagggaaactggaagccaaacactgtacagtattgtgtagaaagtcacctccctactccttttattttacatgagtgctgatgtgttttggcagatgagctttcagctgaggcctgatggaaattgagataacctgcaaagacataacagtatttatgagttatatcttagttcttgaaattgtggaatgcatgattgacaatatatttttaatttttattttttcaagtaataccagtactgtttaactatagccagaactggctaaaatttttatattttcagagttgaagttggtgaagacattcatgatttaaacaccagatcctgaaaggggttaaatctactttgaaatgaatctgcaatcagtatttcaaagcttttctggtaattttagtgatcttatttgattagactttttcagaagtactaaataaggaattttaacaggtttttattaatgcacagataaatagaagtacagtgaggtctatagccattttattaaaatagcttaaaagtttgtaaaaaaatgaatctttgtaattacttaatatgttagttaagaacccgtcaagcttatatttgctagacttacaaattattttaaatgcatttatcttttttgacactattcagtggaatgtgtaagctagctaattcttgttttctgatttaaagcacttttaaatcttatcctgccccctaaaaacaaaaggttttgatcacaaggggaaatttaagattgttaaccctgtttttcagaagggctactgttaattgcacataaacatgaaatgtgttttcccctgtgtactaacacattctaggcaaaattcaaacttatagtggtaaagaaacaggttgttcacttgctgaggtgcaaaaattcttaagacttctgtttgaaattgctcaatgactaggaaaagatgtagtagtttactaaaattgtttttctaccatatcaaattaaacaattcatgcctttatagggtcaggcctacaatgaataggtatggtggtttcacagaattttaaaatagagttaaagggaagtgatgtacatttcgggggcattagggtagggagatgaatcaaaaaatacccctagtaatgctttatattttaatactgcaaaagctttacaaatggaaaccatgcaattacctgccttagttcttttgtcataaaaacaatcacttggttggttgtattgtagctattacttatacagcaacatttcttcaattagcagtctagacattttataaacagaaatcttggaccaattgataatatttctgactgtattaatattttagtgctataaaatactatgtgaatctcttaaaaatctgacattttacagtctgtattagacatactgtttttataatgttttacttctgccttaagatttaggttttttaaatgtatttttgccctgaattaagtgttaatttgatggaaactctgcttttaaaatcatcatttactgggttctaataaattaaaaattaaacttg

SEQ ID NO: 515 - DNA, 3102 bp, Homo sapiens
agcttactttgagggttcatgatgttcagagatgctcaggggacttctccgctgcaggaggtggggtgaggacattggattcatttcctcaaaatgtggagagaaaggagaaaaatcagaattctatttgtacctctgcttcctgtgctgtttatctttgcttgtctttatctttttccacctcaggggtttcatcaggggtatttgggagagtctaggggtggggatgaagaattgactgggagctgaggaggggggatttttatgctgaagacctggcaggaggcaactcctgacacccccacagggttagactgtaaaacctcttccatgacttgctgactctataggataatagcaacaggaaaagaactgagggacgtgcagatgaggatgaatagggccccaacaccagtgcctgaggctgaggttagaactgactacaaagacacaggaaaccaagggcccagtctcccctccacgctgaaatacgcaccctcttgtctgggtcatgtctactatgtgaatacttgaccatggaggtctggggctctggtggcttccatagctggctagtctcttgatggagagaaatcagggcttctctcatccatgctggaatttcatttagatgtcaacttccaagtttccctttttccagatgggattatagtcctgcttctggaacagggtagctgtgtgtggtccaggatagttcaattatctggccctttgttcacttcttacaatcattgatacagtcaacaaaaattggttaaaaacaatatatgccagacatatatccctgagttctgggacaataaccaaaattgaataaggcaatatcctactctcaagcaatagagggtaggaatagaataataataatataatacaatagctctatagcagtatgtaaactataaaagcattattttacgtgtttctattgaactgtcataactaaataagatggttagtactataattatcccaaggattcattcactcatagaacatttgttgagcaattactacctgccagtcacttccaagtggtaagtgagatagaaatggttctttgtggcgctcacaatttattggagaatggaaacacaattacaaaaaaaaagtgtgataagttctgggagaagggtggtacaggatcctgtggggtagtggtggctccatataggagggacattgggatactgatcaggaaggagtgggggacagggctagaagctgcattagtataaagttatgtcagactgccaaaacaaaacaaacacaaaaaatcagtagtctgtggtaaagaattgctataggaacagccagtaggggcagttaagctggtcttggtgaatcaggggaagcgtcctagaggaacagatgtccatgctgaggccaaatgctggacaggagttagccagacagggaaattgcattctgggcagaggagacagcaaaggtcaagaaacatgacaactttggaagactgtaacttgttcagaggcagagggtgcaaaggagaaatgaggaaaggtgaagctggagaggtgggcttggtccagctcttgctgggccttttcagccgtgttaaagatttagactgtatccagagggatgttgaactttaagcctaagactgaaaaggtgagaattgtgccttagatcactatggttgcagtgtggagactggtttggaaaggggagaaatcagaggcttttacagccatcccagggagagagaatgaacaccagaattagggtaatggaagatggaaagaagagaaatcgttttatgggttgctcaggagatagaattgacatgtcttgggattgttttgctgtgtaggggagagagacaagtcaagagtatacatcctgtttctgacttggcaactgggtgggtcatgggtctgtttcctgagacagttgtctacagccataccaccgtaagcgccctaaatctcatcagagacagtttatgcaaatggagcttggggaaagagaggtcgtggctggagacagagatttgggcatcatcaacatataggtgtggggagcagagaaggctgaggaagaaagcaggaaacatataaaaaggagagcagggaaaggagccagtgagacaggaaaaacctagtaacgtggtgtgatgaagctaggggaggaaggaaggaaggaagggcggcgtggaacgctgctgatgggtggtggcggggaaaatgaacgagtatccaccagcaacgagaggggcctccatggtcttggtgggagcatttctttggagaggtggaatcagaagccccagatgtcagagggttaaggaataatttggaggaaaagcgtaaaggcagtggaggtgaggagagaattttcaaaatgtttggcagtgattgcaatgaaagaaaaaaatggagggagcagagtatatgcagttgaggaacttttttagtttggagtgtgttaacacgatgttaggaagaaggatcaagtgaaggagaaaggtgaaaatgctggaaggtggggcttagtgatgaaacaaaccttggggacaggtgggcgtggtactgagagtcccagtgaggggagtgccctcaggcaggcgccggtggcttctgtcacaggagggaacagcgctgacattcagctggttcgcactgatacggctcaaccagtttgttaaaacatgtctgttccagtgtcagtaatatacgagtaactgcaatatgcagtaaaaattataaattctaatacaaactcagttcaagctaattaagagatcgcaacagccgttggtaaatggacttcccgctgcatttgagaagctttgcagcgccatctgccggtgtcgtagcatcactgcaggctgagaggctgctttgcgccttcatcttgaagcactctgaaattgcctgtttaaattaccttggaatcatggagttgctactgcttctgaatagtttagcttctactttgattttattgttagtgcattgtcgttcttgtgtcagtagcaagtttcagtgttttaatatttacaaatacaaaaatttttaataaaatattaaagccaaacttgaatgaagagacaac

SEQ ID NO: 516 - DNA, 3280 bp, Homo sapiens
gtgcaggcgccgggatgaccgctttaagccggagcgaggccaccgaggagggcggcaaccaacaaatgcacagaaagacagcttctctgaacagtcctgtgtcctgcaaagagaaaccagacagagttgaggagcccccggactacagtctgcactggccagaaggcttgaagggtgaagagataaagaagtgtggccgagaagggataacactgaataaatacaaccagcaataccacaagctgtttaaggatgttcccttggaggaagtggttctcaaagtgtgttcctgtgccctccagagggacttcctcctccagggccggctctacatctcccccaactggctctgcttccatgccagcctctttggcaaggatatcaaggtggtcattcctgtggtgtctgtgcaaatgatcaaaaaacacaagatggcacggctccttcccaatggactggccatcaccaccaacaccagccagaagtatatctttgtgtcactgctctcccgggacagtgtatatgacctgctgaggagagtctgcacccacctacagccttccagcaagaagagtctgagtgtaagagaattttcaggggaacctgagtctctggaagtcctcatccctgagatgaagtggagaaaggtatgcccttcctccaggtccctgtctctcccagacaacatcccttgtatccctccatcatccgtggactccacagacagtttcttcccctccaggaagcctccaatgtctgaaaagtcaagagcccaagtagcttcagaaaatggtgggaggtgggcatggcccatgccaggctggggtcctgcctgccctaagaagatgccgaactgctctcccactgcaaagaatgctgtctatgaggaggatgagctggaggaggagcccaggagcactggggagctgaggctctgggattaccggctcctcaaggtcttctttgtgctgatctgcttcctggtcatgtcctcatcctacctggcgttccgtatttctcggctagagcagcagttatgctccttgagttgggatgacccagtccctgggcacaggtaacagccacttggcctttgtccccattccttctccaagaagaatgttctgggtgctaagtctccaccaatgatccctgtggtttatgctgctgctgtgctaagactgcctatgaaggaaaatattccagatccctcctcctccccgcagctcttctcttccctctatgagagatctgaagtacgtgtttacaaagtaactggcttctacaatttttggactcaagcaaaaagccagattttttggaaccaactgaggaattctgtacacaaagcttcagcaaacacttagagaaaacaaacaaacaaacaaactgggtccttggaaacagttctggcacacaggcagaacactggaggccacctcaaaggacagaggccatgctttcgcatttggaatgtggctctgccacacagctcactcctatggtggggtcagaggtcagaacacaaaccacccatgtgggctctgctccctcccaacactctgtgttcccacagggcttctctgcgggcagccaggcacctgtcaggcttgggcaggggcctgctgagaatctgtgaatgcagaggggagggctcatggccaggattccagccagagatgaatttccatgctctgggccagggctctgtgccggcccctcatgaggtggctggctgcattatggggagatgctgcccacggcggagatggtggcagtggctgtgaagaacagaggtacctgaattctgtgtcctcagctgtcactttccggtgagacaagtggagcagggcctttgatcactgtggtcacagacctggtactgggttttgcccttgtgtgctcaaacatttctaaggtgtcccaagccctggaaatagggaagggaagggtggaggcttggatctgaggtcttgctgtccactccctgcctgcctgcccgcatctcaggcatggccaacagcagcccgttgaggggggcttgtctggacagttgcgtgtgatggtgttgagccatcacagggcagaggtcacttgtgtcacccccatagtcattgggttgcaggccatggaggagggacctccactccatggggcctattctccattaaggtggaagtgtccactgtgggcctagcacagtgcaggaaccaggccagggggtctatctcatacctctggggacaggaaaggtagaggatgaggaggttggacgtggtggtggctttgccttggatattcctcttcctctatcaaggccttctcttcttctctgtgtcccacaactctggcctcatcgccctgggactcccatctgctaagatagtggctttggaggttctggaagggcttagtgaggaggccagaagtatcagggaaagttgctggtgatggggtgggcggtgtcagaagcagccactgttttcccctcttcagacactgagagattaatcagggaatgaaatccaggtggaaattatttattgtgaagcagacgactgtctgtcctgtttatgacaaacccaaatgagaattggagggactaccagtaagtggtctcttcatgctctccccatcccagtttttaggatgaaatttagagcctggccttttgtgttgcttgcaccaaatctgtatgtctcaggtgaaactcactgttccatgaatggtcatccttttttttttttttttttggaaccagcccctttcaccctttcatccgtcttttttttttaggaaaataacccttcttgcttcagcacttctccctggtccttgctgaaagacagagataaaaatccattctctgagccttgcttggttgtcagaggccatgagaggtgccagttataggtggatgtgccaagatgctggtgaacttggtcttcagctatacccaggctcagaaagggcaagagccatgctgcagcgtaggtgactttggaggtgcacttggggcccagggctttgagtgttgcgggtgtgcctgtccctccagatagtgctctgtttctctctgttgtccccctgcctggtcctctggggccactgtgctttctgctgtgtgcatttataaatgatgtgtattttatatagacctgcttgcattggctgatgctcctctaattccctgagtttgattcaaccacccttgggttgttttgctatggccttagcctttgaaaatattttaaaataaaaaacttgatttttctagtgt

SEQ ID NO: 517 - DNA, 2580 bp, Homo sapiens
aatacattcacttcctcggtcagtatttatgaaagctacaaaagatgggcaatgtgaaagtcaagatccaagaattgagctcacactaaataagccagatttcacatcattaataggttctcaggctgccttgatcaagagtggtttgggttttgttaaaagtacttcatggcaccatagtgatttattaaggaaaggtggcgaagaaagtctgagagccaaatcagaacatgaacagaagactagccatcagttacaaaaggcaatgccattcctacaaaatagaggaccaacacccaagcctgatcttcttagagaaaataacaatcctgtagaattcaagaccactgcatcggtgttgcctaatcaagtatcagttatcacaaaacagacaagacctgaaaaggttcagagtgccaaattggaacacttgaggccacatagggttgagcctaccttagtaacagaaaatagtggcaacaaaaccggtatgtcaactatagcaaaatgtgatggggaaagagatgatacaacacaaaacatcacggaggtggctgctgtgaaaagcatttcaccagaagtttctgcctctaggagaaaattagattttaatcctccaggtggttcttcaccagtagaaaattctgattgttccacaaatagcagattatctttctctcctgaaaatatcctcatccaaaaccaagacattgtgagagaagctgcagtgcagggagatgggcagaagcaaaggcagcctcaggccacagatctggactccagtgggacacatggcagtgagatgcttccagccacagaagtgactgtgtcaggagggttttctgttgaagaaaccagctgtggagacacagggagatctggtggtgaggccctggctgttgcaaatgattctaccagcacaccacaaaatgctaatggactttggaaattgaaatctacaactcccggtggtgctttgcctgagtgttttggcaccacagacactactttttcttcagcattttgcagaaaacatggagagacacaggatacctcccaaagtagcctgcctggtaccttacattgttacacaggcattcgagaggggggagacgacactgaggtagagagtgaggcatttagctgcagtgaggggagcgaacagcaagatgctcctgatgactcacagaaaaatttaggagacacagatgctgctgtagccgaggtgagaccttccttagaggtaggttatttgacgtcagctctgcaagattttaacataagtactttttctgagctggatagactttccacatcagaggttgtgatgtttcttgagagctgtcagttaggggattatagttcaggggactctgtttctgaatgttctagtaaaggaaccctaagtaaagaaatgaacaaagaattaaaggcaagtgaaataggagaaaaatacagaaagcaaccctgtgaggaagaaacacttggaacctgtgaagagtggattgaatcagaggaagatgattattcgttaaaaaatacaagtcagctcactcagtgttctttggaaactctgtctgaggttctgaccaagattaggcaagaacttcaaacaaattctgaagattgcaatggtaaagatactggcagtttattgctcttaaatgtaaataacaacatgaccactgagaatttaaaagagaaaagtccatttcgggaaacgactggctcctcatcacatgcttcagaaccaaccccacaagcagctgccttggacactgagggcagctctcccatcagcggtatgcctcagaatgaaaaccctcagagcagaccagaggcccgttcagatgcaggcaggcaaaccgatggtggggaagaagacctgccagaacctgtggagccatcagccttgtgctctgactctgtgatggagccatccatagagcaaagttctaactgcgaggccgaaacaacatttcagtgtcagatagcaacagtgacctcagaagttataaacgtacttataaataaggatcagaatctagtcattgaaaagggggacaactggacaatcatcagtggtgtagctgtcttgccacatgtggaccaggtcacactgtgtgacattcctggagacatccctatttctcaggatcaaggagagctggaagctggttgcatcccagtgacttctgctgagaagtccccagaggccagtcacactggccctgcatttcaggaggctccatgtggcaataatctttcatgtccccaagaggatgtttcaagcagtggtcagagcaccaactttgataagagtcgtttgcgaaatagacccgttaagcctagtatatggattagttctcaaatctatgatcaaaacttcgagactcagattgttgcgtctgatcacacatattataactcaaaactagagccatctggcaaaaataagaatcgatcaaagatttcaaacaaagatcagtcaaacaaaccagtaaaaacttcagcgtcgagcagagttgaaactcatcagagtgaagttgctcagtcattttcaggggaaaaagctaatac

SEQ ID NO: 518 - DNA, 2703 bp, Homo sapiens
agcgcgccgggagtgtggcgttctgtgaagagttcggtgctaacctccctcacgcggcggtggctgccgggaccctagcaggtttcagctggagcggcggcggcggcaacatggcagagaccgcggccggagtgggccgcttcaagaccaactatgctgtggagcgccgtcacctcactggccttcagcgccgacggccacaccatgctcagctccggccgtgacaagatatgtatcatctgggaccttcagagctgccaggccacgaggaccgtgcctgtgtttgagagcgtggaggctgctgtgctgttgccagaggagccagtgtcccagctgggtgtgaagtccccagggctgtactttctgacagctggcgaccaaggcactctgcgcgtgtgggaggcagcttctgggcagtgtgtgtacacgcaggcccagccgccgggccctgggcaggagctgacccactgcaccctggcacacaccgccggcgtggtcctcaccgccaccgccgaccacaacctgttgctctacgaggctcgctccctgcggctgcagaaacagttcgctggctacagtgaggaggttttggatgtccggtttcttgggcccgaggactcccacgttgtcgtggcctccaatagcccctgcctaaaagtgtttgagctgcagacgtcagcctgccagatcctccacggccacacgggtgagtggggccagcccacctgacaccctgggagccgcctcggtcccttgcttgcttcccttcccccgtcttgctgtgtgacctatacctccccacaacatctcagatatcgtcctggccctggatgtgttccggaaggggtggctctttgccagctgtgccaaggtgaggcaccctgagaggtaggggcaggggcaccaggcggggaggccacgcagtaggcccatggaccagcctctctcctcaactccctgtccccaggatcagagcgtccgtatctggagaatgaacaaggctggccaggtgatgtgcgtggctcagggttccggtcacacacacagtgtgggcaccgtctgctgctctaggtagtgagtcggggctgggcccaggggtgtcagggaggtggaggcccaggcctgccagcagggctgccgctcagggagctggggaggcagtggcagctttggcttgctctgaggctccagcccaaagatgtggaacagaacaggacaggagagtccctaggtgcctcggggtcagtcctcagaagtagccctggtgaagtggttaaagggggaagggcattaggcagagagaatgaccctgcacgaggcccaggtggagaggtgacccctgcatgtaggcacagggtcctgtggctagggctgagccacccggtgctgcgggtggacaatgtagacagggcttgatcctacaggtgcctgggggtgacccaggccaacccgcatcctgggacaggccccgtggtctggaccgtgggctcccagcctggccctgtggggagctggccatcagggctggctggggctcagctgtgtctcctcctctcctgttgggtcacaggctgaaggagtccttcctggtgacaggcagccaggactgcactgtgaagctgtggcctcttcccaaagccttgctgtccaagaacacagccccagacaacggccctatcctcctgcaggcccagaccactcagcgctgccatgataaggacatcaacagcgtggctattgcccccaacgacaagctgctggccacaggctcacaggaccgcacggccaagctctgggccctgccacagtgccagctgctgggtgtcttctcaggccaccggcgtggcctctggtgcgtccagttctctcccatggaccaggtgctggccacggcctcagctgatggcaccatcaagctctgggcactccaggacttcagctgtctcaagacatttgaggggcacgatgcttctgtgctgaaggtggcctttgtgagccgtggcacgcagctgctgtccagcggttcggatggcctcgtgaagctctggaccatcaagaacaacgagtgtgtgcggacgctggatgcccacgaggacaaggtctgggggctgcactgcagccggctggacgaccacgccctcactggggccagtgactcccgagtcatcctctggaaggatgtgaccgaggcggagcaggcagaggagcaggccaggcaagaggagcaggtggtcaggcagcaagagctggacaacctgctgcatgagaagcggtacctgcgggcgctgggcctggccatctccctggatcggccccacaccgtgctgactgtcatccaggccatccggagggaccctgaggcctgcgagaagctggaagccaccatgctccgactgcggcgcgaccagaaagaggccctgctgcgcttctgcgtcacgtggaacaccaactcgcggcactgccacgaggcccaggccgtgctgggtgtgctcttgaggcgagaggcccccgaggagctgctggcctacgaaggcgtgcgggcagcgcttgaggccctgctgccctacactgagcggcactttcagcggctcagcaggaccctccaggccgccgctttcttggacttcctgtggcacaacatgaagctccctgtgccggccgccgcccccaccccctgggaaacccataaaggcgcactgccct

SEQ ID NO: 519 - DNA, 3895 bp, Homo sapiens
ctttctctcggacccggtagtggtccgtgaagtccggggagtgggcgctgatggtggggctatcccttcccactgtccgcgaggtgcgccgtggtaacgcgcggggacacagcgcgggtgtggaccccctgcccacagctggcgcacagccattgagtgtagacccgactggggcacgaccactgaaccctgcacttggcgtcctccgggccccgcgaggggccttgctgggcgggtccgcggcaccccgggttcccagaagtcgaggccccgaatgcgcctcccctcgcctggaatcggagagcggagggctcctgcgggcaggtggccgtgctccgaagagcgccctgccacccatgaggtggccctgggggcgtcgctagccttcccagctgggtgtcctcatccggagacacaaacacctgcctcaggattaaagcgaggagctgtatttcagaccgtctcaggagaaatagcaagaggctgcctcactcctttgcccttgttcaagtttgaggcattaagaaggataagacatcaatttgaaaagagcccctgtcagagcaacatgacttgaaagcaagaagaaaaaacaaaaaatgaagcaagaacaaacatcaaatttatgctgagtttggctgcaagaatggtgaaatcattgatactttacaagacactaatcaggacagtgccccaaaggaatcagcagtttacaaatggatataacctgttttcagaagagacaagattaatttgaagatgaagcagtggcggaccatccatgtcaatttatgagaaaaaaaatcattctgttcatgccctaactgaagaggactgacaacagcacaaacaatagccaacatcatagacatctcaactggttcagcttactcaattctgactgaaagttaaagttgagcaaactttccactcaatgagtgtcgaaaccctcatgcccagatcggctgcagacaagagcagaggtttcaatggaaattttaaacaagtgagattaagatcctgaagcatttcttgaaagaattgtaacaggagataaaccatggcttcaccagtacaatactgaagactaagcacaatcaaagcaatggctaccaagaggccgaagtggtcccattaaggcgaaagtggaccagtcaagagcaaaggtcatggcaacagtgttttgggatgccaagacattttgctcgttgactttctggagggccaaagtgcagtaatgtctgtttattatgttttgagaaagttggccaaacctttagtagaaaaatgcccaggagaacttcactagagtgaccttcgttcaatttcagatcaccacaataaagcaaaaaattgcaattataaattttttggtttcccagtacatgtaaaagttataattacactatactatagtctattaagggtgcaatagcattatgtctgaaaaaaacaatggtcatgccttaatttaaaaatactttattactaaaaaatgctagcaatcatctgaaccttcagtgagtcataatatttttgctagtggagggccttgcctggatgttgatggctgctgactgatcaggatggtggttgctgaaggttagggtggctgcggcaatttcttaacataagacaacagtgaagtttcctgcattgattgactcttcctttcatgaaatatttctctatagcatgtaatgctgtttgatagcattttacccacagtagaatttatttcagaattgaagtcagtcctcttaaaccctgtcacttctttattaactaagttcacgcaatattctaaatcctttgttgtcatttcaacaatgttcacaacatcttcaccagggatagattctgtctcaagaaaccactttctttgttcattcgtaagaagcaacccctcatctgttcaagttttctcatgagattggagcaattcagtcacattttcaggctgcatttttaattctagttctcttgctatttctaccacatctgcagttacttccttcactgaaggcttgaacccctcaaagtcacccatgagggttggaatcaacttcttccaaattcctgttaatgttgatgttttgacctcctctcatgaatgatgaatgtttttaatgacatctaaaatggtcagtcctttccagaaggttttcaatttactttgccccaatccatcagaggaatcactgtctatggcaactgtaggcttataaaaggtatttcttaaataatatgtcttgaaagtctaaatgactccttgatccataagctgcagaatgggtgttgtgttagcaagcatgaaaacaacattcatcttgtgcctctccatctgagctcttctatgaccaggtgccttgttgatgagcagtaatattttgaaagaaatcttttttcctgagcagtgggtctcaacaatgggcttaaaatgttcattaagccatgctgtaaacagatgtgctatcatccaggctttgatgttccttatacagagtacaggcacaggcagagtagatttagtataattcttaagggcccttggattttcagaatggtaaatgaacattggtgtgaacttaaggtcaccagctgcattagcccctaacaagagagtcagcctgtcctttgaagctttgaagctaggcattgacttctctctagctatgaaagtcctagatgacatcttctgatttaaggctgttttgtctacattgaaagtctattatttagtgtagccaccttcatcaattatcttagtaaggtcttctggataacttgctgcagcttctacatcagcatttactgcttcacctcgcacttttatgttatggagatggcttcattccttaaacctcatgaaccaacgagcttcaaacctttcttctgcagcttcctcacctccctcaggcttcatagaatttaatagagttagggctttgctatggattaggtttttgcttatgggaggattgtggctggtttaatcttctatccagactactacaactttccccatatcaaaaataaggcactttcattttttgatcatttgttcactggagtgacacttacttttaatttcctgaaaattttcctttgcatttacaatgtagctaactattcagtggaagagggctagtttttgacatgccttcctcaatatgcttaataatttctagtttttgatttaaagtgagacacatgtgactcttcctttcacttgaatgccgagaggccatgcagggttattaattagcctaatttcaatattgttatttaagttatggggaggcttgaggagagggagagagagacaggagaatggccggtcagtggagcagtcagaatacacacaacatatattgattaactttcctatcttatatgagcacagttcttggcactccaaaacaattacagtactaacatcaaagatcactgatcacagatcaccataactgatattataataatgaaaagtcttgaaatattgtgaaaattaccaaaatgtgacagatacaacatgaacaaatgctgttggaagaatggcactgatagatttgcccaatgcagggttgccacaaactttcaacttgtaaaaagagcagtatctgtgaaagacggtaaagcagaaagcaataaaatgaagtgtgcccatgtatactaataagacatagttcattttattaataaagcacctgtcaatttcagttgagtaatttttatcaggaatgggttttgaattttgttcaaggcttttacagcatctgtgggataactatgtattgtttccctggatctataaatacatacaggatactaatgacttttcaaatattgaaccaactttgcattcttggaataaatctcacttgatcatgat

SEQ ID NO: 520 - DNA, 2836 bp, Homo sapiens
gtgactgggaagatggccgtctttccttggcactccaggaataggaactacaaagctgaatttgcatcatgccgactggaggctgtaccattggagtttggggactatcaccctctgaaacccataactgtcacagagtcaaagacaaagaaagtgaaccggaaaggaagcacttcttccacgtcctcctcctcctccagctccgtggtggacccgctgagcagcgtcctcgatgggactgaccccctctccatgtttgcagccactgctgaccccgcagccttggcagctgccatggacagctccagaaggaaacgtgatagagatgataactccgttgtaggatcggattttgagccttggaccaacaaacggggagaaatccttgcccggtacaccactaccgaaaagctgtctattaatctgtttatgggatctgaaaaaggcaaagctgggactgccacattggcaatgtcagagaaggtgcggacccggctggaggagctggatgactttgaggagggttcccaaaaggagctgttgaacttgactcagcaggattacgtgaaccgcatagaggagctcaaccaatcgctgaaggatgcctgggcctcagaccagaaagtgaaggctctaaaaatagtcatccagtgttcaaagcttctttcagacaccagtgttattcagttctacccaagcaaatttgtccttatcaccgacatacttgatacatttggaaagctcgtgtacgagcgcatcttttccatgtgtgtggatagccgcagcgtcttaccagatcacttttctccagagaatgcaaatgacacggccaaggaaacatgcctaaattggtttttcaagattgcctccatcagggaactcattccaagattttacgtggaggcatccatcctgaaatgtaacaaattcctctccaaaacgggaatttcagagtgcctgccccggttgacatgcatgatcagagggatcggagacccactagtgtcggtgtatgcccgtgcctacctgtgccgggctctgctgaccgagatgatggaaaggtgtaagaaactaggaaacaatgccttgctgttgaattctgtgatgtctgccttccgggctgagttcatcgccacaaggtctatggatttcattggcatgattaaagagtgtgatgaatctggtttccccaagcatcttctttttcgatcactgggattaaacttggccttggctgatcctcctgagagtgaccgacttcagattctcaacgaagcttggaaagtcatcactaagctgaagaacccacaggactacattaattgtgccgaagtgtgggtggaatacacctgcaagcatttcacgaaacgagaggtgaataccgttttggcagatgtcatcaagcacatgactccagatcgtgcatttgaagattcctacccccagcttcagttaatagttaagaaagttattgcccacttccatgacttctcagttcttttctcagtggaaaaatttctgccgtttctggacatgttccaaaaagagagtgtgcgggtggaggtttgcaaatgcatcatggacgcctttatcaagcatcaacaagagcccaccaaggacccggtcatcttgaatgcccttttgcatgtttgcaagaccatgcatgactctgtgaatgcactcactcttgaggatgagaaaagaatgctgtcatatttgattaatggatttataaaaatggtttcctttggccgtgattttgaacaacagctgagtttttatgttgagtccaggtcgatgttttgcaatctggagcctgttcttgtgcagttgattcatgcctgtgttgcctactgcttcatcaccatcccctccctggcgggcatcttcacacgtctcaatctctacctgcattctggtcaggtggccttggccaaccagtgcctctcccaagctgatgcttttttcaaagccgctataagccttgttccggaagttccaaagatgattaatattgatgggaagatgcggccatcggaatcgttccttctggaattcctctgcaatttcttttctactttattaatagttccggatcatcctgaacatggggtcctgtttcttgttcgagagcttctcaacgtgatccaggactacacctgggaggacaacagcgatgagaaaatccgcatctacacctgcgtcctgcatctcctctccgccatgagccaggagacgtacctttaccacatagacaaagtggactccaacgacagcctctacgggggagactccaagttcctggcagaaaacaacaagctgtgtgagacggtgatggctcagatcctagagcatctgaaaaccctggccaaggacgaggccctgaagcgccagagctcgttgggcctttccttctttaacagcatcttggcccatggggacctacgcaacaacaagctcaaccagctctccgtcaacctgtggcacctggcacagaggcacggctgtgcagacaccaggaccatggtgaaaacgctagaatacatcaagaagcaaagcaaacaaccagacatgactcatctgacggagctggccctcagactccctctgcaaacaaggacctgacccccgggcccatccccaggctcagggactctggtgccaaatccagaaagatctgctctgctgccctgaactcttacggcaatttaggtttctcatttttcttttctttttacatatgtacaaattgttttaagctttggcctctatccaggttattctgacaatgaagaaatgggagttgtcagagcattaaaatgcaatcttcactaag

SEQ ID NO: 521 - DNA, 3530 bp, Homo sapiens
tttgtaatggcctttccatatctagattgttccttcttccaacattcaatagcgtttggcctccttgcctgtgaggtgaacaaattgtggtgtctttctcccctgcagaggagtgtacgtggatggaaacttgctggagagtaggggcagaagagagctgaagttcaaagtcagggtagggcctgtggtgcatgccgggtgggtggagtgagcagtggtgtggaaagttgctctcccaggccagctgcttgtgggagatagagagcggaggtgtggtccctgcgatctgggccagccagcctctgggcccagggatgggggcgaagctctcaggtatccttcatagccacggataatgtgccaagggcctggtattttctggctcagagtctaggcatgaggcctgcctcctcaggaccctctgtggttttcttgcccctaaattttgccttatcttctccccatgagtttctcaggctgtatttgtggcgattctcctggtgactgcatggtgacaacagtaaggcttccttgcaggtctgcagtgggtgtggccagcttcctgtgtgtaggggaaagggcttcccttgggagaattggagagcccacctttggaggtgggctcggttgagggagccagcaggagggcttcccgagtaaggttccacggagtccaagggtcctgagaagtagtagcaggagcaccacaaagaagtgtcccgtggtcaggtacactggggaaatggggctggttttgtttaaccgcaagtcttttcaggatgttggaagtgggcatacccatgggaatgagcaaggctgtttggtgtttctcaggtgtacctgatcacacagccctcggaggaccagcactctgaggaatgtatttttggggaagtgtaggtatcaggtccaggattttggatctcagtccatgttcatcctcaaagcccagtgatggtggtcatttcaggtgagctgggctggacctctgaaggaagcaaagattgtgagggttgctctcaagggtcttctgggcatgtttggaaaagtggacaagatggcggtgtcagcgaaaaagagcagggggcaggtgggcccctgggcaggagagggtggggggaaagggagccaggtgaggcacctgagaagttgtggcagcctcttagggacaaagctgaatttccctgagactagaaacctcttcttccgaaaactctgatactttttgtactgggcctatctcttgtcacttaggcaaattccttttcagttaatgggaccaaagagagatgtttttgcctcccactaagctggaggtagttggcttaaagtggaagaatcccgaggaggcggggacctggtaaggcccccatcattcagctgccctctcacacctgaagagccacttctctgctccaactgtggctggctttgtgttttgttttaaccaggaaggctgttccccgtgacctcaggggccacatcctgcttctgctgcctgccttgcctttgcaccctttgagtcagtgctgctcagccagcagcccctttctgagtcacagccacacagctgggccaaccgtgcgttggtttccttccccttagcaggacttagagaatctcagaactttagagctagaagtgcctttaaggattatttagtccgccttcccattctattgataagtaagctaggcccagagatgccgtctagctcaaaggcaccctagtacttagtagttgactggatggtccccttgactcccagttcagccttgaacttctggggcctcatcttgctgtggttcaagtctttggaggtatgagaatagagggagccatgatgtcactccaagtgtctaatagatgaacttccaggagaagatgtctttatctttgaccttctggcttatctgaagagtacagactcttaggaaaacctctcttaagtaaaagagaggattattaaattataggacagcaagagagcaaagatctctcttgagcagggaaagaggcttaagtcatgggatactggatgtttgtattttaggaggctcagagggcagaagggacatatttcacttgagatgattccttttgcctaaaatccttacccccacactcccaccatcaaccaagcactggtcatgatgatcctatcacccccttcctgtattggggaagcaagggcctttggtatacttgatttgacacacacacactctctcacttctcactcacactctcacactcacatactctcacacacacactctcattttctcacacacactccacactcacacacgcacacactctcacacactttctcacacacacactcatacactcacacactttctcacacacacatattctcacacacacccacactcacacactcatgcacacacacacactttcacacaaacacacacacacactttctctctcacacacacacactccctctctcccctgtctcgaatcattttgggggcataaacataaaacctggaaatcaacctgttttctaatctttttttttgagacagagtctcactctgtcacccaggctggagtgcagtggtgtgatcttggctcactgcaaactccacctcccagattcaagcgagtctcctgcctcagcctcccaagtagctggggctacagacacacaccactatgcctggctaatttttgtatttttagtagagatggggtttcaccatgttggccaggctggtcttgaactcctcatctctggtgatccacctgcttcagcttcccaaagtgctgagattacagccgtgagccaccccatgcctggctgttttctttactatagatttgcagctttggcttattttgaagacaaattgttggttatcaatagactataaagtgctaagtctataatctcatgagtactatttctaatgagtatattttccttcctgaaaggtgcagattcactttataggaacagcttcagcttcagtgatgaaaaactgaattctccaacagactctaccccagctcttctctctgccactgtcactcctcagaaagctaaattaggagacacaaaagagctagaagccttcattgctgatcttgacaaaactttagcaagtatgtgaaacaagaagttctgggtcctttcatcataagggagaagcttcagaaagttccgaggacctgctaaaatcagctactagaatctgctgccagaggggacaaagacgtgcactcaaccttctaccaggccactctcaggctcaccttaaaatcagcccttgatcccatttctgggcaatttagacagtgaaactgactttgtttacctgcttgcagcatattagaacagacgatccatgctaatattgtattttctcttaaaacatagctttcctgtaatttaaagtgcttttatgaaaatatttgtaattaattatatatagttggaaatagcagtaagctttcccattataatatatttttgtatacaaataaaatttgaactg

SEQ ID NO: 522 - DNA, 3653 bp, Homo sapiens
gcgccagcgccggcgggacccgagctgctaatgaggcagccatgactggccacttcatgtgctcctggagaagggcttgcaccagccgttttcaggaaagtcaagcagctgttgactcctgagtctgggtgaatttgtgtgaagagcataaggcgctgtttcttaaccaaaacgcttcctcttgcagtgcagatgggatgtgcttctccacaggaggccccacggcttccccacccctcagaggagcgccgtgcgtgcgtctgtgtggaggattggcagctcctgcagtcggcccttggtcctatttggcgacgcctctgccttccccttaattatacagtcatgagccgccctggaatcacggcagctccggatggatcctggatgccagaatgcagcctcagcacggggctgcaggataggagtgagcgaggggctgcagagccggcggccgcggtgggcaccatggagggggctgccctgggcagcacgggcatgagtctcaaggcccaggtttgagtaacaggtgttgagagcttacttacttttcctgagacacagtttcctcatctcgagagcacggaaaatcattctaacttcagaggattgttgtgaaagttaaatgagattaaagaggtaaagcccatgacgtgcttagctcgtgcttggctcttggtcaatgccagttagcgctgcattttctcccctctccctccctccttctctctttcttttcttctattctccattcctgttttctcccccaccccactccccaaagctctgcgttgagaaccagatgctgtctggtgggttagggccagaggaggaaaagctgcctgccgtgggctgcacccataccctcttcattccaatgacatgaggggaggggaaaggacagaggtagactgtcctcccctacctcctcctaatacaaatggaattcctggaactggaaaacaaagaatacccccataaaaataagacagtacttctggtgcggtgtaataaaggggaaagtaaccctcaatgtcaggaaactccgcacctcccagctcatatttgtgtggaggaaaagttaaatattaatttggactcaactgaatgtggacacaaacaatggtcaccaagtcccggaacaggttgtgtgagcctcttcaggggttcatccagcgctgttttggagaaatctctatttcaatttattcctatacgttagttactgaaaaacaacagacaatcgcaaaagcaagttgcccgttttgtgttccttgagcccaatcatgaagtgccgtcgtgactgggcctcatgacaaacaacttgtaataagtaacaacagagctcaggtcccagaccgcactgaagctctgtgagacctctcctcatctgtgcatgaacgagtgtctgactctggagcccagcctgctgcttcccagtctggtggtgaatcctccgtagtctgatggaggtttgctcttgttgcccaggctggagtgcaatggcacaatctcggctcactgcagcccctgcctcccaggctcaagcaattcttatgcctcagcctcctgagtagatggaactacagggcatggactggaactcccaatacccctgacatgggctgagtcaacgtggtcatgaacatgtgacaggaggcagcagaagttgcagaaaagagtgaggcacgtttgaaaaaggctgaaaaatgtttctgtccaggcaagggtgtgtgctgaatgactcaaggattttttggagagaattggagtgtctcaccagaggagaccacgtctgaagggctttgcatccctccttggacatgtctaatacctagcactcagaaagcatccagtaaatattcgtggaaagaaaggagtggagaaggggagaaaggggaaagggagtaggcgagagagaagaaagactctgcttcttgcccagggcctggcatggggcggaggcaaagcagtggggtcctcagctatgtcccactgtgagtgcacagcgagtcctgaccttcagagggtgcagcccgaggggccctggcctgtctgaagggtgcgccagccgagtggcctgctctgaccaccaggctcacccatgactacctgggtggctacagccagttcctgacaatgagtacagcactcagttatcggggcccttccacccacacgctgtccacttcctggggtactgctgtgggcatgcgagtgcttgctccccggggcactgctgtgggcatgcgagtgcttgctccccggggcactgctgtgggcatgtgagtgcttgctccccagctccactagtgacactggtggccccttgctggggccttccccgcctgctccgctccattaccgctgccgggctcctcacgtctctccttgctgcttcctgcactggggtgaggagagtggggctggtccccttgagaccggagaagctccaggcttttaaggaaaactgccagggacgaagagaagatatcacttccccacgtggttggcttccagattcagaaggaatgtctgtccttgtggattccgtaccagatgaccccagatgctgcctcagtactaggtccctgtggctctggagcctttgctgggtctgggcagtgtctcttcctctccagttcatccttgggtctcttcacccttgccaggggcaggcttcctggtgagaggtcgacctcctgcatgaaggctctcaagaggccagttcaaagccaagctccgggtctgtgcctgtggggctgctcctcgatcaggagatggtcactcccctcctggtctgtatctgtgggattctcctccatcaggagatggtctctcccctcctggtctatacccgtgggattctcctccatcaggagatggtcactccccatcctggtctatacccgtgggattctcctccattagatggtcactcccctcctggtctattcccgtggggctgctcctccatcaggaggtggtcactccccctcctggtctatacccgtggggctgctcctccatcaggagatagtcactccccctcctggtctatacccgtgggattctcctccatctggagatggtcactcccctcctggtctatacccatgggattctcctccatctggagatggtcactcccctcctggtctatacccatgggattctcctccatctggagatagtcactcccctcctggtctatacccgtggggttctcctcaatcaggaggtggtcactcccctcctggtctatacccgtgggattctcctccatcaggagatggtcactctccctcctggtctatacccgtggggctgctcctccatcaggagatggtcactcccctcctggtctatacctgtgggattctcctccctcagaagatggtcactccccctcctggtctatacccatgggattctcctccctcagaagatggtcactccccctcctggtctatacccgtggggctgctcctccatcaggagatggtcactctccctctcggttgctcagtccaaaaacaacctctctggaaaactgcgtggaatttttttttaaagaattgaaactagaactagcatttgatccagccatctgcctactgggaatacacccaaagaaaaataaatcattatatcag

SEQ ID NO: 523 - DNA, 3689 bp, Homo sapiens
atttagtccgcaacacctcgctccccaggaggtctgccagcctggactggaagcgtgcaacactccagagtcgtaggagtgaacactgcacaggaatctctgcccatctcaggagaaaccaaacctggggaaaatgtttgcggtccacttgatggcattttacttcagcaagctgaaggaggaccagatcaagaaggtggacaggttcctgtatcacatgcggctctccgatgacacccttttggacatcatgaggcggttccgggctgagatggagaagggcctggcaaaggacaccaaccccacggctgcagtgaagatgttgcccaccttcgtcagggccattcccgatggttccgaaaatggggagttcctttccctggatctcggagggtccaagttccgagtgctgaaggtgcaagtcgctgaagaggggaagcgacacgtgcagatggagagtcagttctacccaacgcccaatgaaatcatccgcgggaacggcatagagctgtttgaatatgtagctgactgtctggcagatttcatgaagaccaaagatttaaagcataagaaattgccccttggcctaactttttctttcccctgtcgacagactaaactggaagagggtgtcctactttcgtggacaaaaaagtttaaggcacgaggagttcaggacacggatgtggtgagccgtctgaccaaagccatgagaagacacaaggacatggacgtggacatcctggccctggtcaatgacaccgtggggaccatgatgacctgtgcctatgacgacccctactgcgaagttggtgtcatcatcggaactggcaccaatgcgtgttacatggaggacatgagcaacattgacctggtggagggcgacgagggcaggatgtgcatcaacacagagtggggggccttcggggacgacggggccctggaggacattcgcactgagttcgacagggagctggacctcggctctctcaacccaggaaagcaactgttcgagaagatgatcagtggcctgtacctgggggagcttgtcaggcttatcttgctgaagatggccaaggctggcctcctgtttggtggtgagaaatcttctgctctccacactaagggcaagatcgaaacacggcacgtggctgccatggagaagtataaagaaggccttgctaatacaagagagatcctggtggacctgggtctggaaccgtctgaggctgactgcattgccgtccagcatgtctgtaccatcgtctccttccgctcggccaatctctgtgcagcagctctggcggccatcctgacacgcctccgggagaacaagaaggtggaacggctccggaccacagtgggcatggacggcaccctctacaagatacaccctcagtacccaaaacgcctgcacaaggtggtgaggaaactggtcccaagctgtgatgtccgcttcctcctgtcagagagtggcagcaccaagggggccgccatggtgaccgcggtggcctcccgcgtgcaggcccagcggaagcagatcgacagggtgctggctttgttccagctgacccgagagcagctcgtggacgtgcaggccaagattcgggctgagctggagtatgggctgaagaagaagagccacgggctggccacggtcaggatgctgcccacctacgtctgcgggctgccggacggcacagagaaaggaaagtttctcgccctggatcttgggggaaccaacttccgggtcctcctggtgaagatcagaagtggacggaggtcagtgcgaatgtacaacaagatcttcgccatccccctggagatcatgcagggcactggtgaggagctctttgatcacattgtgcagtgcatcgccgacttcctggactacatgggcctcaagggagcctccctacctttgggcttcacattctcatttccctgcaggcagatgagcattgacaagggaacactcatagggtggaccaaaggtttcaaggccactgactgtgaaggggaggacgtggtggacatgctcagggaagccatcaagaggagaaacgagtttgacctggacattgttgcagtcgtgaatgatacagtggggaccatgatgacctgtggctatgaagatcctaattgtgagattggcctgattgcaggaacaggcagcaacatgtgctacatggaggacatgaggaacatcgagatggtggaggggggtgaagggaagatgtgcatcaatacagagtggggaggatttggagacaatggctgcatagatgacatccggacccgatacgacacggaggtggatgaggggtccttgaatcctggcaagcagagatacgagaaaatgaccagtgggatgtacttgggggagattgtgcggcagatcctgatcgacctgaccaagcagggtctcctcttccgagggcagatttcagagcgtctccggaccaggggcatcttcgaaaccaagttcctgtcccagatcgaaagcgatcggctggcccttctccaggtcaggaggattctgcagcagctgggcctggacagcacgtgtgaggacagcatcgtggtgaaggaggtgtgcggagccgtgtcccggcgggcggcccagctctgcggtgctggcctggccgctatagtggaaaaaaggagagaagaccaggggctagagcacctgaggatcactgtgggtgtggacggcaccctgtacaagctgcaccctcacttttctagaatattgcaggaaactgtgaaggaactagcccctcgatgtgatgtgacattcatgctgtcagaagatggcagtggaaaaggggcagcactgatcactgctgtggccaagaggttacagcaggcacagaaggagaaataggaacccctgggattggacctgatgcatcttggatactgaacagcttttcctctggcagatcagttggtcagagaccaatgggcaccctcctggctgacctcaccttctggatggccgaaagagaaccccaggttctcgggtactcttagtatcttgtactggatttgcagtgacattacatgacatctctatttggtatatttgggccaaaatgggccaacttatgaaatcaaagtgtctgtcctgagagatcccctttcaacacattgttcaggtgaggcttgagctgtcaattctctatggctttcagtcttgtggctgcgggacttggaaatatatagaatctgcccatgtggctggcaggctgtttccccattgggatgcttaagccatctcttataggggattggaccctgtacttgtggatgaacattggagagcaagaggaactcacgttatgaactagggggatctcatctaacttgtccttaacttgccatgttgacttcaaacctgttaagagaacaaagactttgaagtatccagccccagggtgcagagaggttgattgccagggagcactgcaggaatcattgcatgcttaaagcgagttatgtcagcaccctgtaggattttgttccttattaagtgtgtgccatgtggtggggtgctgtctggggcatctgtttttcattttgcctgtggtttgtgttgcaggtgttgatagttgttttaaggattgttaggtataggaaatccagtaaattaataaaaaaattttgattttccaataaaaaaaaag

SEQ ID NO: 524 - DNA, 3738 bp, Homo sapiens
atacagtggagctggagaacgccgagagccgagtggccaaactaagagatgaaggggagaggcttcatttaccttatgctttactccaggaggtttacaaattagaggatgtacttgacagtatgtggggaatgctaagagccaggtacacagaactcagcagccctttcgtcactgagagccagcaagatgctttgttgcaaggcatggtggaactggtgaagattgggaaggaaaagcttgctcatggccacttaaaacaaaccaaaagtaaagtggcgttacaggctcaaatagaaaatcacaaggtttttttccagaagcttgttgctgacatgttgttgatccaagcatactctgccaaaatacttccttctttattgcaaaacagagagacattttgggcagaacaagtaacagaagttaaaatactagaagaaaagtcacgccaatgtggtatgaagctgcagagtttgttgcagaaatgggaagaatttgatgaaaactatgcatctcttgaaaaggacctggaaattcttatatctacattgccctctgtgagtttggtggaagaaacagaggaaagattagtggaaaggatttcattttaccagcaaataaaaagaaacattggtggaaaacacgcccggctttaccaaactctgaacgaaggcaaacagttggtggcgtctgtgagctgtcctgaattagagggccagatcgcaaaactggaagagcagtggttgtccctgaacaagaaaattgaccatgagctccacaggctgcaagctcttctcaagcatctgctcagttataacagagattcggatcagttaaccaagtggttggaatcttcccagcatactctgaattactggaaagaacagtccctcaatgtgtctcaggacttggatacaatcagaagcaacatcaacaatttttttgagttttcaaaagaagttgatgaaaaatcctccttgaagactgccgttatcagtatcgggaaccagcttcttcacctgaaagaaactgatacagctacactgagagcttctttagcacagtttgaacaaaaatggacaatgctcataactcaacttccagatattcaagaaaaacttcaccagcttcaaatggagaaattgccgtctcttaaagcaatcacagaaatgattagctggatgaacaatgtggagcatcaaacttcagatgaagactccgtgcattcaccaagttctgcatctcaagttaaacatcttcttcagaagcacaaggagtttagaatggaaatggactataaacagtggatagttgacttcgttaaccagtcattacttcagctaagcacctgtgatgtagaaagcaagcgctatgaaagaacggagtttgcagagcacctgggggagatgaaccgccagtggtaccgtgtacatggaatgctgaatagaaagatacaacatttagaacaacttctagaaagtatcactgagagtgaaaataaaatacagatcttgaacaactggctggaagcacaagaagagagactgaaaactttacaaaaacctgaaagtgtgatctcagtgcagaagctgctcctggactgtcaggatatagaaaatcaacttgcaattaaatccaaagcactagatgagttgaaacaaagttatctgactttggagagtggggcagtgccattgttagaagatacagcatcccgaattgatgagttatttcaaaagagaagcagtgttctcactcaggtcaatcagctcaaaacctccatgcagtcagttttacaggagtggaagatttatgatcaactctatgatgaagtgaatatgatgacaatccgattctggtactgcatggaacacagcaagcctgtggtgttatcattggagaccttgagatgccaggtggagaaccttcagtctctgcaagatgaagctgagagcagtgaagggagttgggagaaactccaggaggttatcggcaaactcaaaggtctctgcccctctgttgctgaaataatcgaagagaaatgccaaaatactcataaaaggtggactcaggtgaaccaagccattgcagaccagttgcagaaggcccagagtctgctccagctctggaaggcctatagcaatgctcatggtgaagctgccgcaaggctgaagcagcaggaagcaaagtttcaacagctcgcaaacatcagcatgtctggaaacaacctggcagagatcctgcccccagccctgcaggacataaaggagctgcagcatgatgtgcagaaaacaaaagaagcctttctccaaaattccagtgtcctggatcgactcccacaacccgcagagtccagcacccacatgctcctcccgggccccctgcactctctccagagggctgcttatttggaaaagatgctgcttgtgaaagcaaatgaatttgagtttgttctctcacagtttaaggattttggagtccggctggaatctttaaaaggtcttattatgcatgaagaagagaatttggatagacttcaccaacaggaaaaagaaaatcctgactcattcctgaatcatgtgctggcactgacagcccaatcacctgatattgaacatttgaatgaagtgagcctcaagctcccacttagtgacgtagctgtgaagacgttacaaaatatgaaccggcaatggattcgggccacggccacggcactggagcgctgcagtgagcttcagggaattggattgaatgaaaagtttctttattgctgtgaaaagtggatccaacttttggagaagatagaagaagcactcaaagtggatgtggctaacagccttcctgagctcctggagcagcagaaaacctataagatgttagaagctgaagtttctataaaccagacaattgctgattcctatgtcacccagtccttacaactcctggacacaacagaaatagagaacagaccagaatttattacagaattctcaaagctgacggatcggtggcagaatgctgtccagggtgttcggcagaggaagggtgacgttgatgggctggtgaggcagtggcaagatttcactacttctgtggagaacttgtttcgcttcctcactgacaccagccacctgctatctgcagtgaagggccaggagcgcttcagcctctaccaaaccagaagtctgatccatgagctgaagaataaagaaattcattttcaaaggaggcgaactacctgtgccctaaccttggaagctggagaaaagttactgctcacaactgacctgaaaactaaagagtctgtgggtaggagaatcagtcaacttcaggacagctggaaagacatggagccccagctggcagagatgattaagcagttccagagcactgtagagacctgggaccagtgtgaaaagaaaatcaaggagttgaaaagcaggctgcaagttttaaaggcacaaagtgaagatcctcttccagagcttcacgaggacctccataacgaaaaagagctgattaaggaactagaacagtctttggctagctggactcagaacttgaaagaacttcaaactatgaaggcggacttaacccggcacgttctcgtggaagatgtgatggttttgaaggagcaaatagagcatttgcacagacaatgggaggacctctgcttaagggtggccatacgtaaacaggagattgaagacagactcaatacatgggttgtattcaatg

SEQ ID NO: 525 - DNA, 2776 bp, Homo sapiens
agccgggtttgagagcagcccgtctacgtgcagttggttcccagctgacagacagaatatggggtgggctttgtcaccagcacgctgggtctggcatgcccagctatgctcggaagtgcaccgtgcccagacacccgccacctctccccgggtcccaactgctctagcaccgaggggccgggctgcacgcctgtccttcctcccatccaggaaggttatataatgagcggaccgctgccaaagtcagagggaaaatgaagtctttgttaaatgccttcaccaagaaggaagtgcccttccgagaggccccggcgtactccaaccgccggcggcggccccccaacacgctggccgccccccgggtcctgctgcgctccaacagtgacaacaacctcaatgccagcgctcccgactgggccgtctgctccacggccacctcgcaccgcagcctgtcaccccagctgctgcagcagatgcccagcaagcccgagggggccgcgaagaccattgggagctacgtgcccgggccccgcagccggtccccatcgctcaacaggctgggcggcgcaggcgaggacggcaagaggccgcagcctctctggcatgtcgggtcgccttttgctcttggtgccaacaaggactcactctcggccttcgagtacccggggcccaagcggaagctctacagtgccgtgcccgggaggctcttcgtcgctgtcaagccataccaaccccaagtggacggcgagatcccccttcaccgcggtgacagggtcaaagttctgagcatcggtgaagggggcttctgggaaggcagcgcccgcggccacatcggatggtttccggcggagtgcgtggaggaggtccagtgtaagcccagggacagccaggcagaaacccgcgctgaccgcagcaagaagcttttcaggcactacaccgtgggctcctatgacagcttcgacacttccaggttgcagacacatttgggggtccctgcaaccctcggagacagctggagtctggacctgtagggcctggttgtggaaacagccccgctgcctcctgcccggtggctctggaggccccttccgcacatccagggcgggtcggctgctccagttctgccttcccacccagtgctgggatgtgcaacgccccccaccgaatgctcagatgtgcagccccctcctctgctggccttggaccttggacctcacacgtgcacatgttctgacatcagtgcctcatccgatgtccaaccccggccagaggaaccaccgtcgcttcagccccactctgaccttggaagccccaccctgcatggaggcagaggtgggaactctgtcatccaccgttccccacagaccactcacagccgctttaagagaacagccagggcttctaggcaggagcacgacagtgttcacgctgatggccagggagcctcctcagccagcagcagccgactcgtgcttgtgcattgttcagatggaagcatgatcattggatggaagttcctggcacaggtgcaagttgaccctgagtcattccagaaggattcgggcctcaccggaaagaacgccaggaaaagccatagggcaacagctcttctgccatttcagtcctcatgggtgaaactggggtaaagcgtgagtggctggggccctgctgacacctgcacttgtgcgtcaccgccaagctgtgtccctagactgccctgggtgagtaggcagccaacgtctgcagccccgtgtggtcagctgctcctgccctcccgcctcatcacggcccttcagacatcagggccggctgcctaccttccaaccccactctgtctggaatgttcttttctcttctgtcccctccccagtcctccaacccattctcctatgtatacttcagtcctcctcctccaggaagtcttccaggtgcccgtatggttctcacagaaccacgtcctgcactgttgaaggcacacatttctgtgactgtggattgatgtttatcttcctcacttgcccggcctttgctctaacgatcaccacagactagggggctcaaaacaagagaagtcacttacctgtcacagccctggaggccagaggtccaaaaccaagatgacagcagggccacgctccctccgggggctccaggggagagtcttcctcctccacctctgctgttggcctgcagtccttggtgctcctcagctgggccacatcactccagcctccacatcactccagcctctgcctccaccttcccatggcctcctctgcactgcctctgggtgtcaacctccctctgcttttctcgcgtaagggcacagtcattggtttaggaccctccctaaatccaggaagatctcaactcaagacccttaactaattatacctgcaaagacccaaattccaagtgtcgtcactttcacagacgctgggggttaggaattggacacatttttttgggtgggttgagtcaccattcaactgaccacaccagacaactctataaggaccagactgggcctggtttgttccttcctaaatgcccagcacccagttcatcccctgactctcagtgggtattcaggatgtaacagctggattgatttattgatttacacggcggcttgacactggccccagttacttctgaactttgaaacccagtcccagctggtcacggaagaactaaagctgtcaccagacggggccaccaacccagctgggatcctgagagctatgagtaaagccatctggtctaccccaataac

SEQ ID NO: 526 - DNA, 2314 bp, Homo sapiens
acttaggcctttcttgcagaattcgccatatactccttaagggccgcggaatcggagcgaccttggtgactggcaaactctcggcagatgtgcgtgcactggtttgatgcagacgtggttgtaggcgatttaatttttcccagctttgcagcgactgttggcttcccagaacggatctccccagcctcgactggaagctgagggacaaaaattcataaaagcaattactctttcccggcgaggcttctagaagagcaagaagagcgatatgattacacctgcagccctataaagattgatctgtccgtctttcccttacagtcgtggcctgttaaacgttcctgtgttgttcagtgccagaatgagtgaccgctatttagaacaaaggattagtatcaaattctgcgtgaaattgaacaagtctgcaagtgagacccaccatcttttaaaagaagcttatggggatgaagtcatgtcaagggccagagtttttgactggcacaaaaggtttaaagaaggacgggaagatgttcgagatgatgcccgaagtgggcgtccagtcacccaccgaacagatgacaatatccagaaggtcaaggacttggtttgttcaaacaggcagttaaccgtgaggatgatggctgaagagttaaatttagacaaagaaactgttaggctcattttgaaagaaaacttgaacatgaggaagatttctgcaaaagttatttcgggtgttttgaagggtgagcctaaaccacgaaaacttgactttcggtccgatctttcaaaggaaactaggaaaaatagctcatgtttgaggaaaaaggtaacaggttctgaaacatggagttatctccagggtgaagctggtggggaaatgcccctgccggtatcccatcccagagtccactactctgccagtcagcttctgcaggcgtcatcttcaacaagccttccccccagggtagctgagaattggttcaccccatggtgagaggaatgtgagttagctgaaccagaactaggatgctgcctcactgttaggcaccttctttggctgctcacgtatttttcagtctccaccactcctccctatgtgccatggccctcctcattactctttgctggactcttggaccattttccttgctgttctccataactttgaaaaacttttggctgttcccttctggtatttgcttgttcttgatttcttttgctcaacaagtttggatttcttctctgcccagaccttagcttgttgtggctgtcctgttcctttgttctcaaccttctgcctcagaggatcatgccagtgagaagagaggaacaggatctcctggaatctgtatctctgtgcccagggaagcatgcttttctgggaggaccccaaaagaaggcttacagtttcagcctgctttgcagtcagggcctgaggtatggtacagaaggtagtagcatgctggtattactgaacagtgctgggcctaggggctgatctggcccagatgactcagtaggcacccttaggaatcaggggttggccaccaatactgatcttctcacaggcctacacctcacagaagagctgggtttgtttcattctagtcctatgctttggacctccactcatttgggtatcacccctgttggaagaggaggatctggtgctagaaaatataagcccggggacccaggcaaggctgtgttgtgtggggaggaagaccaggtggctctctagtccctgaattaagggagcctgctgcctgtgtgcggattcccacacagcagcctgtttttagtaactaatgcctatagttttgagaacttgctgtttttaggacactgctgggcattgacaatgtggaggttatgaacaagatctccaagggctgatgggcttcatggatgagatggttcttgaactggatccatgaggatgggtgagacagggctgtgaaattagggaaagcttccggggcaggtggaacagcatgaggcttccaacctgcatcagtagaaaatgacactggccaggtgtggtgaatcacgcctgtaatcccagcactttgggaggctgaggtgggtggatcacagggtcaggagatcgagaccatcctggccggcgtggtgaaaccccgtctctactgaaaatacaagaattggctgggcgtggtggtgcacacctgtggtcccggctactcgggaggctgaggcaggagagtctgttgaacccggaaggcggaggttgcggtgggtggagattgcgccactgtactccagcctggcgacagagctagactctgtccccccc

SEQ ID NO: 527 - DNA, 2312 bp, Homo sapiens
aagaagttctcggcgttctccagcagcaggtgctggtttgccaacctcggccacctttatgtggagagcactgacccacagttaagtccagctgtaccttggtcaacagtagaaaacccaagtatggataccgttaatgtggggaaggatgaaaaagaggcgtctgaagagaatgcaagctctggtgactctgaagaaaacacaaattctgatcatgagtcagaacaattgggtagcatttcagtagagccaggcttgataactaagactcacagacagctctgcaggtctccctgtttagagcctcacatactcaagcgcaatgaaattttgcaagactttaaacctgaagagtcccagactacatccaaggaagcaaagaaaccacctgatgtggtgcgagaataccaaacaaaactggagtttgcacttaggttaggttattctgaagaacaggttcagcttgtactaaacaaacttggtactgatgctttaatcaatgatattttgggagaacttgtcaaacttggaaataaaagtgaggctgatcaaacggttagtacaattaacactataacacgggaaacttcttccctggaatctcagaggtctgaatctccaatgcaagagattgtaacagatgatggtgaaaatctgagaccaatagttattgatggcagcaatgtggcaatgagccatggaaacaaagaagtattttcctgcagaggaataaaattggcagtggattggtttttggaaagaggccacaaagacattacagtttttgttcctgcttggaggaaagagcaatcccgacctgatgctctcattacagatcaggaaattttacgtaaattagagaaggagaaaatcctggtgttcacgccatcccggcgagtccaggggaggagagtggtgtgctatgacgacaggttcatcgtgaagctggcttttgagtcggacggtatcattgtgtccaatgataactacagggacttggctaatgagaagccagaatggaagaagttcatagatgaacgattattaatgtattcatttgtcaatgacaagtaagtaaaaccatttacttgccaatgatactgcttctgtaaaaatataactatccctggcagctgctacagaattctctttttgccactgtccagacttcacacaggtttctaacaactgatctccccactgatcctcagtgggagtcaggaaaactgcagaatcattgccagaggaggcccggtgtgagtggcaggccccacctttccctgtaagtcactcatagaacacctaaggtagaggaagtcttctaagactgtgtctggagaacctgaggaaacagacactggggaaattcccatcttcaccctcaaaggactgccttttaaaatcaatttagagcactgatagcttactaaataagccatgcttggcttaacaacagggatacgttctgagaaattcatcttcaggcgatttcattgtgggtatgaacatcatagagtgtacttacacaaaccagctggaacagcctactacacgcctaggcgatgtggtacatatagcctgttgcttccaggctaccaacttgtatagcatgctactgtactgaatactgtaggcaactgtaatacgatggtatgatatgtttgtatatctaaacatacctaaacactgaagaggtatatataccataaaatatggtataaaagatttctaaatggtatgtctctgtagggcacttaccatgaatggggcttgcaggacgggaagttgtcctgagtgagtcagtgaatgaatggtgagtgaatgtgaacggctaggacattactataaaccactatagactttataaacactgtatacttaggctatgccaaatttatcaaaaaatacttttcttttttcaataatatattaaccttggcttataacttttttactattaatatataaacttcttagtttttaaaacttttttcttttgtaataccacttcactccagcctgggtgaaacagcaaaactctgtgtcaaaaggaaaaaaaggattattatgaaggctattaagaaacatgggaaagtttttttatgttaaaaaggcaaagtgtaaaattgtatttgtgtttgattaaagccatgtaaaatgatgtgtgcacaatgaaaatgacttaaatctaacacagacctggaaagtaattgtattaagattgtgggattgagtgactttatcttctgttttgtaacatgtaatgttaccatattgttttgtaataataaacactgtggttgctaagtgtt

SEQ ID NO: 528 - DNA, 4249 bp, Homo sapiens
gagactgtagcatccagggttcacgaagcaccactgtaattataaaagtatatgtcactgatgttaatgacaatgatccagttttggaacagaacccttttgatgtgtttctttcccccgagtcgcctacaaaccagacaactgtcattgtgagagctgatgacctggacttggggcccaatggaactgtggtttttagttttgcagagacccagtcaatgttttctattgataaatacacaggagaaattcaatttcagcaaaatccatcttcagaatacttccctatctggctgcagttaaaagttacagaccagggcattccagccaggacaaccacgggtctcttggtcattcacatggaaggagaagatgtaaagatttccttcagccaccacctgtataaagggctcgtgactgaaaattgtgaggcaggtacttctattgtgactgttaaagcttttgctcctgactcaattcaggacagcatgaaatattcaatttttagtggaaatgaagatggagttctttccctgtgctctaagtcaggacaactcactgtgaaagaacccaagtttcttgattttgaagtcagaaatgaggttcaactcatcgttttagctgaaagtagtgggcatagagcctattgcaaagtagcagtcttgatacaggatgagaatgataattcaccatgctttgaacaaagcatttaccaggcatcagtgtctgaaagccaactctacaatgctcatgtcatacaggtttttgctaccgacttggacagtggtttgaacggcctgattgagtattctattctgtctggcaaccaagaagaagcattccagattgatgcactgagtggtgtgataacaacaaaagcgattctagattacgagctcaccagctcctacagcttgattgtccaagccacagataaagggatgcccaggctttctaatacgactgtaatcaaggtacaggtgactgatataaatgacaatgccccagcttttctcccctctgaagcagtggaaattacagaagattctttgcctggtgtaattgtgactcatgtgtcagttcatgatgtggatttgaattcagctttcatattcagttttgccaaagagagtaatcctggaaccaagtttgctattgatcagaacactggagtggtggtgttggtgaaaacattggattttgaagaaatgactgaatatgagctgctcatccaaatttctgattcagtgcactacacagagggagcacttgtagtccgtgtgctggatgtcaatgataatccaccagtgttttctcaagatttctatcaggtcacagttcctgaatcaatacctgtggggtattcagtgctgactctgtcagccacagacttagaaagcaatgagaacatttcttacagaattctatcctcttctaaggaattctccattgatcctaagaatggcacaatatttactatcagtcccgtattacttctggatacaatatcaacaactcaatttcttgtggaagccagtgatggtggaaatcctgacctgagagctcttactttagtggagataggaatagaagatatgaacaattatgcccctgaattcacagtcaaatcctataatcttagcctaagtgaggatgctctggttggaagcacgcttgttacattttcaaacatcgaccatgactggacccgtgaaaacacatatgttgaatattccatcatcagtggtaattcacagaacaattttcatgtggaaactaagttctttcattcagaatatccttataagcaagtcggttatcttgtgttgcttcacagtctggacagagaagcaagtgctagccatgagcttgtcattctggcatctgacagtggctgccctccattgagttccacagctgtcatatcaatacaagtacttgatgtcaatgacaatcccccaaacttcagcagcctgagctatcacacccatgtcaaggaaagcacccctctagggagtcacatcactgtggtctcagcaaatgaccgtgacacagggtcacatgcagaaatcatctacaacatcatctctggaaatgagaagggacatttttacttagaagaaaacactggagttctttatttgattaaacctctggattatgaaaaaatgacaaaattcaccttaactgtccaagcttcagatgcagaaaagaaacatttttcttttgcagttgtgtttgtcagtgtcctggatgataacgaccatgcacctcagtttatgttctcaagcttcagctgtattgttccagaaaatctgcctatttcctctaccatatgctctataaatgctctggattttgatgctggtccgtatggagaattgacctattctattgtatcaccctgttttctcactcatggaatgtcttatgatcatgatctcttcctcattgaccctttgacaggggatattcatgctaagcaaatccttgactatgaaaatggcaataaatactgcctcacagtccaagccaaagacaaaggtgatgcaactgcctccttagtggtctgggtggatattgaagggatagatgaatttgagcccattttcactcaagatcagtattttttcaccctcccagaaaagaataaagacagacagttgattggcagagtggaagcctcagatgcagatgctggtattgatggagtcattctttactcccttggaacctcatctcctttcttttcagtaaataaaaccaatggaaatatttatttgattagagcccttcccctaataaaaagtcaactcaacaaagaagacaccttggaaatgaaaataatcgctcatagtcccaaatcagattccaagtttgcatcttgcactgtttttgtgaatgtgtctttctcctctgaaggaacacccttggcagtgttcgccagcagcttttcaatcagcctggtggtctcctttttagtgtttctgatactcatctgcattctaattgtaatgattttaagacataaacaaaaagacacaataaacaattatgaggagaagaaaacctcatctttagatgcggacttgagagtgacccgggatgccagtgtgctcaaagccttccagaaaactgacgactgcagtaacgaggtggtccctgtggatgccactccggaatggttgagtttaataagtatcatggagaaggatattgtcaatctgtacagacactcaaactccagtggccactgttctgtggaaggagaaactgcagaagataaggaaatccagaggataaatgagcatccctacagaaagtgctcagactcagctctgagtgaccacgagtccagggtgccagactcgggtatcccgagggactcagaccagctctcctgcctatctggggaaactgatgtgatggtgactgccgaaacagcagaagccagccaaacatttggggaaggagatcaaggggaaggctgcagcaccacctgtgctcaaaataatgtgttaccccagacagttcagaagagagaggcaaaagagagcatcctggctgatgttagaaaagagtctgtctttatttcaggtgatcaggaagtaaggtgtgcagctctttcaactcagacgacctctgatcatgatggaaaagacaactatcactggaattatcttcttagttgggagcccaaattccaacctcttgcctcagtatttaatgatattgcaaaactaaaggatgaacatttgcatatgcctggcattccaaaagagaagaaatcttttgtttttccaccccctttgataacagcagtagcccagcctgggattaaagcagtcccaccaagaatgccggcagtaaacctggggcaggtgcctccgaaacacccacgctctcccatcccctaccatcttggttctctgccagaaggcatgactcccaatttttctccatctctttccctattgacgatgcagcctcctgccttgtctccactgttgagagaaggagaattattaggaacacacatcagtggtacatgccatgaacttaaagcagaagatgaagttcaaatatgaaaccactgggatgccaagtacctgctcaccattggtcatgaatgaatgaacaaaatgttttcaagccagcaactcgagattgggctcatttttatctaaaagcaagtgatgtaatttagttagagtttttaaaacttccccattaaagtttctccaatttc

SEQ ID NO: 529 - DNA, 2196 bp, Homo sapiens
gcagagccatggggccttcacaggctgcagtgggtcccgagcccccagggctgtgcctgctggtcctgaccaagatcgcggctgccgaggtcagtccagcgccaagggcacagggccagggcaggcggggcagggctacccgaagcgcatagaggctgctggtgtcaacgtgacgtcttctggggcgcctggcatccctaggagtggaagccgctgatgaagtcaaagctgcctcctccttcaggaagactttgctcccatagctggcgaacaggaagcggagcagcaccaggaggatctgcgggcgctgctgagggcttctttgcagggacagtgcagcaggcagccagggacaagactgcacggcagcgccccatggccaggggaagctcagaaccggagtcgcccgctgcccggcgattctccatccctggatcggtacaggggcatttggacgctgtggggaagtcgcggtctggggatattgggtccagccttcgggtagaagcaggtgataaacgcactcaggccagcccggagcgtcagccacactgcggtgcccacgatgcccagggtgagcaccacgaggcgcaggaaattggctagggtgggagctcactggtaggcgccctggaagtcaaagatctgctgctccagcgctgccaccagttgcaggcagcagaaggcgaggagcgtgtggcacccgcgtactcgcccatcgctccgcggacctctttatccaaccttcaataattattctttttattatattcaatgattattctacttttcatagagagcagctgtcagtccaataacacacttaacaaatgatatacctagtcctcaaggttaacaaacacatgaagaccagcccaaccctgaaaatcagtttgcaaaccttcgctatatctgatgccattcctaaaaatttttagggacaagttttgtttgtggtaaacaacataaggtggggtgtgtgctgagcccaaagctgaccaattgctcacaattactcataactacccattgacttgattttatcaaacttcagacagtcttgtctcctctcctcaggcccctggaccttggctcaccacctaagactgaacaagcactaaaggacagaccagcccgctaacagctcactccaaaaatgagcgggactcccagagaaactatttttattggagcatcctggttttgccacctgctcaccccactgcctgttcttctctccaaggaggcttctgccagccctgcttgtccttccctagaaaaggaaagccttttcctgtttgatcctgagacacctgtagattgagtttggaatattctccctattgcaatagtatttttgaataagttttatttttccctacctctggttgatttttaattaataccagtaagcttggatgaaagcctgcacaccttaggtgtgtgtgtgtgtgtgtatgtatgtactttagcattatcataaagtaataacagtaaaatcaaacaaacacagatggataagcaatatgttggactagtatgaaaatggcattgccagcagtgatatgatttttttttcaaaatggtacactttttgaagtataatcttattttaacctaaaatcttactgtcagaaaatgcagtgtacattaaaatgttctgaactgcttttattcatatattaaatggttgtactcaaatatctacaaatttgtttttcacttatgtaattgtcttatagaatgttcaaaagtcttgcagaatgtgagacaattttctattgaatacgatcgctttatcattgcaagacatcaaacatccctgtttcctgccaaataaatgtacaatagcaataaatgtaaagatgtgttttgtaaaaaagatatatttttgagttacaaaacaaggattttaaaacttgaattgttacagtgaatatgtcttaatacaggccagagtcatttaggtaaaaaattacctcatatctattctttgcagtatcacttaaaggtgtttatttagcggcaaagattttttttttttgtgcctagaggcagatattttgccccatggctatttacggtatgaaactgtatttaaatgagtgtacatatataaaagctgccattctggctgtaaactattgcaggttatcaagattaaaaaataaacaaataaaaatatttcagtttttc

SEQ ID NO: 530 - DNA, 2275 bp, Homo sapiens
gagcagttagtgagcagcttctggggtggaggctctgcagctggcgccggggcgctgggccgattcctcagcctctgaggcctcacctttggcgtggggaaataaacgcgtgcgctctgcaggagtattgtgagggtggtcatgtactcgggacagtgcccagcatgcagtgttagctggaagagtgttagctgttgcgattattatagtcctttctccactcttataattcccaggagtctctttctctctgggaatgtaagttctaggaggatgaggaccgctagtcgttccagtgagccccctgcatgtcccaggcactggccatgccctccagggcttccgtttggccagggagcagtggcccgagccgccccatgcccagcatattcacacagtgctgtggggaggccaccgctacccaggaagaggggtgcagtcagctcagggagactccacagaagaggcaccggtgcaatgtggtgggaaggatgaggaccttgccaggcctaattcgtccttgtctggagaactgggcgcctcctcactgttccctgggctccctggacagaacctgtcggagctggacaccaagatccaggagaaagccatgaaggtggatatggacatctgccgccgcatcgacatcaccgccaagctctgcgatgtggctcagcagcgcaactgcgaggacatgatccagatgttccaggtcccatccatgggggggcggaagcgggagcgcaaggctgccgtcgaggaggacacctccctgtcggagagtgaggggccccgccagcccgatggggatgaggaggagagcacagccctcagcatcaacgaggagatgcagcgcatgctcaaccagctgagggagtatgattttgaggacgactgtgacagcctgacttgggaggagactgaggagaccctgctgctttgggaggatttctcaggctatgccatggcagctgcagaggcccagggagagcaggaagatagcctggagaaggtgattaaagatacggagtccctgttcaaaacccgggagaaggagtatcaggagaccattgaccagatagagctggagttggccacggccaagaacgacatgaaccggcacctgcacgagtacatggagatgtgcagcatgaagcgcggcctggacgtgcagatggagacctgccaccggctcatcacccagtctggagaccgaaagtctcctgctttcactgcggtcccgcttagcgacccgccgccgccgccaagcgaggctgaggactccgatcgcgatgtctcatctgacagctccatgagatagagacctgcctcccccttgcacccgaggccctcgcagcagggagctcagcgaggcagagggtggggctgcacagaggggagcatcagctgcagctctgcaccaggccggtccctggggactggggcgctcctccctcaggcttcctccctcagtcttggcttctccagggctctggggtgtctggagctaggcttggccctaccattctggggccatttccaccacagttggggctctcctgccttcacgcgtgggtgtctgctacttccccatctttaaaatgctgccagagcgattgcggcccctcaccttgtccacgtatcaggaatgtgaatgtgggacctttcctccatccctgttgtccggagccagctcactgtcttccacactggtgctaactggcccaggcactggagtggaatagaatgcagctggaggctacgcatggcctctgcagcacacgcagctggagagggcttctgtccctgtcagcggcagagggcgttggggctggccggggcaccttgtccctgctatggtccacatgctcacgctgtccacctgccaggtggagtgtatgtggctgtggccctccctcgtggaggtgccgtgctttaaagaggccttagtgcccgggatgggcacagtgttttgaagggaggtgggagctcttgctctcctggtcactgcagaatgacagagaaggtgaagctccatgcatgtgtgcgcgggtgtatgtgcgctcagggtctctgtttaagtatcagctaaagatgtgcttcctccgtgtctgtcatacactgagaccaacaggctacagtgtccctgattcttggaaaagcctggagaagctggggagatgcggttcacaatgcctcggtataggaggctgtgttgagctgacattcaaatggattctttaataataatgaaactggcgagtatttattgtgc

SEQ ID NO: 531 - DNA, 2226 bp, Homo sapiens
tggagaatgaatttggatacaagctgtgcatctttgaccgagacagtctgcctgggggaaatacagtggaagcagtttttgatttcattcagagaagcagaaggatgattgttgttctgagccctgactatgtgacagaaaagagcatcagcatgctggagtttaaactgggtgtcatgtgccagaactccattgccaccaagctcattgtggttgagtaccgtccccttgagcaccctcacccaggcattcttcagctcaaagagtctgtgtcttttgtgagctggaagggagaaaagtccaaacattctggctctaaattctggaaagctttgcggttggctcttcccctgagaagtctgagtgccagttctggctggaatgagagctgctcttcccagtctgacatcagtctggatcacgttcaaaggaggagaagtcgtttgaaagagcccccagaacttcagagctcagagagggctgcaggtagccctccagccccaggcacaatgtccaagcaccgagggaagtcctccgccacctgccgctgttgtgtcacctactgtgaaggagagaatcaccttaggaacaagagccgggcagagattcataaccagccccagtgggagacacacctctgtaagcctgttccccaagagtcagaaactcaatggatacaaaatggcaccagattggaaccccctgctccccagatctcagcccttgctcttcatcatttcacggacttatccaataacaacgacttttatatcctataattactgtgtgtggtgggtggtggctactatctctaccaaccctctgtatgtcatgaacctgtgggaaaatctgacatttttatcatctaatggactatcagatttctgtcccctttattgatttttaaaaactatttatttctaggagacaaaagacctgaaggacctgaatccagaattattgcctctaaaggcctcagaagagcacactcttcttgggccctagaaggtcagtatgtgaaagttgcctaaagtctgatcctctatcttgtccaatggtttaaaactgagctaagaatttaaatgtgtttcttttcagtgagttgatcaacctcacattataagtcagtcaggtgtacttgggctatgatgcttacagggtgtatgcattcccagggagcagcatggaaaggagctggttctggtggaagctgtaggacgaagctcaacagaaaacctacagcacatttttcctcaaagaaccaaacatacccacccagggatacatggcgttctctgtctcactgtaaactagtgttctctaaactgcctaacattgttagcatcaataaaattctatttttacgtcattttatttgtactaccaaatttttacatctctctcacccttctacttcctatgattgttgtattcttatctggagagtattccatttcagaaaatggagatttggtttaggtaccagaaaaactaagatgccttttttgtttctctctgatatgtaatgggagagatgtggaaaataaccaaaagagagggagaatgtgacttaaatgaaatggaagtttacaacaatctcatatttttagaactgacagatgaaaaattccgtattgtaagtgatgtagcgtagaaataggtgccttcgtcccattcaggcttctgagaagggataataaattcaagtgcctacaaggatcagaaggtaagagaaaagagaaaatatggccagataccagcttattttacatgctctccatctagaactgatgtgaatagggacataggcacagatagttatttcttctctgtaaacattttcataaactcatataaggcacatggcatttgatttccaagtcaggtagatcattggccctctaagcaactgaagaacacatatttcttaaaaagggtcagcttcaggccgggtgtggtggctcatgcctgtaatcccagcactttgggaagtcaggacttgtggatcaactgaggtcagttgttcaagagcagcctggccaacattgtgaaaccccatctctacaaaaatacaaaattagccaggtgtggtggtgggcacctgtagtcccagctgctcgggaggctgaggcgggagaaactcttgaacctaggaggtggaggttgcggtgagccgagatcgtgccactgcactccagacttggtgacagagcgagactccatctt

SEQ ID NO: 532 - DNA, 3931 bp, Homo sapiens
atacccacgcccggccggggaagctgcttgccctcttctgcctccccactggtcctgagccccctgctaccctctaacccaggcccagaccctcagccctcaggataggcttaggtgcagagctggctcagctgtgcgattgtaacccctccctctgagcctccatgtcctggtctgggaagtgttgtgaggtttgtaaaatgtgaggtgtggatgtggccccaggctagccggggaagaagtggggatgggacgtcctgacctagacgtggaggcggaactcagtcgccagacggatgtttcctgttggcgtgaacaccaggggaggagtcatccctaggtggatatcccccctgccaggccccaggaggcacctggagcttcctgggtgccctgtggggcctgggggggtggggacagggtgtgtggtgtgtcgtgctggtgggcctcggtggtgggcacacattgttcactcagctgtctcttgtcttctctatttctttggcttctctccccgccccccttgccctgcttttgcccggggtttggccgcgggcagtgccaacatacggcccttacggtaggtcccgctcttggtctgcatgtctgtcctgcatgtcagttctggtcactgtcactggcatgcgtctctctgtagctcttctccgtgtcctcatctcctccccaccggcaccccctgggtgggagcgcccagagcacctgtcaagggccaccctctgtagagcttgcctgcttccgtcctcgtttctcgttctggaatatgccccgccttcttctgggggcacagtgctgttcatgggatatcggggcatttcacgatgtttccaagagttcacaagctgagtcaggaatcctgggttccaggggtgggctcgtcccttacatccaggtgtcctgggccacctttctgctctgagcccctgaggatggggacagttgattagagagatgaggaggaagccctcttagagggagccagtgagtcgcatctgctcccctgggggtgcaggccagcctggtcctgatctccagagtagagggagcacagcacttcccccggtggtgggggacgcgcctggcacctgtggaaccgggcacccctggcttccaggccctctggccccacatgccccaacttcagtcagtgctgagcctgctctggcctctctggggcattctaggctcactgcccatagcttgccagtctccaccctgggtcccttccctgcagccagcccagctcccagtgggggtttatgtctgctcctcttcacagtccagcctccccttggggctccccagccaaagaagtccattttttcctgccccttctcatatcctggaccccattcgctgtcccagaagggatggttgaagggcatagctttgggttggggggtgtctgtcccaggatcacgggcaggggctgagccacctccctctcaccgtcccagcctcctcacctgcccctcccgctccctgcccggcaggccgctgtgcccccatgaagagcatctccagcagcctcaaggagaccatgaacccgcacgacatcgtgcaggacgccatccacaacttctcacctgcctaccagcagtacacgcagcagtccaccctggagcctgggcccacctggcgtggtggcgcccacggcctctcccgctcccacagcctcagtggcgcccgcgacaacgagaagactctcctgctcagctctgatgatgaattctaggtgcgggctgcagtggcggaagtgctggcgccatagccacggtcaggctgtgccccacctccagcctcaccaccaggccaggaggcagctggcacagtgctcacgccgcctttatttattggaccagaaacactcacatgtcgcttccagaggaacgggggacagccaggctcgcccatgggccttcaggaatatttatacatggcccagcctgcactgcccgggcgagggcagaggacactgggagcaaggcttatgcccctgctgcccgtcctgtgctgggggcatgctgggaccagccgcacccaggccccaatgcttgtgtgtggaccagcggctgcagccttctagcccctcctccccgcgagactctcaggctgaggtcggcaagccgtggctcccccacacaccgtgcaataccctgtctgacctgggctcttcccgcctgcatccctcccctgtccacctttgtccagtgctagattcacctcaccccgggcaggagtggggatgtgggcgctctgtggtcctcccctcctgacccaggcctctgtggcatgctgcaaggatcagagccagacaccaggagtcacaggccccacccaggaagggcattcagggcccctgggcaccgcttctgttgaagcaggggcttctgggcccctgggtatccccacctgtcgtggccacacctctgcctgcctcatgcccctttcccctggcctaccaaggacagcccacagcccgcactgccggctcacttgggtccttcctcgatagctttgggcagagcccttgcttcctggctgcttcagggctcaggggctcccagccctccttcccaggctgatgctgggtcctctctctctttggggcttctccctcccgtttcaggggaaaggtctgagtctccacgtttcagaccagcttctgggggaaggcagtccggcagggagaccgggaggggtggccacacagtggggagctgggaggtggggggaatggtcccagactcctctcggggcccctatccacacagggcctggtgttctaccccatctggcccctggcccatctcttctgtgccttagtcacatatgaaagcgcccctccctggctccccatctgtcccacacgctccctggggctcttagttcagctgctggcactcgcaggatcctgcagtgctgggcccagagcccttggacaggcctcaggagtggtcaggaccaccaagcccctcctctccccctccacacctctagacctggggcctccggaacccccagcaggctgggcttatactagctcctgacttaggaagagcctcgtgtcacaacacgtgtccctacaggcaaagtgtcctggcatttaaaacccagattatccctgggtttgggctgcagtcacctggagaagctggtagggtaagggagagggaccctgccggtgttcactggggattctttcttttggtccttcctggaatgaacaggttccctccctgccacctgtgaggagagttggggcccagccgtcttcctggcctccttcctttcctcgtggcagaggcctgcatgtgggtgccagaggccagctctccccctccatcttgggggggcggagcagttgggcccaagctgcccgggagggtgggtgcagacacaggctgaggaccagccctggccctgccccgccatctgctttcaccaagctgtctctccaccgtggcttcccttctccctccaggccaaagtgctgctgattcccactcccttggttttcgcctgcccagcgttgctgtttgcgtggagggtggggggagctcagtggcagggaatcagcggtccgtggggtcgtggggacgggaacatgtgcccgaccgctccatcccctcctcctccttaggatgcataacctaccttgtcttttttttttttaattttctttccaggtagagtagctctttgtacataaagaatacttgaaaaattaattgtatgatgtatgagaagacagagtctcctagttttgtatcttgttgtatgactgccatgagttccaccagaaagccactctattttggtctctgtgacattttaaatgcgtgacagaagtgagcaaataaagtgaggaagaaatctatatatgagataatatagattgtattgaaatctc

SEQ ID NO: 533 - DNA, 3726 bp, Homo sapiens
gttatgcttgtgataccggttacatccttcatggctcagaagaaagaacatgtttagctaatggcagttggaccggaaggcagccagagtgcaaagctgtgcagtgtggtaacccaggaaccacagccaatgggaaagtcttccgaattgatggcacaacattttctagttcagtcatttattcctgcatggagggatacatcctttctggaccttcagttagacagtgcacagccaatggaacatggtctggaactttacctaactgtacaataatcagttgtggagacccaggtataccagccaatggactgagatatggagatgattatgtggttggacaaaatgtttcttacatgtgccagccaggctacacgatggaattgaatggctccagaatcaggacttgtacaattaatggcacatggagtggagtaatgccaacttgtagagctgttacctgcccaactcctccccagatctctaatggaaggctggaaggaacaaatttcgactggggctttagtattagctacatctgttctccaggctatgagctatccttccctgctgttttgacctgtgtagggaatggtacctggagtggtgaagtaccgcagtgcttaccaaagttttgtggtgaccctggtatacctgcccaaggaaaaagagaaggcaaaagctttatataccagtcagaggtttcattcagctgcaattttcctttcatattagtgggatcaagcaccagaatatgtcaagcagatggcacttggagtggttcatcacctcactgcatagagcctacccaaacctcttgtgaaaacccaggtgtgcctcggcatggatctcagaacaatacattcggatttcaagtaggaagtgttgtacagttccattgcaaaaaaggacaccttctccaagggtctacaacacgcacctgcctccctgatcttacgtggagtgggattcagcctgaatgcatacccacagctgtaaacagccagaaactcctgctcatgcaaatgtcgtagggatggaccttccatctcatgggtatacactgatttatacctgtcagcctggcttcttcttagcaggtggaacagaacatagagtgtgtagatccgataacacctggactggaaaagttcccatttgtgaagctggttctaaaatattggtgaaagatcctagacctgcactgggaacacccagcccaaagctaagtgttcctgatgatgtatttgcccaaaattatatatggaaaggctcttacaatttcaaaggaaggaaacaacccatgaccttaacagttactagtttcaatgcttccactgggagagttaacgcaacactgagcaatagcaacatggagctgctactttcaggggtatataaaagccaggaagctcgcctaatgttacgcatatatcttattaaagtacctgctcatgcttctgtgaagaaaatgaaggaagaaaattgggcaatggatggctttgtttctgctgagcctgatggagctacttatgtatttcaaggatttattcaaggcaaagattatggacaatttggcctacaaagactgggactgaatatgtcagaaggttcaaattcttcacatcaacctcatggtacaaatagtagttctgtagccattgctattcttgtgcctttttttgcacttatatttgcaggatttggattttatctttataaacaaaggactgcacctaaaacacagtatacaggatgttcagttcatgaaaataacaatggccaagcagcttttgaaaatcccatgtatgacaccaacgcaaagtcagtggaagggaaggcggtacgatttgatcccaacttgaacacggtttgcacaatggtataacgaggcaacctttgccttcttcagaagcttggaaatcgacacacaaaacagtgcacatttagttcactgctaaacaaattaaagcacacttttcaggacttgctgggtcaccttttcctgaggaatgatacagaagagtgttttttcataaactggaccataattcttcatgtttaccatggagagttttacagaaatttggctgcactctgagagtgcttactcacagtttatttgctttttttaaaaaggagattattctaaaatataaacttatttgcatatattggaggagcatccactatcagtatttctgtgctttataaactatattagagggactgggtttaaaaaaaaagatatagggtagaaataagagctatacttacaagagtcaatagatcactgacttctctttaactgtcctgagctacatcacgcccacaaatctgtctttcataccactctatctgccattcattcttgttaaatgaggcattgttttctttatttaagattgagttatgactttaaatgtttatgagctagtttatgcctcggaagacataacgtttcccattccaatttgaatctttctatttctttagcatcatattgctcttcttcttttagactggttgtcatagtttctgcaaagggcaagttcattgtgctaccctcccaattcccccattatggagtaaccagtattattcagtgagctatggggtagtgtttcactccttgcttcaatatggttttttcctatttatttttattattttttaatcccaaatgtgatagtagcttcagtatgtttcctcacccaaaaaccatttggctggcagaaattatctagaaaaattattattttgcagttatctgagacaccaaacttaccatcctttattttacaatatttttgatcgaccaaataaaatgtcctaataatctactctatttatatctacatttccttccagctgagtcttcaaatttagcattattttgacacttttaattttcatttaacaatggattagaaaaatattttggtctagccactaaacataatgactgaaaaaaattattattataaatcaccaatataaatttattgcctacaattgtggacttatcatatttttatatatttttaaatttctgtacctttattgttaaacaccaagtttcacatacaagaggtttctttcattgtcaaattaagatatgtatttgtaagttattggtggctcatttaaactgtatcttacagtaatgccagcatttttatttaataggtcatcgtcttcctttcatagctttttacttcattgaatacgatcatgtacccagtgttaactctttgttgttgtccctttcaaatatggataactctgtgaacagtcttgactttttgtatcatgagacagagtgcctaagagaaacccttgcacctgggagcgctgcttggctctatctctacaacatttaatgaatttcttgtaaaccactttgagatacattgttttggaaattcatacaattttctcaacatggtactctactggcaggatgcagttttaaattttatgccatcagttatttattcttgtttattcaaatgactgcaataacaatgattcattcattaatgttaaggctaatacatttaagatcttgtttaaacaatgtttcttctgcaactggctactcctcttatattaatgcatacacttttgtaaagaagtatatttttatgaaaagaaactttgtaaaagtatgatgtaaattttcagtgcaatgtaaacaaaataaaaatggataattgcttttgt

SEQ ID NO: 534 - DNA, 3935 bp, Homo sapiens
agggggccagacatttaaggaacagatgacactggtagcctcactgttggggcaaaggaagaaggagacgggccaccctacagtccaggcactagctgagcctccaaagccgtggacacagcattcgagtgttgggagggactggtcagtgctgaagtctcacaggtgagtgcccacgcctgctgtcaccatgacaaccattcacagccggcagatgctgcaggagcacgtgtccatggagttctccagctccaccacccacgtgcagaccttctcccagacaaccaagatcgtgggagaggaggtcgtgaggaggaagtcctcgagcatagtggagttcttcagcttagtgacccggagctcaaacatccctgcgggcgacagcgtccctgagctcgtggagaagcctcaaccggtcaccgcgcccgagggggacaaagccgtgttccgagcccgggtgcaggggaacgccaaaccccacatctcctggaagagggagagcggcatccccatcaaggagtccgccaagatattctacgacagcattaacaaggaacacgtgctgaagctggagccactgacttcggatgactctgacaactataagtgcattgcaagcaatgaccatgcagatgccatctataccgtatctctgctggtaacagaaggtcaagagaaaatggacttcaaaaagatgctgaagaagagggcaccccctgctcccaagaagaagcagaagaaggtggcaaatgagaaagagatgctggagattttgtccaaagtgcccaagaaagactttgagaaggtgtgcatggagcatggtttcaccgactttcgggggctgctcaggaagctcaaagagatgaagaagaaagtagaggtggaggccatccggattctgaagcccctggaagacaaagagaccaaggttgacaccacagtggtctttgactgcataatggaactgaaagaccccaatgtcaagatgatatggatcaagggtactgagccactgaggatccagtactccctgggcaagtacgatgtgaagcagatgggcaccaagtacatgctggttattagcaacgtgaacatgaacgatgctggcatctacagcctgtccgtgggcgataagcggatgagtgcagagctcacagtgctggatgagccactgaagttcctgggagagatgaagcctgtgaaggtgacagagcgccagacagctgtgtttgagatccgcctctccaagaaagagcccaactttgtgtggaagttcaatgggaaggagctgaagagggatgacaagtatgaaatcacggtgtccgaagatggtctgacgcacacgcttaagattaaggatgccagactcagtgacagcggcgagttctctgctgaggcggggaacctggtacaaaaggcccagctcactattgaccgcatccccatcaagtttgtgagcaacctcaaaaatgtacgtgtgaaagagaggagtcgcgcatgcctggagtgtgagctgacatccaaggatgtgacactgcgctggaagaaggatgggcagctgctgatgcatggcactaagtacagcatgaaccatgagggcaagcaagcagagctgatcatcgaggatgcacagctcagtgatggtggcgagtacactgtggtggccatgcaggatggagaccctactgaatactacagtactgccatcgtcactgtggaggagcgtctggccacagtgaagagcgggatgtccgacgtgcacgcggccactgggagcccagctgagttgtgtgtagtgctgaatgacgagaaggtggagggtgtgtggctgaaggatggcaaggagatcacggacttgccaggcgtgcagattgtgaagcagggtgcagtgcacaagctcatctttcccagtatgggccctgagcacgagggcaagtacacattccgggccaagggcacggaaagtgaagcctctgtattcatcgcagatcctcctaccatcgacccgtcagtactggaggcactggctgcgcacgccatcactgtgaaggtaggccacacggcccacatcaaggtccccttccggggaaaaccactgcccaaagtgacatggtacaaggatggcatggaagtgacggaggaggaacgcgtgtccatggagcgcggggaagaccaggcactgctcaccatctccaactgtgtgcgtgaagacagcggcctcatcctgctcaagctcaagaatgaccacggctcagccacggccactctgcaccttagtgtgctggagcctcctggttttgcctcccagcctcaagtgactgatgtgactaaagaagccgtgaccatcacgtggaatgcccctacccaggatgggggagccccagtgctcggctacattgtagaacgaaggaagaaaggcagcaacctgtgggtgccagtcaacaaggaccccatccagggcaccaagtgcactgtggatggtctcctggaggacacagaatatgaattccgagttatagctgtaaataaggcaggccctggacagcccagtgtgccatccagctcagtagtggccaaggatcctgttaaacccccaggcctggtccaggacctgcatgtatctgattcctccaactccagcatttccctggcctggcgggagcctgcagagggagacccaccctctggctacatccttgagatgtgggctgaagacacaaaggagtggtccaagtgcacaaagatccccatctcaggcacctgctacacagtgggaggactcatcgagaggcagaaatacttcttccgaatccgggctgtgaatgaggctggggttggggagcctgtggagctagacaagggggtccgtgccatgccaccaccagggctcaccaccacctgacgtgatctggcagaaagatggcgttcccaccaagggccgagagacaattaccaagagcaaaaaccactcccagttcctcattaatagcaccaagcgctctgactcaggggtgtaccgaaccttgcttcagaatgagtttggagaagcacgctatgacatccatgtgcgcgtggcagatttccctcggccccccacaaacctacggttgtttgaggaagtccccaacacagtgactctgacctggaaccacagcccagatgtgcaggaggacggtgaggctcactacatcatcatgaagcgggatgcaagcacagccacctggtacacggcagccgagcgtgtcttcagcaacaagtacacagtgacggggctgctcccaggcaggaagtactacttcagagtggtggctcggaatgaaatcggtgacagtgagccacttgactccagggacacctggctcatcaataaggaccagatccaggacctgagcgccaagctcaagccctacgagaagaaggactggcgccacgcgccgcgcttcgtgacgcccctcaagccacacacggtgctccgcggccaggactgcaccatgacctgcgcctcccttgggaacccgcggcccacagtgaccctctacaagggcgacgtcaacatcacggccaactccaagttctggtacaactccaccagcggcgtgtgcaccctcgtcatccccacctgcacgctcaaggacagcggcgattacagcgtgctggtggagaacgagctgggcaaggaccgcagcagctgcacgctcaccgtctatgacaaagatgataagtcagttgtagcatccatcaccgagagtctgcagaagaaatcaaagcacctcatgtgagctccagccaagcccaggcatcaggaggctgttatgatgtggagtttcttggcctgtcctctgcatggcccagtgtaggaagcccagtttgctctctggtgtttgttaatgtaaacattcagtgaagggatggggcaataaacgtaactcatcctt

SEQ ID NO: 535 - DNA, 2305 bp, Homo sapiens
gcagtactgcgcgagccttagccgcgcaggctcagcgaagggaggctggcggatctgctaccttttgcggttcccaccaagagtgacaaaaccttgctagtgtgggagctgagctctggacccacggccgacgctttgcatgctgtttctcttggaggtggtgcaggaggttgaggaaagcacctctgatgagcagatagctggaggctgttcccacagtcatgtctcagcgaagaagtcggagttcagcagccatcagaaccaagggattcaacttggtgtcatcttcaaagagagaagacagaaggagcaagattagtggaatcattacagcctttgtcactctgagtccagatgggatgaaagttcagcccaaactttcattttagagagagagggtcttgctccgtcacacaggctggagtgcagtggtacaatcacagttcactacagccccgacctcctgaactcaagtgatcctcccacctcagcctcccgagtagctgcgtctggctaattaaaaaagatttttttgagacgaggtctcactgtgttgcccaggctggtctccaactcgtgggctcgagcaatcttcttgcctcagcctctcagagcactgggattacaggcgagagccacctcacctggcctaacaaggggaacccaccaagccctactcaagcccagggatgtctgcatgggaagaataacatcatgaaccaccagtgccaagaaggaattctcagcaggttaactgcaccagcacccactgaggtttggtgaggccaagggccaaggcttgccaggagctgtcagtctttccttctgcagatgcctctgggctctgagctgctcctcctgcagcagggatggctgaactgagccagccacactctccttctgtcaggtcctctatgcccactactttgggggatggaggattaggaaggctattggaggctgagaactaaagtttcttttagggctgggtgtggtggctcatgcctgtaatcccagcgttttgagaggctgaggcaggaggattgcttgagcccaggaatttaaggctatagtgagctatgatggcaccactgcactccagcctgggtgacagagcaagaccctgtctcttaaaaaaaaaaaatagtttcttttagactgtgctaactgattctttcaaagattgagcctttggtatgggtttatgacccccatttctggagctaatcctggaattaacattacccttagactccagagtgggtcatggcggggcgggggcaggcaggcatctgccgtgagagacgaaattgtttaaatccattccagcccaagagcaaggagaaaagctctgggaggctgtgaaaggcaaagtgggtggaggggaggggagcagagaaccatgcagggactgactgcagctgttggcagagagaccatgtcagctggccctgccctccgggtttttagggacctaggttcagctctcagttgcagctgaggctccagagagcttgtaagaagggacaatgtgcaggagtgagcccaggcccatggggcgcctggggatgggatgattttcagcctgcaccagccatgctcccccaggtggagtttctctgtgctcctctttgctgacacaactcctgcagatgcacacagtcagaggccttgcccttcccccagcctgaccaacctcctaatgttgaggagggctcaaccctcatttaactcatagtctctgaatttgggcatatgctttaaatgggggttgtgttgatgggagagtttggctgtcatctgacccattttgcagttctcatggctcagcgcttgtgaaagctgagtcatgtggtggcagccagccccaggatcccagggctcatctgaggccatctctccattgcttagaccatggttctcaaatttgaaagtacacaagagggaccacttcaaaaatcagatttctgggatcctggttccagaggatcatattcagtgggatggggcccaggaatctgcattttacaagccctccaggtataaggagagcctcacagtctgcagactattctgcaacgctctgctccaggaagaaccaacctggggtctatcctacatattctttctgaggctctgtgagtctcatgcgaaggatgctgaatgctttgtaaaaatgcttcttgcggctgggcgtggtggctcacgcctgtaatcccagtactttgggaggccgaggcgggcggatcatgaggtcaggagatcgagactgtcctggctaacacggtgaaacctcatctctact

SEQ ID NO: 536 - DNA, 2933 bp, Homo sapiens
aatgagagcggcggtggcggcagccgggccgagagacggactcgggctgactccagccgctgggagcgcgaggccatgtaacccgctcggctccaggctgcgaggtgcgtaatccccagccggcccctcgcgcagcgggcacggccagcgctgccacaggtgacttgatttctgcgacggtagcttagccacccggggccaatctcgaaacattcttattttcaagtcctttggactgggtgccatctggagaagggggaagactcctcgaaaaagtctgactgttgagaaactgacgatccaaatttaaaaagtgattccccccctcccgttccctcctcttctctctgggaggcagatgggagccatggcttaccccttactcctctgcctcctgcttgctcagctgggattgggagctgttggcgccagccgcgacccccaaggacggccggattcccctcgagagaggaccccgaaggggaagccgcacgcccagcagccgggtcgagcctctgcctcggactcctcggctccctggagccgctccaccgatggcaccatcttggcgcagaaactcgccgaggaggtgcccatggacgtggcctcttacctctacaccggggactcccaccagctgaagcgagccaactgctccggccgctacgagttggcgggcctgccggggaagtggccagccctggccagcgcgcacccctccttgcaccgggcgctggacacactgacacacgccaccaacttcctcaacgtgatgctgcagagcaataagtcgcgggagcagaacttgcaggacgacctggattggtaccaggcgctggtgtggagccttctggagggcgagcccagcatctcccgggcggccatcaccttcagcaccgattcgctgtccgcaccggccccacaggtcttcctccaggccacgcgcgaggagagccgcatcctgctccaagacctgtcctcctccgcaccccacctggccaacgccactctggagaccgagtggttccacggcctccggcgcaagtggaggccccacttacaccgccgcggccccaatcaggggccccggggcctgggccacagctggcggcgcaaggacgggctcggcggggacaagagccacttcaagtggtctccgccttatctggagtgcgagaacgggagttacaagcccgggtggctggttactctttcctctgccatctacgggttgcagcctaacctggtcccggaattcaggggtgtcatgaaagttgacataaatcttcagaaagtggacattgaccaatgctcaagtgatggctggttttcaggaactcataaatgccacctcaacaattcagagtgtatgccaattaaaggcctaggattcgttcttggagcctatgagtgcatttgcaaagcaggattctatcatcctggagtcttaccagtgaacaactttcggagaaggggtccggatcagcatatttcaggaagtacaaaagatgtgtcagaagaagcctatgtctgcctaccttgcagggagggctgccccttctgtgctgatgacagcccatgcttcgtccaggaagataagtatttacgacttgccatcatctccttccaaggcctgtgtatgctgctcgacttcgttagcatgctggtggtctaccactttcgcaaagcaaagagcatccgggcatcgggccttatcctgttggaaacgatcctttttggatctctgctcctatactttccagttgttattttgtactttgagccaagcacatttcgctgtattctcctaagatgggctcgtcttctcggttttgctactgtttacggaactgtcactctcaaacttcacagggttttgaaggtgtttctttcacgaacggctcaacgaattccatatatgactggcggacgggtcatgaggatgctggcagtaatactcttggtagtgttttggtttctcattggctggacttcatctgtgtgccagaatttggagaaacagatttcacttattggccaggggaaaacatccgatcacctcatcttcaatatgtgcctcattgaccgctgggactacatgacagcagttgctgaatttttattcctcttgtggggtgtttatctctgctatgcagtgcggacagtcccatcggcattccatgagccccgctatatggctgttgcagttcacaatgagctcatcatctctgctatattccatacaattagatttgttcttgcctcaagacttcagtctgattggatgttgatgctgtattttgcacatactcatttgactgtgacagtcaccattgggttgcttttgattccaaagttttcacattcaagcaataacccacgagatgatattgctacagaagcatatgaggatgagctagacatgggccgatctggatcctacctgaacagcagtatcaattcagcctggagtgagcacagcttggatccagaggacattcgggacgagctgaaaaaactctatgcccaactggaaatatataaaagaaagaagatgatcacaaacaacccccacctccagaaaaagcggtgctcgaagaagggcctaggtcgttccatcatgagacgcattacggagatcccagagacagtcagccggcagtgctctaaagaggacaaggagggcgccgaccatggcacagccaaaggcactgccctcatcaggaagaaccccccagagtcttcagggaacacagggaaatccaaggaggagaccctgaaaaaccgagtcttctcactcaagaaatcccacagcacttatgaccacgtgagagaccaaacggaagagtccagtagcctacccacagaaagccaagaggaggagacaacagaaaattccacactggaatccctgtcgggtaaaaaactaacac

SEQ ID NO: 537 - DNA, 3156 bp, Homo sapiens
cggtaggttaccttgccagaggctgcagggaacttactccatttcagcacagaagcactttgtttcataggacagtggttctaccactttccaggaagtccaaaggctgatctcttggaaatgcagcaaaaggtgaggtgagtgccaacttctgggctactccagagggcagctccaatgccagagatgttcaagttaagccaggatcaaacaggaaaaacccacgctcccgagggagaggctggccctcgaggggcagggccctgcacctgtcagtccccaggccggcaggaggcctccacggtatgtgagaaagctgcctgtcttgggagggaaatctcactagatggttcctgaagcggcttcgcaggctagcatttcataaacgttttcacttgtgaaaacaaaaatcccttgagtgagttgtgtaagcacaacatagaggcttgtttataatgctacgtatgtacttggaaaaccccccaagaagtcagaactgtcaccttggtctgttagctgcgttacttggaaggattcttggcgtctgcgctctggttatttgtgttactgggcagtgtggaagacgtagaattagatgaggacagtgttggttcgttgctgatcggccacggtaaagagcatatttcttttctttcttgctttctgggggcttttcgccaaaattgatcatttcataaaagaggggaaacccaaggagagagactgaactttgaataaaaatttgaatgcaaaaaaagtgcagttctgctttgtcgatctaagtgacattctgagtgaccaacgcattcctctttctagagggatggccacgcctggctacctccacactgtgggccacagcacacctgtgcaccatctcaattagctgccaactctcttttaaacatcgaaattatttgtcccccaaacgtgtaaatgcatggttttaagaccccttcaagtcaaagtttgcagacaaagctctctgtgcatttgatttgtctggtgtggcagatgagatggcacataggagggacgtccccagggatggacacgtggctttgctctttgctggcgcgtgtagcaaggggtgtgctagggtcccgccgaaaaagaagttgctcctgttgtcgctggcagttcccctcggctgccctggcacctctagctgacgagaaaaagtgctcattcaaagcaaagcaatggagcggctgcactttcacccacagaagtgcagcgttgttttgcagagcagtggttatgccaggcaccactccctggggcctgggaatccgattccagttctctctcacagaactggaaattcaattagcatttgctgagggaggtcgggagaaatggaatgaaaagaccagctctccggggtgccatttctattagcagatgagagagacacccaatggctcagcatccacccgggaccacagaagaggggatgctggtgtgggaggaccctgcggcactctcgtcctaactcctctctcttccttttcagggaggaagagatagtcgctctggatcacccatggctagacgctgaaaacccacctggttccggaatcctgtcctcagcttcttaatataactgccttaaaactttaatcccacttgcccctgttacctaattagagcagatgaccactcccctaatgcctgcggagttgtgcacgtagtagggtcaggccacggcagcctaccggcaatttccggccaacagttaaatgagaacatgaaaacagaaaacggttaaaactgtccctttctgtgtgaagatcacgttccttcccccgcaatgtgcccccagacgcacgtgggtcttcagggggccaggtgcacagacgtccctccacgttcacccctccacccttggactttcttttcgccgtggctgcggcacccttgcgcttttgctggtcactgccatggaggcacacagctgcagagacagagaggacgtgggcggcagagaggactgttgacatccaagcttcctttgtttttttttttcctgtccttctctcacctcctaaagtagacttcatttttcctaacaggattagacagtcaaggagtggcttactacatgtgggagcttttggtatgtgacatgcgggctgggcagctgttagagtccaacgtggggcagcacagagagggggccacctccccaggccgtggctgcccacacaccccaattagctgaattcgcgtgtggcagagggaggaaaaggaggcaaacgtgggctgggcaatggcctcacataggaaacagggtcttcctggagatttggtgatggagatgtcaagcaggtggcctctggacgtcaccgttgccctgcatggtggccccagagcagcctctatgaacaacctcgtttccaaaccacagcccacagccggagagtccaggaagacttgcgcactcagagcagaagggtaggagtcctctagacagcctcgcagccgcgccagacgcccatagacactggctgtgaccgggcgtgctggcagcggcagtgcacagtggccagcactaaccctccctgagaagataaccggctcattcacttcctcccagaagacgcgtggtagcgagtaggcacaggcgtgcacctgctcccgaattactcaccgagacacacgggctgagcagacggccccgtggatggagacaaagagctcttctgaccatatccttcttaacacccgctggcatctcctttcgcgcctccctccctaacctactgacccaccttttgattttagcgcacctgtgattgataggccttccaaagagtcccacgctggcatcaccctccccgaggacggagatgaggagtagtcagcgtgatgccaaaacgcgtcttcttaatccaattctaattctgaatgtttcgtgtgggcttaataccatgtctattaatatatagcctcgatgatgagagagttacaaagaacaaaactccagacacaaacctccaaatttttcagcagaagcactctgcgtcgctgagctgaggtcggctctgcgatccatacgtggccgcacccacacagcacgtgctgtgacgatggctgaacggaaagtgtacactgttcctgaatattgaaataaaacaataaacttttaatggt

SEQ ID NO: 538 - DNA, 3099 bp, Homo sapiens
gagtcgaaaccggggtcggggccggggccggctgagtgaaagggtgggtgattatcccgggagataggccgaaagggcagaaccgcggcaggggccaagcctcctcaactatgacctcaaccggccaggattccaccacaaccaggcagcgaagaagtaggcagaacccccagtcgccccctcaggactccagtgtcacttcgaagcgaaatattaaaaagggagccgttccccgctctatccccaatctagcggaggtaaagaagaaaggcaaaatgaagaagctcggccaagtaatggaagaagacccttgccccatgctggagtcacctggtgccccctgccggagtgcccaggcttcagtttcctgtgctctggaagcccttgagcccttctgggaggttcttgtgagatcaactgagaccgtggagagggacaacatggaggaggacaatgtagaggagagtgaggaggaaggaccctgggagccccctgtgctcccaatcctgacatggccagtgctacagtctcgcacagggctggtctatgaccaaaatatgatgaatcactgcaacttgtgggacagccaccaccctgaggtaccccagcgcatcttgcggatcatgtgccgtctggaggagctgggccttgccgggcgctgcctcaccctgacaccgcgccctgccacagaggctgagctgctcacctgtcacagtgctgagtacgtgggtcatctccgggccacagagaaaatgaaaacccgggagctgcaccgtgagagttccaactttgactccatctatatctgccccagtaccttcgcctgtgcacagcttgccactggcgctgcctgccgcctggtggaggctgtgctctcaggagaggttctgaatggtgctgctgtggtgcgtcccccaggacaccacgcagagcaggatgcagcttgcggtttttgctttttcaactctgtggctgtggctgctcgccatgcccagactatcagtgggcatgccctacggatcctgattgtggattgggatgtccaccacggtaatggaactcagcacatgtttgaggatgaccccagtgtgctatatgtgtccctgcaccgctatgatcatggcaccttcttccccatgggggatgagggtgccagcagccagatcggccgggctgcgggcacaggcttcaccgtcaacgtggcatggaacgggccccgcatgggtgatgctgactacctagctgcctggcatcgcctggtgcttcccattgcctacgagtttaacccagaactggtgctggtctcagctggctttgatgctgcacggggggatccgctggggggctgccaggtgtcacctgagggttatgcccacctcacccacctgctgatgggccttgccagtggccgcattatccttatcctagagggtggctataacctgacatccatctcagagtccatggctgcctgcactcgctccctccttggagacccaccacccctgctgaccctgccacggcccccactatcaggggccctggcctcaatcactgagaccatccaagtccatcgcagatactggcgcagcttacgggtcatgaaggtagaagacagagaaggaccctccagttctaagttggtcaccaagaaggcaccccaaccagccaaacctaggttagctgagcggatgaccacacgagaaaagaaggttctggaagcaggcatggggaaagtcacctcggcatcatttggggaagagtccactccaggccagactaactcagagacagctgtggtggccctcactcaggaccagccctcagaggcagccacagggggagccactctggcccagaccatttctgaggcagccattgggggagccatgctgggccagaccacctcagaggaggctgtcgggggagccactccggaccagaccacctcagaggagactgtgggaggagccattctggaccagaccacctcagaggatgctgttgggggagccacgctgggccagactacctcagaggaggctgtaggaggagctacactggcccagaccacctcggaggcagccatggagggagccacactggaccagactacgtcagaggaggctccagggggcaccgagctgatccaaactcctctagcctcgagcacagaccaccagacccccccaacctcacctgtgcagggaactacaccccagatatctcccagtacactgattgggagtctcaggaccttggagctaggcagcgaatctcagggggcctcagaatctcaggccccaggagaggagaacctactaggagaggcagctggaggtcaggacatggctgattcgatgctgatgcagggatctaggggcctcactgatcaggccatattttatgctgtgacaccactgccctggtgtccccatttggtggcagtatgccccatacctgcagcaggcctagacgtgacccaaccttgtggggactgtggaacaatccaagagaattgggtgtgtctctcttgctatcaggtctactgtggtcgttacatcaatggccacatgctccaacaccatggaaattctggacacccgctggtcctcagctacatcgacctgtcagcctggtgttactactgtcaggcctatgtccaccaccaggctctcctagatgtgaagaacatcgcccaccagaacaagtttggggaggatatgccccacccacactaagccccagaatacggtccctcttcaccttctgaggcccacgatagaccagctgtagctcattccagcctgtaccttggatgaggggtagcctcccactgcatcccatcctgaatatcctttgcaactccccaagagtgcttatttaagtgttaatacttttaagagaactgcgacgattaattgtggatctccccctgcccattgcctgcttgaggggcaccactactccagcccagaaggaaaggggggcagctcagtggccccaagagggagctgatatcatgaggataacattggcgggaggggagttaactggcaggcatggcaaggttgcatatgtaataaagtacaagctgtt

SEQ ID NO: 539 - DNA, 2829 bp, Homo sapiens
aacagagtaggcggtcactgccttagcagtgaggcctcagggcccgggcaggcacagccagcgggactcgaagcaggctggcgccgaggctcgtgtagccgcctcacagctgcaggcggactaatctccagaatctggtctccagaaacattattctaatctgtgtatggaaaaatcccagaaaattaatccttttatattgcatatactccaagaagtggatgaagaaattaaaaaggggctagcagcaggaatcacattaaacattgctggtaacaatcgcttagtgccagtagaaagagttacaggtgaagatttttggattctttccaaaattttaaagaattgtctgtatattaatggtttggatgttggatataaccttctatgtgatgttggtgcatactatgctgcgaaactgcttcagaaacaacttaatctcatttacttaaacctcatgtttaatgatattgggcccgaaggtggagaattgattgctaaagtgctacataagaatcggactctgaaatacctaagaatgactggaaacaaaattgaaaataaaggtggaatgttttttgctgcaatgctgcaaattaattcatcattagagaaattagatctgggtgactgtgatctgggaatgcaaagtgtgatagcatttgctacagtactaactcaaaaccaagcaattaaggcaataaacctaaaccgacctatactgtacagtgaacaggaagagtctacagtccatgtaggccgcatgttgaaagaaaatcactgtcttgttgcactacacatgtgtaagcatgatataaaaaacagtggtatacaacagttatgtgatgcactgtatctgaacagtagcctgcgctaccttgatgtcagctgcaacaaaataactcatgatggaatggtgtatttggctgatgtactgaaaagcaacactaccctggaagtaatagatctttcctttaacagaatagaaaatgcaggcgcaaactatctcagtgaaactcttacttcacacaacaggagtcttaaagcgttagtatggttttatatttaatcaaaataacagaaaagcaaatttttaaatactaacctcaatccccttaactcttaagattataatgaaatatgaaaactcagcttctaaactgacatagtattaagttacagtaaacatttacatttctatttttcaaatgtaatgtcttttacaattagactgattctattaacgattccttcaaattaatgagaaaatttgcattgcttatattacttatcctgaattctaatagaaaactcagaagcattcaatatgatcaagacttttaaaagtaagaatgaactaaagaataaaatacttggatgcatttatccagaaaaatatatctgctatccacccaaacatttactgaataatataaaacagaagactttcaaaatgtagttagctctactaagtaccttaaggatctaattagaaaactaagtttcttggattttaggaattaaatggtcagtatttttaccactacattacaacatactgaagaataatgctaagactacacaagaaagtgtttgtaataaatgttgctaatttttgtattctttccttgtggaattattggtttcaggttgtcagtagtcagcaacaacatagagggagaaggacttgttgcactttcacaatcaatgaaaacaaatctcactttctctcatatctacatttggggaaacaaatttgatgaggctacgtgtatagtaagttttaagttttttccttcactgaaggctttttctgggatcatctctgtaacatcagatattatttacaggtgcctcagaaatggttacacagtgagacactgcagttttgataattaacataagtcttaaaattaactactagagagtttggtggttcaaataaccaaagatattaaaactatgtattagtattacacatcactgaatgacacagttctaattcctctaaggttaagaaaaatcataattattgatcagatgtagcaaaatttctgatctgctccctaataattataccaaaatatggaatgggagagatagagtacaagctatcaaaatatttggcatgttgctcacataaatacagacagcctttgatactactttcaaaacagaaataatggtaacagttttcatttggaaagaacgagggggaaaaagtagatgttaaaattctcaaaatttgcaaaaggactaacaaaaattccaccactaaaaagagtaataaaacatagagtgttgtctaaaccaccctcccaaaaaaaccaacccttacttttagaaaaacatccataattctttaggttctacacatcagtagctgaataagttgagtctggaactggaactaatgatgaatgacaagctaaagcaaaaaccaacttgacttttaaatcttttaatgtctaaatttccatctttctccatattgccaaccttactgacaaaccagttcaacgtatttgtatgactctgttacatagatactaaggatcgtggctcatgcctgtaatcccagcactttgggaggctaaggcggggggatcacgaggtcaagagattgagaccatcctggccaacatggtgaaaccccatctctactaaaagtacaaaaattagctgggtgtggtggtgcgctgggcctgtagtcccagctattcgggaggctgaggcaggagaatctcttgaacccaggaggcaggggttgcagtgagccgagatcgtgccactgcactccagcttggcgacagagcaagactctgtctc

SEQ ID NO: 540 - DNA, 1992 bp, Homo sapiens
taacattctgggaggccagccctgctcactgggggcacagtggcctctggcaagtgctggctttcttcccagcctggctcctccttcctccttctgtgccacccatggctctggcaccagcaggaggttctgggccggctgctgtgtccctgggaagaagcaactggagctggctgagctttatgacttacctgggcagggaggtgggaggggaggttggctggggtctgcctgcccaccctgcagctcctcagtgggactctgctccttcaacttcctccaccccccactgccgggccagtatccctggacactcatcgccctcttcccctggcaccaattgcacggggacagccccagatggctccttggtctggggacaaaggctgtgctgtgcctggccccgggctggcctcaggctggtcatactgagcccttctgtccccacttgggggtgaggggtagatagcactaaggtgacaggcctttttcctgtctcccttccccctcgacccccaaatctgaggagctgactctcccaagggaaaaatgacagaggcatcttgtgtcttgacctagggaacaacagactattcactgcccagtctgccctgtcacacccaagaccctgctgctgggttcaatgccctgattgtccccagcagagagagacatccactctgctgtggtcaccacccccaccgcctgctcccctgtcaccatcaggaagtccaccctacatctgacctccatccttccatcaggaagtccatcctacatctgacctccatccttccatcaggaaatccatcctacatctgacccccatcccttctgctgctgtgacagccacttcctctcaggctcctgtcctgcgggtggagaacagctggtccccatcgcctgcactgcttggcctcacattcctgctccagtcagctgcctctggcctcacccttcctccagctcccagccccactgtcctccccaccccaggcacaggctggtggctccttgctcctcactgaaccttagggatagcaggtgtgactcagggctgaatctcttttgtcttgcagaaatggggggcctccttcccggaggcttttaatgagctcccctcccctcaccctacaagcaagagcaagggtgtgagatttatgattgctacttgtagattcctgagccgcaaatccaacatgccatcccataaatcccagactgcaggacggttttatggggaagccctgtttttagaaaggggtgtggctggtctccctcctagcagagctcagacctcagggagccaagtgcctgcctctccccacccccagagaacaaccatgacaaagcacggggacattggggacatcagttggtgtggtggagatgcactggcttccaggacagagagacttcctctcctgtggggggcctcctgcttcccttccctgctctgaggatcccccgtctcagcacaggagggtggcctggaagcctgggcagataattgtccctgacctggaccttagatgttttcctggtcaccgctccaggtgtacatcattggagatgttttttcaaatgcattttcccaggcaccattctcagaacctcagttccagaatctcagggtaagacctaggaatctgaatttttttacaatgctccctggtgattctgatgttcagctatctttgaaaataattggctgagtgctgtggctcatgcctgtaatcccagcactttgggaggccgaggaggggcagatcacttgaggtcaggagttcgagaccagcctggccaacatggcgaaatcctgtctctgctgaaaacacaaaaattagccgggtgtggtggcgcgggcctgtaatcccagctactcgggaggctgaggcatgagaatcgcttgggcccggaaggtggaggttgcagtgagccaagatcacgccactgcactccagcttgggtgatagagcacgactctatctc

SEQ ID NO: 541 - DNA, 1986 bp, Homo sapiens
gcgtggcgtgggggtctgtggctgctgggctggcggggcgcaggccgcgggacccgagcccggggaagcgagagagcggaggcgccgaggatccgattcactccctggggagacctatgggccgaagccgtgtaaatgcgttttaaggcgagtgcggaaagtggcctggggagcctcggggagcggacgccctccgccctggtgctgacctgcctccctgccccttctgcctcctgtcagcagaggcctcggctccgcaactgccactcctcctcggggtgttgcacaagtttcgaggtcaccggcggccccccctagcagcgcgcctggctctggcccccgcgaaggaggacggagtttggacgaggtagctgccttcttcgtggctgacctgggtgccatagtgaggaagcacttttgctttctgaagtgcctgccacgagtccggcccttttatgctgtcaagtgcaacagcagcccaggtgtgctgaaggttctggcccagctggggctgggctttagctgtgccaacaaggcagagatggagttggtccagcatattggaatccctgccagtaagatcatctgcgccaacccctgtaagcaaattgcacagatcaaatatgctgccaagcatgggatccagctgctgagctttgacaatgagatggagctggcaaaggtggtaaagagccaccccagtgccaagatggttctgtgcattgctaccgatgactcccactccctgagctgcctgagcctaaagtttggagtgtcactgaaatcctgcagacacctgcttgaaaatgcgaagaagcaccatgtggaggtggtgggtgtgagttttcacattggcagtggctgtcctgaccctcaggcctatgctcagtccatcgcagacgcccggctcgtgtttgaaatgggcaccgagctgggtcacaagatgcacgttctggaccttggtggtggcttccctggcacagaaggggccaaagtgagatttgaagagattgcttccgtgatcaactcagccttggacctgtacttcccagagggctgtggcgtggacatctttgctgagctggggcgctactacgtgacctcggccttcactgtggcagtcagcatcattgccaagaaggaggttctgctagaccagcctggcagggaggaggaaaatggttccacctccaagaccatcgtgtaccaccttgatgagggcgtgtatgggatcttcaactcagtcctgtttgacaacatctgccctacccccatcctgcagaagaaaccatccacggagcagcccctgtacagcagcagcctgtggggcccggcggttgatggctgtgattgcgtggctgagggcctgtggctgccgcaactacacgtaggggactggctggtctttgacaacatgggcgcctacactgtgggcatgggttcccccttttgggggacccaggcctgccacatcacctatgccatgtcccgggtggcctgggaagcgctgcgaaggcagctgatggctgcagaacaggaggatgacgtggagggtgtgtgcaagcctctgtcctgcggctgggagatcacagacaccctgtgcgtgggccctgtcttcaccccagcgagcatcatgtgagtgggcctcgttccccccggagaatcccagcggggcctcagagatgcatctgggagaggtggggaagatggcaggcaagggtacccttggccaggactctggtgcccaccctgccacccccgcgctccacctgcagtgtttctgccctgtaaataggaccagtcttacactcgctgtagttcaagtatgcaacataaatcctgttccttccagctgtgtctgcctcctctgcagtgcaaggggcctggtcagccaggtgtgggggtgttcttggggtctcctttggtctccttcccacctttgtaaatataatgcaaataaataaatatttaggtttttaaaaactg

SEQ ID NO: 542 - DNA, 2337 bp, Homo sapiens
ctaatggctcgaacgagtgctcattttgcaagactgaaagatttcatcaaattggaattcccacctggatttcctgtcaaaatagaaattcccttgtttcatgtcttaaatgcacggattacatttggaaatgttaatggctgtagcactgccgaagaatctgtatctcaaaatgtggaagggacccaggctgattcaggaactttcaggaccagcttcgaatggagggatcagccagacaaacacctatgacgcccagtatgagagggccatccaggagagcctcctcaccagcacagaaggcctgtgccccagcgccctgagcgagacaagccgttttgataatgacttgcagctagccatggagctctctgccaaagagctggaggaatgggagctccggctccaggaggaagaggctgagctccagcaagtcttacagctgtcactcactgacaaatagacctttcagcctgtgagcctctgcacaaagcagaggctgtgggctgtcacagatgctgtgtcaaccagggccctagggctaagggcctgcaccttgcgtgcatgcagcaggcaacaactgccccttctttatgcagaggtgcagaaccagggactcctgggcccatccaggctgctccctggggtggagaagggaccagggattgcaggccccatctccaggctaaggggaggagagcatcatcactttccattagctgtattggcttgcaggtcacatttttactaccagctttagacaaaaccccaatccccgcaggtttgtagataaatttttatcaaggagtgataacaagacaagttattgcagagtcagggtgcttttatatataagagcagcagccgcctttgtaaagtgtgatctatgagaattggagacacttctttactgttcaccaaagaaatgggtaatctgtgctgatctccttatttttacctttttacagggtttctaggacattgtcattattcttcctccatctatctgattccattccttccacacccagctaaagttagaggagatacatatagaatctattttagattattgttaactatttgcatcaaattaagatacacaaatggccatggatgttgccttagccttaaacattactaatagtttcacatcacctcactgcacgcatcgaaggatctgatttgaatttgtaaaggcaattcttttgagagcaggattctccaggctaaatcaaaggcagctaatcctgtccctgaaggagcagctaggggaacctgaggcttgttcttgaagtgggcaagctggccaaaatattggaacacacagaaccaaaccaggtgtgttctacacctgcatgagtgaaggatttccacgtagacacctaggaagagcccgcatgccctagactcactccagaggaaggattgatttgcaaccagaaagggagctgaaaaccacggagctccatggctcttcattcaaaagggaaaataatgattccacgttgctttttagagttcaaatcaacatctttctggataaatctattttttaacaatctttttattatttgtaaaagatataaaaacaactcccatcagtagcaatacaaggttatacattttaaccagattttctcaggccctttttggatacctttagtagttaactctcttttgtcaaaccctcttgtatataaccatcgcacaacatacagaaccctggggaatacagccaagggcactgctcactgtggcccgtgtattcattcccacaggctgcactgaaataacctggtaaacaacaccctcctccattttgcgtctatttcttctattgtgcttctttggggataggaagagaaacataactactgttccaggtaacgtctgtatcatacagttagtgttgccagtgaaacgttcccagatacaaagaattgtgcttttaattccatttcacaatctgttttgttttttttttttgtcattgtctgaccaaaattccttctgcacatgaggccagtataggcaacgtcacatttgtttgtttcaaatatgcagtgtggtattttgtttactttgcatttaccgtgagcaaagatacttcttggaatggctgcagtgaggccgtgtcattggctcacaaaagtgactcataggtaatttctgtgtttgcattccactgctctgctccctaaggtccttgactttctccccaggaattcacttaaaaagggactgagcattgtgtcaacctgttgcagtgtttttcatatatgtgttcactctaaaaatgcaaataaagactgcttccttagagggtgctcatac

SEQ ID NO: 543 - DNA, 2522 bp, Homo sapiens
tattttaaggcaatgttcacagctgacatgaaagaaaaatttaaaaataaaataaaactctctggcatccaccatgatattctggaaggccttgtaaattatgcatacacttcccaaattgaaataactaaaagaaatgttcaaagcctgcttgaggcagcggatctgctacagttcctttcagtaaagaaggcttgtgagcggtttttggtaaggcacttggatattgataattgtattggaatgcactcctttgcagaatttcatgtgtgtccagaactagagaaggaatctcgaagaattctatgttcaaagtttaaggaagtgtggcaacaagaagaatttctggaaatcagccttgaaaagtttctctttatcttgtccagaaagaatctcagtgtttggaaagaagaagctatcatagagccagttattaagtggactgctcatgatgtagaaaatcgaattgaatgcctctataatctactgagctatatcaacattgatatagatccagtgtacttaaaaacagccttaggccttcaaagaagctgcctgctcaccgaaaataagatccgctccctaatatacaatgccttgaatcccatgcataaagagatttcccagaggtccacagccacaatgtatataattggaggctattactggcatcctttatcagaggttcacatatgggatcctttgacaaatgtttggattcagggagcagaaataccagattataccagggagagctatggtgttacatgtttaggacccaacatttatgtaactgggggctacaggacggataacatagaagctcttgacacagtgtggatctataacagtgaaagtgatgaatggacagaaggtttgccaatgctcaatgccaggtattaccactgtgcagtcaccttgggtggctgtgtctatgctttaggtggttacagaaaaggggctccagcagaagaggctgagttctatgatcctttaaaagagaaatggattcctattgcaaacatgattaaaggtgtgggaaatgctactgcctgtgtcttacatgatgttatctacgtcattggtggccactgtggctacagaggaagctgcacctatgacaaagttcagagctacaattccgatatcaacgaatggagcctcatcacctccagtccacatccagaatatggattgtgctcagttccgtttgaaaataagctctatctagtcggtggacaaactacaatcacagaatgctatgaccctgaacaaaatgaatggagagagatagctcccatgatggaaaggaggatggagtgcggtgccgtcatcatgaatggatgtatttatgtcactggaggatactcctactcaaagggaacgtatcttcagagcattgagaaatatgatccagatcttaataagtgggaaatagtgggtaatcttcccagtgccatgcggtctcatgggtgtgtttgtgtgtataatgtctaattgaatctgcagaaatgaccaagcaatcacttttttggagtatagttttataaaaaaagaatgcagggtttgaagttccttacctgataattgtgtctggcacatgataggggatcagtaaattgtaattcctaaccctactgtactcccaaacatggtgattcatggtcaagaaaaatcttatatgtatatatacacacacatatatatgtgttcatatgtatgtatgcatatatgtgtatatatacgcatgtatgtatacatatatgtgtatatatacgcatgtatgtatacatatatgtgtatatatacgtatgtatgtatacatatgtgtatgtatacgtatgtatgtatacatatatgtgtatatatacgtatgtatgtatacatatatgtgtatatatgcgcatgtatgtatacatatatgtgtatgtatacgtatgtatgtatacatatatgtgtatatatacgtatgtatgtatgcatatatgtgtatatatgcgtgtgtatgtatgcatatatgtgtatatatacgtgtgtatgtatacatatatgtgtatatatgcgtgtgtatgtatacatatatgtgtatatatacgtgtgtatgtatacatatatgtgtatatatgcgtgtgtatgtatacatatatgtgtatatatacgtgtgtatatatatacacatatatacgtatgtgtgtatatatatatacacagttgaatcagtgggattaatacctataatctctggttttcaaaggtaatatggaatatttgacacttggtaaaaggtgaactacctttgtagtgaatcttttcctcttggtagcatcaacactggggataaatcagaaccattctgtggaatgaaatgtttctcaagagcctataatatagtagatagtgcatattaagatgtctggctgggcatggtggctcatgcctgtaatcccagcactttgggaggctgaggcgggaggatcacttgagcctagaagttggagactaacctggcgagaccctgtctc

SEQ ID NO: 544 - DNA, 2745 bp, Homo sapiens
aattgtctgctggacattcctccctgagacatctcacagaggctgtggacaggagcaccgagagccacttcctggagcatgctccccacccccgcagcctgtggcttcagcctctgcttctgcagacagcggtggaggaagtcaggactgtcccttctgacctgaacacctacctccaagtcctccctgtcgccacagagacccggcaatgcaagtgagtcctgtttgacctcgtcaatcatcgcagactgtaaaggtgactcggatgctcaagaaacgagcatacccagcagtgggccccagacttctcgcaggcccaggtcctcctgggtgcacagagacctaccagacaacggtccggctgcactggtgttgtgagatgcctgtgtcagaagacactgagttcctcactcgcctcctatcatgccgatgatcacaggagaaagagcagggcacatgcatgccagcatgctgaagggaggccaaaacccatgcttgaaaaccacaggtcctgttctaggagcaggagatatatttagccaagcaggatgtttgtgggtaaaccaacattttgctgtaaataaaattctgcaaactcgggactttgagaattgcagaagcttactttgcctgcgtattggcaagagagctattttcctaacacaagctcaccatgaccctcattcagagatgcgcttgacgccgagggtggtgccttttcgctaaggggtgctgtcaggggattgagtaggagcctgaagagctaggagtatcttctccctgggcagaccagcaggcagaccctgtcccttcacactacagtggcacgtgatgggccccactgcccacctggttctggtgtccaggctgaagtcctcgtgtgacactccaaactgttctggcaaggaaggctcacgggttctgacctacactctgaaactgaccagtagtgataaactccgcatggacttcagccatcattgcgtacgtaagaaatacgtgttgcacacagagtgcttctctacattcccaggtttgccactccccgacttttgctgaagcaggtttctactccatcagtcccacagatgtgttcacagggccagcactgagtgtggtgctggggaaggcatgtgcttggaggcagccctgtgagatggcacagcctaggggaggagtcgtggtggggaagaccctggccacgcatgatagaggaagcgtggccacacagtctttgctgtccctgccacagcatggtgctgtaagtctcctccttccgagtctgtgcagacttatgtgacacatttgacccaacagaaatgcagcatttgtggtgtgtgaaagttccagaccaggccacagcgagctccgtggcttcggctgtgtctcctggagcacttgctctcaggaccccctctctcagagcccaggcaccacgccgtgagagagccccagccacagagacaggctacgtgtaggtgctttcatcaaagtgccacctgtgcctccccgcagcagtgtcaggccaccagcttgaacaggcagctccagcctccagtggaggcttcagaggacagcatcaaacagcatccacaaaggagacccaccttgtgaaaagcgcctagccaagccctgcccaaatccctggcctgtgcaattgtgagcaaagcaattcaatttggagtggttttatgctgcagtaggtgaccaaagcactatggaagtgaatatcaggagcccctcactgggatgtcagaagacattcaaggaaggtttcctggaagatttagtacctcaggtggtacaggagaaggcgagatggagagaaagcaaccccagtctgaagacgcagtggtaagaaagggtcattcccctgggcatgtgtggtctgctgggggatgacagccgaggtgaacttgaagcagaggacactcagacaagctgcactctgaatcccgctacactgaccgcagcacttgctgaagaagccgcctcgccacgcccaagccctgcagagggaaggactgaggaaggcagctcagaggcctcaggcagccacagtgtgcatgcttgtctatgactcacagctacgacgtggcctgtgctgctgcagctgctgataagcctcaaacctcatataccactctcttccgaggattttttaaatacacaaaactgggagtgagaggggtatttaattcccctactaacacatgttgggcgcagctggagcagccaggcccactgtagctgggaagatgcggtgccttgaggtgcaggcactgctcactgccacatgtgagcacaggttctgagggtgaaaggtccctggtatctggccagagtgttagactctggaacataagaagcccccgaggtggtggagaaggtctagccaggctccagactggcttcacagaggtaatgctttttggtttgaaatccgtaagagcgcactacaacttcagggcaagctccaacagtgcttctcaaactttaatgagcacccaaatcatcagggggcgcgggggcagtgggtcgcttactaaaatgaagattctgcatcaggaggtctggggcggtgacacgattctgtgtttctaacacgttcctgggtgaggctgaagccactagtccatgaagcacactttgagtagcaagaatgtggaggaactgtcccaggatgggccatgatttacctgaattctcacagtggcttagacaatggagaccttgtccacaact

SEQ ID NO: 545 - DNA, 3266 bp, Homo sapiens
ggtgcttgcttggctcgcgggcagaggagccgccgctcgctggacgccggaccgggcaggacggcgcggggagccggcggccagaatgttcctggagccccaggaaactatgccccagacgtccgttgtcttctccagcatccttgggcccagctgtagcggacaggtgcagcctggcatgggggagcgtggaggcggggccggtggcggctccggggacctcatcttccaagatggacacctcatctctgggtccctggaggccctgatggagcaccttgttcccacggtggactattaccccgataggacgtacatcttcacctttctcctgagctcccgggtctttatgccccctcatgacctgctggcccgcgtggggcagatctgcgtggagcagaagcagcagctggaagccgggcctgaaaaggccaagctgaagtctttctcagccaagatcgtgcagctcctgaaggagtggaccgaggccttcccctatgacttccaggatgagaaggccatggccgagctgaaagccatcacacaccgtgtcacccagtgtgatgaggagaatggcacagtgaagaaggccattgcccagatgacacagagcctgttgctgtccttggctgcccggagccagctccaggaactgcgagagaagctccggccaccggctgtagacaaggggcccatcctcaagaccaagccaccagccgcccagaaggacatcctgggcgtgtgctgcgaccccctggtgctggcccagcagctgactcacattgagctggacagggtcagcagcatttaccctgaggacttgatgcagatcgtcagccacatggactccttggacaaccacaggtgccgaggggacctgaccaagacctacagcctggaggcctatgacaactggttcaactgcctgagcatgctggtggccactgaggtgtgccgggtggtgaagaagaaacaccggacccgcatgttggagttcttcattgatgtggcccgggagtgcttcaacatcgggaacttcaactccatgatggccatcatctctggcatgaacctcagtcctgtggcaaggctgaagaaaacttggtccaaggtcaagacagccaagtttgatgtcttggagcatcacatggacccgtccagcaacttctgcaactaccgtacagccctgcagggggccacgcagaggtcccagatggccaacagcagccgtgaaaagatcgtcatccctgtgttcaacctcttcgttaaggacatctacttcctgcacaaaatccataccaaccacctgcccaacgggcacattaactttaagaaattctgggagatctccagacagatccatgagttcatgacatggacacaggtagagtgtcctttcgagaaggacaagaagattcagagttacctgctcacggcgcccatctacagcgaggaagctctcttcgtcgcctcctttgaaagtgagggtcccgagaaccacatggaaaaagacagctggaagaccctcaggaccacccttctgaacagagcctgaggcggatgcagcccgcgacgccagaggaagcacgtgcactaactgggtttaaattttgactgatgtgggttgagatgaggaggcctcactggttggggtccattttgtatataacttttatgagaaaaaaatggtaattatttcacgcatcaacctttggcacttacaaagttttttttgtttattttaaataacagggcagggccctgctttggggagggggaggggagagtatcatgggagatggtatccatgataacatcttattctaatgaaatgtagatttttattttctacttttgattattaacatcttatgaaaaaaatattttaaaaaacccagccaaaaccaacgtgagccctgcctgctcggacgcctttccagccagtgtctctgacgtcggggttagtgccttagagggtactggggtctggtcttcctgctctgtggtttgggctgcggtgagtcccactccacctgggcgcctgccctcaggagcctgggctgcgaggctccataggagggctggtggctgggaggtcgcgtccgcacacttctggaagtgagcctttgagtacgggctgtccaaagtttacattttcattttcctttcagggatttgtggggtcagggaggggcagggggcacctggcagcatattttctgtgacaatgtgtccagcaaatcattcttcaactacattttagaaaggaggaaatctaaaataaggtaagggagggaagcatggagttgtcagttttctgggctgtgactgaaagacacactgagctgtgatgaagaaaaatacatggccgactccagggtggtgacatttagagctagtcttgaaacctatcatctacagaggggagggcagccaacagccctcttcccacctgggtaggcagcgccctaattggaattggaaacagaaaattcgccaggccatactgctggagcccattcagataaaactgcccaatactgagaggtgttttctacacccagctagaggagcacactccattttcccatgtctgacttcgtggtgtgagccctgggccctactgaccatggcgcaggacagctgtccttcagaaagcacacggtcaatccacgtggaccgtctccctcgcaggaactccgcatccttgtccctctctgcattcccagtttccgcaggagccttgatcaatggggaagcctgggtgaggatgggccaggtcccaattcccaaagctcctggaagagcctgaagacattgggaaaggctgggcctggggaggaggcagccctgggcccgctgcccatgcctctggtcctgggtggagcaggaatagttccactgtattgtcacagtgtgtttgcactttctgaggttctagctagtacagattgtatattgatagtacatattgctttgtttatgtctttgagatgagaaaggcttaaaacttgagaatatatatttggaatacagccttagaacggtttctgtacacatccacgtgcacttcacgggtgatcagttctagtacctacttgaaacagtgtctgtctgctactttattttcccaatttgatacataccctgatttgatgttttggtatttgagatgaactctgagtatgaagctgtaccataatgcaggacgtcagttttggtgtgactggacatacttgcttcaataaaagaatacatcactcccc

SEQ ID NO: 546 - DNA, 1997 bp, Homo sapiens
ttgtgatatttctggttatcccgtaggtcacatcatgatacttgggaacagggtgatatattgtattcttatgtaaagtgccaaattttaatttgctagtattaatattatgtgtgtgagtttacataattcgtattcaaactaagaccaatcttttgtaaacttgcttactgaccttggtgggagatgagagatgaggtaggtgcccataaacctcttgactctttaattcttgaccaaaacctttctgttaatgctgaaggtaaacttgggagatgttttcatgagttactaaaactatacatgtggaaaattacacgcttctgtatttctaggcgactgataacgttcaatgaagcggacgaaagtgtgaactataagactggtcctaagccagttagatttttgggcccttccacaagtacccaaattaaagtcaagaactcggcctcagtcacggtgtctccagccagtgccatccagacgtcggctggggcgacagcaaaccggtttcaaagtggtagccgcagaaaggcagctcagcgctctgcaccttccagagccacggccctggtgggcacgggggcacctgggcatcctcaggcttcccctggggctgcgagcgctgaaaatggaggcacgcacttacctccagctaaggtgctactctccgacaagaagcctacaccccagcgggtgataaagctgaagaggactccgctgtgcgccaccgcgccttgcctgccctcccccacggccacgaggcaggccaactccctcaagccgcttcccggcgaagctgcccgtgccttgggagtgcggactgagaacgggaagaacaagggaaattgatgaaagtggtggacttgaaatttcccgttcatctcccaaagctttcaacccattcgacgcaaagaagtgacactttcttaatgcagcagaggggaagcttaggtttatgttgaggattctgttcctggaattgtgtgagctaggaatggaggaggggagactttcaatggttaaggctccatttctcattttcccaacttttatatgattgtctatgggcagtttgaatttctggttttcaatttattttttaatgattaattcgtattaaggcaacaagacagtacaacaaataatctctagagaggtccactttgttgctgaagtaaacgttacttgttgcaacccgaggatgggcatgaggtttggccttaggtattcctgtctgggaaaatggagggggtgatattagtggttccctgtactatatcacagccaagagagattagagagagaaaatgtagatcaaggcgagctgcctacaaattactctgtctccaaaggcaacgtgaaaagaaatgatggggaggaaaaaaccccatagattgaattagcactttgactctcacttaattcaacgattttctttcctagattggcttttcttactcttttctgttagtagatttatttataaacaccacaagaagatctcttgggatcagaattatataatatctttgaagtaaattattaaaatatcctatttaatttgaatagtgaagttttgaaaatactttgaaaaagagaagtaaaagtttaactttttaactaaagttagtatttgtttttcagaaatgaccactgaagattcattctgattatacaatatgatttttatgcataaaatttccatgtaacttgaatttaatatttttaaacagaatattttgactaatcctctattttttcatgactattcagttgtgtgtgtttattcgtaaatgttatgttttgtaattggatcacatatttctactttcagtgagagtatgccttcactatgttaaaaaataagctcataaaacagggtactttttattcaaatgcttatcattgtactttcattgctttgaaagagtaaagtaagtatactcaaaacattacgttttacaaaatcaaataaaacttttccataaaaagtg

SEQ ID NO: 547 - DNA, 2864 bp, Homo sapiens
gtggatgcagcatcctagtggaggacgcccctgtggctggagtgcgatggcgcgatatcggctcgccgcaacttctgcctcctgggttcaagtgaatctcctgccccagcctcctgagcagctgggatgacagatggagtctcactctgttgcccaggctggagtacagtggcgtgatctcggctcactgcaagctctgcctcccggacagcgtctcagtctaacatccaggctggagtgcactggcatgatctcagctcactgcaacctccgcctcccatattcaagcagtccccccacctcagcctcctgagtagctgggactgcatatgtgcactgccacgccccgctaattattgtattgtttatagagacaggctgggcaactgctgggctcgaacagtcctcctgcctcagcctcctagggtgttaggattacaggcgtgagccactgtgcttggccccttgtaatatctctgtcaggttttcggtttgggttttgctggcctcattaagacagactggatagcgtctgctcttcctctgttcactaaatagcttctaagatcagtactgtgcttccgtaggctttggtggagtttaccagggaatccagctgggtgtggtattttctgtgtgggaagggttccagttacattttcaattgccttatcagatggaaggcttccctttcttttgtcagtttcatgatactgtgtttttcatcgagtttgtctgtttcatctcagttgctgaacctgtttgcatgagttgctcctgacggccctttaggatacttccatgtctgtagggtctagagtgacatctcctcccctcccctgacgagatctgccctccttggcactgtgcttccccagaggggtggcctcgctgttcccatggacatggcccaggagccagtgaccttcagggacgtggccatctacttctcaagggaggagtgggcgtgtctggaacccagccagagggccctctaccgggacgtgatgctggacaacttcagcagtgtggctgctctgggattttgcagccccagaccagacctcgtctctcgcctggaacagtgggaggagccgtgggttgaagaccgggagagacctgagttccaggcagtgcagaggggaccccggccaggggcaaggaagtctgcagaccccaagagacattgtgatcatccagcttgggctcacaagaaaacccacgtgcggcgagaaagagccagggaaggaagcagctttaggaagggcttcaggctggacacggatgacgggcagcttcccagagctgctccagaaaggacagacgccaagcccacggctttcccgtgtcaggtgctcacgcagcgttgtgggcggcggccgggccgcagagagcgccggaagcagcgcgcagtagagctgtcgttcatctgcggcacgtgcgggaaggcgctcagctgccacagccggctgctcgctcaccagacggtgcacacgggaaccaaggccttcgagtgccccgagtgcggccagaccttccggtgggcttcaaacctgcagcgccaccagaagaaccacacgcgcgagaagcccttctgctgcgaggcctgcgggcaggcttcagcctgaaggaccgcctggctcagcaccgcaaggtccacaccgagcacaggccctactcgtgtggcgactgtgggaaagccttcaagcagaagtccaaccttctcagacaccagctggtgcacaccggggagcggccgttctactgcgcggactgcggcaaagccttccggaccaaggagaacctcagccaccaccagagggtccacagcggggagaagccctacacctgtgccgagtgcggcaagtccttccggtggcccaagggcttcagcatccaccggaggctgcacctgacgaagaggttctacgagtgcggccactgtgggaaaggcttccgtcacctggggttcttcacgcggcatcagaggactcacaggcacggggaggtgtaggggcgcccgaagcgtggggtgctgcgcctctgcgggagtactgggtcctgagggagagctgcagtgagaagttgctcttcagcctggaaaatcaacctgaattcagagaagccttcttagtcctcagagctccccagtcccccgagaagtttactgggaaaactgccaggtgggagaagcagagccatgggtacgccggagatggcgggggctctggagatggcgggggctgcgccccggcgccgggcatcctggggatgtgctgagagtgtgcgcgaccccggagccacgtgccaggccgggctcagaggcggagaagcctgcctggtgcccacagccgtctggctcagggactccaccctggccccgagtcgccgtctgctgggcctttccttcctggctctgcaccccatgctggctgcccggtctggcttcccttcttgtctctgtcttgggcgaggcagctgtgagcattgcacagaggcaaagaccctcctgcagcctctgcgctgggccgtagaaacaagagcctttgtaatactgaacctcattcaaggattaggagtggtggttaggtcagggccacccccagtgctgcaggaacggcctccacccagctctgttggtcagagcctgggtcatgcacctggagttgggagatcaagctgggtctcagggcagtgaggtggccatatccaccacatcgcatttcgtgggggaagaggtgacctctttgttttaaacttaaggtgtctgcttatccagccagaaataaaaatctgccagtggtgttcccaagggaagacccccgtgggaatggatcgggacactgccgtgtttcaggttagcc

SEQ ID NO: 548 - DNA, 2495 bp, Homo sapiens
ctcaaaggccaaagcattccttccaaaactgagatctggccatgtcatgcccctgcctaaaatccctctgtggttcccctaaggaccttcccagcctgcctttgtgtgcctccccagaggctcctggactccagctatgctgagggccttgcaggtctctgattcaccctgctggctcttgcttcctggccctgcacatgtgtgcctttgcccaagtgctcttcctccccttcttcacctggagaaccctggtgattgtcctcagactcagattaggtcacctcttctgctggcctccatcactgccccctcagccctgagcctgggctactgtgctccctgcttcccactcccggggcacttccttctagtgtcttttttccttgcctgccttaccctacactgggcacttctggagggcaggagctgggggtctcctggcaccaagaatctgtaaatgtatgttgaataaataacaagttgttccaagtggggcttggggagtctgaacccggacccacctccgtccctatccccaggctcctggctggtgccccccgggagctcgctgtgcccgatggctacaccaaccggactggtgctgtgtacctgtgcccactcactgcccacaaggatgactgtgagcggatgaacatcacagtgaaaagtgaggggaaggggctggggaggggtgctgggtcagaggtctggcaggggggtaccgcagagagaatggcctggaggagatagaaggcttgttcacacggcttctagtcgcttcttgtccagctgggaagagggtgccctagaggagagtggggctggatgggattggtagagctcagaataatgacgagctggagaaggggagttgggagggctgccctgtgggtggagggcccaagcgggacccactcctgccctctggagactttgggcactgaagtatgggtgaggtgctctgattcatgatccttccggtgcccacagatgaccctggccatcacattattgaggacatgtggcttggagtgactgtggccagccagggccctgcaggcagagttctggtaagtgggtgctcagtgttggctcctccacctctacccggctctcccctcatctccagagctgggaggaaagaagagggcagcaggggggtccacggcgcgtgtgtgctggggcctgcacacatgtcccttcctgtggctgtgtgtccctcgctctctgcactcctggggagggggtgagtatcctgtgctctcccaaacccccgcacggcctgagttctctgactcatccacttcctccgcatgcctacactgggtgctcagccttcgtgggaacaagccgagggagccgagggaactgcaaggaggagaaagggcagagagggccccaggcagctcagcgctggctggcgctccttcctgggaggctgactgccggaagaggcccagccctgctgaccccggctcacccagctctggtctgggggctaatcaaatgtgtcacctcctgcccacattctatagtggcagcccctgagttctccatttctgggtcccagatagacatttccccccgcatttttttctctctctgtctcttgttgttgttgttatattccaaaaaggattttgattttattgcttcacacacagaagagttctggttaaggcttgccttgctcctggtgctcatatgatgccaccaggatgtgatttatctcaagcacttaactctgtgttcttcgtgttgcctccattctttgataggcattcttttcgtagtgccaagatgaatgcaacagcttcagctttatcttctttgaccttcaagttctatagtcccagtagatatctgactacaactcattagctctgactatttcaggtactcctctctgaaacaattactgtgaccaagagaatgcaatacttatactttcttcagacatgaattatcagtatccagataggcacataaactcagtcttagaatgtgttgctttgatgtcaggtttttctcttgccttgatagttccacatggctggggaagcctcacaatcacggtggaaggcaaggaggagcaagtcccatcttacgctgatggcagcaggcaaagagagaatgaggctgtctctctctctctctctctctcttttcttttctttctcttctttcttctttctttcaagatagaagactcccagctgggtgtggtggttcacgcctgtaatcccagcactttgggaggccgaggccggtggatcatgaggtcagaagttcgagaccagcctggccaatatggtgaaaccctgtctctactaaaaatataaaaaataagccgggtgcagtggtgcccgtctgttgtcccagttacttgggaggctgaggcaggagaatcgcttgaacctgggaggtggaggttgcagtgagccaagatcacaccactgcattccagcctgggtgacagagcgagactccacctc

SEQ ID NO: 549 - DNA, 1980 bp, Homo sapiens
ttgataattccacttgtatgaaatgtttcctctataatcttacatatcttcttttgtgtattctaaaacattattctgagaaggggaccatcggcctcaatagactgccagaggggcctgtagcacaaaaacaggcctctgccctggcagaggcagcaagattatttaacagcctgttaattcagacaagcaataatgagaatgtgactcaggcagtgtccacaggggatagattccagagatcctttaaacttcactcacagaatctgcttttatcagcaatacagccagatgatagcattgctactacccatttatgctcacttaattttggcagaaggaaatacttctttggaagagtagtttaggaatgttttctttttaaagttagcatgaaatagggagaaatgttcaagacagacaggatgccatcttgttgtttagctggcataatggatattagctggacatttttccacaattaatagcttcccccgcagaaaaaacaataagcttttaccaccttagatcgtgtgacagaaagcctcttaaagtagaggaacagaatcagacactcaataggaagaagagccttagtgatttgccctgagggattggaagcagcacaggaattgctagtggcaggttgaggatgcctcaataatagtctcaagctccaatcccatggatccacaggcccttgcagagttatctttcattgctttgtacatgacactgtgagcctgcagtaaagcagcagcagcccagttcatcacttgagttccattgatccagccactccaatgggctgtggctgtctccagtctaatctccagaggattatgggtttgtagtctcctatgaccttacacttggatttccagcagtcagtggcctcttgtttcattttactagaatgtgagctctgggtgagagagtgagactccatctcgaaaaaaaaaatattaaaaaaaataaaactgcatatgtaaatatgtaagacattattattacaggatttaatgaaaactcatattcatcctccccatacgtttcttttttttctttttccttttttttgagacagagtttcgctcttgttgcccaggctggagtgtagtggcacaatctcagctcactgcaacctccacttcctgggttcaagtgattctcctgcctcagcctcctgagtagctggaattacaggcgcatgtcaccacacccggctaatttttgtatttttagtagagacaaagtttcaccaccttagccaggctggtcttgaactcctgacctcaggtaatccacccgccttggctgcccagggtgctgggattacaggcatgagccactgcacccaactcctctttcgtctttctttaacacacactaggctctttgtgtattatgattcagtgctatttgtaactgtgtcccagtgaccaaattgcactcgactcgatcagctgttcatccatttcgtgttttttcctgtcaaacattaatccagcaaatatatgaggtatttaccaatttattttcttagtattacaaaataattcattagcataaagtacaatagtgaaatatttgagttgttcggaacctcaattaatcctgttttacatttcagacctaaagctggcaatcaggagaagaagcactttgttttaaatgtggagaagataacacttgattccatttcattgtcattagtgtattaaccagcaggagaggtgatgagccatttttcaaatgaaataccttttatttccatataatttttttattttagagttcaatagctgtttctatgattatcctcaatttccatatgttactgaatctgaaaaacatctttaaaattcaaacagttccattttctctcttgtaagtgttaaatgtgataaaagtacatattttaaattgttttcagctcttggatatagcagcaataaaaacactaatttgtgggtattt

SEQ ID NO: 550 - DNA, 2646 bp, Homo sapiens
cagagaattcatgctggagaggcatcctgtgaatgtcaagagattagaaattccttcttccagagtgcccacctaattgtgcccgagaaaatccgtagtggggataaatcctatgcatgtaacaaatgtgaaaaatccttcagatacagctctgaccttatcaggcatgagaagactcatactgcagagaagtgctttgactgtcaagaatgtgggcaagccttcaaatattcctcgaatctccggcgacacatgagaacccataccggagagaagccatttgaatgtagtcagtgtgggaaaaccttcacgaggaactttaacctgattttgcaccagagaaaccacacaggagagaagccctacgagtgtaaagattgtgggaaagccttcaatcagccatcatccctcaggagccacgtgagaactcacactggagagaagccctttgaatgcagccagtgtgggaaagccttcagggaacactcttcactgaagacacatctgcgaacccataccagagagaaaccatatgaatgcaaccagtgtggcaagcccttccggacgagcactcatctgaacgtgcacaagaggatacacacaggggagaaactgtatgagtgcgcgacttgcggtcaggtcttgagtcgtctttcaaccctgaagagtcacatgcgaactcacactggagagaagccctatgtgtgccaggaatgtgggcgagccttcagtgagccctcatccctcaggaaacatgcaaggactcacagtggcaagaagccctatgcatgccaggaatgcgggcgagcctttggtcagtcttcacatcttattgtacatgtgagaacacacagtgccgggagaccctatcaatgtaatcagtgtgagaaagccttcaggcacagctcctcactcactgtacacaaaagaacccatgtgggaagagagaccattaggaatggcagcctgcctttatccatgtctcatccatactgtgggccccttgctaattaacttccattttgtaaaaatataaacacatggggctatgactttccctcgtaatactcctttagctgcatcctgtgtttcaatgtataatattttcattttggtttaattgtaagtattgtcttaacctccattatcgtttattctttgacccatctattatttggaattagatttttcaaaactaatatgtggatatattttcatagaggtataatgacttatagtgaaatgcatacatctgaagtgtacagttggatgagtttgacagatgcatacatgcatgtaaccaccaccccattccagatatagaatgtttctatctctctggaaggttcctgcatgttatatggctatttcttagttgcctttttgttgttggtttctaatttaattacatggtgagaagagtatgtggcctctttgttactgagtcataggtatttgctgagatttgctattaggtctggtgtggcttattcttctagctgccaacccaaattaccccttcctccttagaaaagaacctgggttttctgttcagattggcagtgtgcactattaaaaagcttccatctcccggctgggcacggtggctcatgcctctaatcccagcactttgggaggctgaggctgggggatcacctgaggtcaggagttcgagatcagcctggccaacatggtgaaatcccctctctactaaaaatataaaaattagccaagtttggtggcatgcacctgtaatcccagctacttgggaggctgaggcaggagaattgtttgaacccaggaggcagaggttgcagtgagccgagattgcgccactgcactccagcctgggcaacagagtgaaactctgtctcaaaaataataataataaaaaaaagcttccatctcccagcccttcttgcaagcaagggcaggccatttcctccggtcctggctagtatgaatatgagaagtcactggatgtgactctggggaagatattgtgttcagggatggtttcatgtagccacatctctccacttcttgccttttggacaagtagacatgatttctagacctagaggagccctcctgtgaccataagggtaaaagccgcaagctaagaagagggtggccggaagtcataaccatcttgcttctgtaatctaaaaaatatttaggatagatttaatagaattggcatatttatgtgattgcagcagccctggactatttatttctggatgtcccatacatgaaaaatatgcacttcttactggtatagttttcttttgtttgtttttgtttttggtgggaggtttatttcacctgaatataattcctaactgatgcacttagtatatgtcagtttttataaatgcttcatggatggttgaaatcaatgtattgtattctacaaatgtctgctagatcaagcaaatgtgtttaaaaaccatctacacatttataaatgttgatctgtgatctagcatttattgagagaggtatgttaaactctcccaccatgattatgtattgctgaaaaatctttgtcattctgtcagtttttaaatttatgtatatacatacatatatatgttttgaagcaatgaaattaaatatagatactgaattttttacatttcc

SEQ ID NO: 551 - DNA, 1906 bp, Homo sapiens
ctcttcctccatcagcctggctggcagcagccttggactccgcccgtggagccctgggcctgttgacccaccagcttaggagcacccaccaagctctgggtcaacgtggaggtaccaggccaccatgctcagtctcaagctgccccaacttcttcaagtccaccaggtcccccgggtgttctgggaagatggcatcatgtctggctaccgccgccccaccagctcggctttggactgtgtcctcagctccttccagatgaccaacgagacggtcaacatctggactcacttcctgcccacctggtgaggggaggctccgccccaggccactggccgctgctggtcttcctgctgcccgcctgcctctaccccttcgcgtcgtgctgcgcgcacaccttcagctccatgtcgccccgcatgcgccacatctgctacttcctcgactacggcgcgctcagcctctacagtctgggctgcgccttcccctatgccgcctactccatgccggcctcctggctgcacggccacctgcaccagttctttgtgcctgccgccgcactcaactccttcctgtgcaccggcctctcctgctactcccgtttcctggagctggaaagccctgggctcagtaaggtcctccgcacaggagccttcgcctatccattcctgttcgacaacctcccactcttttatcggctcgggctgtgctggggcaggggccacggctgtgggcaggaggccctgagcaccagccatggctaccatctcttctgcgcgctgctcactggcttcctcttcgcctcccacctgcctgaaaggctggcaccaggacgctttgattacatcggtgagggcacgcctggcccggcccgggaagaggcaggggcagatgccttcccagagcacagaatgaactgggccacagccaccagttattccacatctgtgcagtgctgggcacccacttccagctggaggcagtgctggctgatatgggatcacgcagagcctggctggccacacaggaacctgccctgggcctggcaggcacagtggccacactggtcttggctgcagctgggaacctactcattattgctgctttcacagccaccctgcttcgggcccccagtacatgccctctgctgcagggtggcccactggaggggggtacccaggccaaacaacagtgaggccccatccctgaccctgtcctggagggggcagaggccaggccccagtgctgacgaggagcccagatttgggcctaatcaggtggggacgcatctcagcctggaaccaacaggggctgaggagagagggcacaggagagagggcagagaagaggaggggtgtctagggggactggcagagtgtgagagggaccgtgagggggctcttgatgggagtggaagaagtgctgagggtctgagaggggagatgcatgcgtgtccaggctgaagatgcccctatattctgtcaaaggttggcggggggaggtgttggggtcctttcatctggctccgtttctggtgcttctggaagtctctgctcagcacagggaagaactaacacgactaacctaggcctaccctgaatgcttcttgctaaccaggccgagaggccacacacttgcccccccatccccacaaaccaggtaatgccagtttgccagcagctatttgcctatagagatgagtctgtcctggtcataactgtgtgctcagggtgtccaggcttttgggggtgggcctatctgggtgcattatggatggtttggtggattgaggtgtggggaggagggtcctaggctagagggggtatccctagttagactttgggaagccaccttcaacgttttctggaacaaggcaggtacaaataaaaaaataaaactttggaaagc

SEQ ID NO: 552 - DNA, 2264 bp, Homo sapiens
tttaaatgacaaagttttcaaagaactttttttcttcaggacttgagagaaagagaagaggcagaaatgaaacggattgattttcttgccttgccttccctgtccttgcataaggaagacagtaggaaaactatggaaggtgttctggcctagctttgtcctgcttggcccctggtgtcctgaagtggttattcttgaagcaagatgtgactgttgactccctgtcaccaaaccctttataatacatgtagtgccaacgtgactaagaaatctaggcccagaataaaaatcaaaaaagctccacttgaaatgtctcaaagcagaaataatgagcctttgtattagtaagaattatagcagcactaaaaatctacccctaactgaggtcctgccggaatttgggagaaagcacagttgtaccagttcttgctcacatgaagaaggtatctggaggtacttagaacagagagcaagaggaagtgctcttgttatataagttctttggagtggaaatgctgccctagacatataatgttttagagactacagggtctctgtagaagatctagttcatcgttctcatttcacagagaaatgaagagaacttcccatggttgaacagaattagcaacagatcagagttgagaatctgggtctcctgtccccttgaaagaattgtttcctaattaatgtgtagaggtttcttggctccaaaactataagtatgtttttgactgttttcctgtcttcacagataacatttgacaacaaggcccatagaggaagaattaaaataagtttagataatgacatttccatcagagaatgtaaagactggcatgtatctggatcaattcagaagaacactcattacatgatgatctttgatgcctttgtcattctgacttgcttggtttcattaatcctctgcattagatctgtgattagaggacttcagcttcagcaggagtttgtcaattttttcctcctccattataagaaggaagtttctgtttctgatcaaatggaatttgtcaatggatggtacattatgattattattagtgacatattgacaatcattggatcaattctaaaaatggaaatccaagctaaggtaatttttttcctaatcatgctattgttagtgtcagatttgcactaatggtaatgtatttttccagaatgtaagaattttcagaatgaattgtttcttccaaactgtatatcaagtagacttgaaattggtaatggtaattttcttaaatctagtcaggaggtctcttaggcagagtttttcaaagtgtgatccacaaaccattgcatcagaatcattgggtgcctggtaaagtgtaccatgttagacctactgaattcagactcttcggcggggcctgtgaattcttacacacaccaaaattcatacacaaccaaggtaactaaggtaagagtttttttttttttttaatcttacaagaaatgctcgaatctttaacaaaaatgagtggggctataggggaaagtgaggccaaggcactatggtgtgcatgcttgcatttgtttcctccgtccattcaaagtgagaatgctcccattttcttactttaccattgatgtgctacaagcttatttattttaagactaacctagcctaaaaatcaactgtccccacaaaataaaaatcacattaaaaaaactaatagtgttcagactaatcttgctcaaacttatgtttccctagtcttgatgcaactgattgagtcacctggggagttggttataaacctgggcagagaccccaaatgcaatggctcagagaagataggagcttatttctgtcttatgcaatagtcagaatgggttttacagactggtgagtagctcaacatctcacagtcattcaggcacccatgttcctcccattttgtttctctgccaccccttaaggacttgccctgactgcatgattattgccgtgttgcctcaaacaggttgcagcttatgggaagcaaaaacacggtatggtagaagctctcccatagactgatggcttggctcaagagtggccgactttatttctgtacatatcccactggatagaatttagtcaatcctaactgcagagggagccagggaacacagcccaggcatgtgcctaggaaggggagaatgggtttaggttgacacttagcagctgccactatatgtggctatagtatgtatcattggaatagatgtttaactttagggacaaataaaaaacc

SEQ ID NO: 553 - DNA, 2380 bp, Homo sapiens
ccatcaggaccagagacccctccagcgggagtgccacctgctgcttcctcccaggtgtgggctgcaggaccagctgcccaggaatggctttctcgggacctcctgcaccggccttccgacgcactggccaaagcacgtctatggctgcatcctctgcccatggtttcctccaaagagtctggtccccaagaagtatcggtagacccagctgggcctgaggcccttctctttcaccaccattcttccaaagagagccccactctgatccccaaccatgttacctcctcaaattcagaatatttcccatagaaagctgggcccccaagagctcccacctgagggcagcccccctcatctgtcggcctggatcacggcagcctcccagggccttgagacacagccaaaggaggcagcagagggtggggggtcagcagctatgcacacaaatggagggagggaaactgaggcacaccagaggactggagacccagaggtcacagtttcctccagctcttctttttttttttttttgagatggggtcttgctttgtcatccaggctggagtccagtggcacgatcttggcttactgcagcctccacctcccagattcaggcgatccttctgcctcagcttcccgagtagctgggattacaggcccacgccaccacacctggttaattttgtatttttagtagagatggggtttcaccatgttggccaggccagtctggaactcctggcctcaagtgatccacccgccttggcctcctattgtgttgggattacagtcgtgagccaccgcacccggtccctcgaacccatctttgggttgagattctcagggcagccggagcccatgtgttcttgtttctaatgctttttctctctccacttctctcttggtgaagaaggggcttggaccattcctgcaaacagccaaaccggcgagaagaggccagacatctgcctccattctccccagagtggtgcaagctcagcgaggtccccagcctcccccaggggaagcagggatccctggacaccccacacctccagccacgctcccctcggagcctgtagagggtgtccaggctagtccctggcggccacgtccagtcttgccaacgcacccggctctgaccctgcccgtgtcctcagatgcctcctctccttcaccgccagccccgaggcctgaacgacctgaatcacttctggtctcaggaccatctgtcaccctgactgaaggtctaggaactgtgaggcctgaacaggaccccgccaagtctccaggaagtcccctcctgctgagaggcttgtcaagcggggatgtggctgcacctgagcccatcatgggggagcccggccaagccagtgaggagttccagccattggcgaggccctggcgggccacactggctgcagaggagctggtttctcaccgttctcccggagagccccaggaaacgtgctctggaacggaggtggagaggccacgccagacagggcctggtctccccagggagggggccagggggcacatggacctttcatcctcagaaccaagccaggacatagaggggccgggactctccatcctgccagcgagggatgccacattctccaccccaagtgtgaggcagccagaccccagtgcctggctgagttcaggacctgaactcaccgggatgcccagggtgaggctggcagcgcccctggcagttcttcctatggaacctctgccaccagaacctgttcgcccagcagctcttctgacacccgaagcctcatctgtgggagggccagaccaggcccgatacctggagtcagcccctggctggcctgtgggccaggaggagtggggggttgcacacacgtccagccctccatccacgcaaaccctgagcctgtgggctcccacaggagtgttgctacccagcctggtggagcttgaataccccttccaggctggccggggggcctcactccagcaggagctgacagagcccaccttggccctcagtgctgaaagccacaggcctcctgagcttcaagacagtgtggaggggctttctgagaggccctcacgctgagcctccatggagactccaggccggtgccccgctggcttggacggccccagtgaccctcagtgacccagctgtccccgggctccctggcttggatgcccagctgtggctgggtacagtgttctgggccggaagagcactcactcagtgcttccctggaaaggtggacccccagacgcccacctccaggcagacccatcactggaagtgggatttgaaatgcagccaagaagaggagaccgtcggcaatgcccgcccggaacaagaaataaataaataaataatcagggt

SEQ ID NO: 554 - DNA, 3276 bp, Homo sapiens
catgtttacccctcactgtttatacctaggcaggcaaacttccctggcgtctgggcccacccgcagacaagacatagaaagatacaagattaggagccctggaatgcgtgttctcgcggtgcacatggagtgggggaggagccaggccagggctagggacctaaagtgcccccagtctccatccgcagccccagcggccccctgcccctctccagggcgggctgggatgctgggtgtgggcgtctctccctcctctttccctcccacctgcctctcctttctttcctgccctcagctgtctcttgctgtctcccccctttgtctgtctctgccactcccctatctctttgtctccgtgtccccccatccttccccacccccatctcccgctccccctctctctcccccatacagtactacgagatgtcctacggcttgaacatcgagatgcacaaacaggctgagatcgtcaaaaggctgaacgggatttgtgcccaggtcctgccctacctctcccaagaggtaagagccagggccttggggaggggttgtgagggggccccgcacttgcccagcccctgtccactgcagccatcttgggtggtgtgctgggcgccccagggcacacgcctcccctctctggacctccctggctctgaacaccagagccggcctgtgcagaagaatccccgggccagagacactccaggggtgcaggcgtgtggggggcgggcctcaccctgctctggaattcccagctggagtgagtcatgtcataggtagaaatgtcagatgggcctaaactgcaccaggaatgtttttttctcatctctcttcctcctttcaccctcttgagacatcctcctccaggccatgcgggctgcacaggaccaaggactagagggtgttaggggattgtgggggaaggggtagcacagggtggtcacacatggacacagccacacagataggcacgagcacatcaacacacgggagatacacagatgcagacacggatacacgtgtgtgcagacagcacagggacacgcatgcaggaatgtgcagctacacgtgggcacacgtgatcctgagcacacattaccacatgcgcacacacacccagatgaacctgacgcccagctcctcttctcctttcttgggttctgaggctcaggatgcgaggccgcccctccccagggccatgtaaggcccatctcctgtccctgccaagtttactgtcaaaagtttgtaacttcctcttcaatccctgtgggtatctcaggatcctttgggtgccctgctttgcccagggacaagtcttagcaggacccaatgaaagccctagagaaaagggcacttggagcccttcagaacagaggcttcctggtagccaaggcaaaaagggagattggtagattctagcatctgctggccacagagtcaggtgtttggggagagctcagggaggaactgccctgaatctgggcccattccccagccagccctgccagaattcattgggccctccccagccatggtaggagaagggctcaatttggccagactcagggcacagtcttggagctcctaggatcaggacgtccctctacagttgggcaggttgtgtactgcacaaacattcacatgtttcacgtctttgcaggtggctgtgcacataggataggtcaggatccagggtttctcccgggctcactcaaaagctgtttcctaactacttagcacaaaacccttttaattgttttctgcacttttccatttgtctctgttggccagacgaagagacgagcttggtgaaaggaagcagttggagagagggagggtgctttctgatggggttgaaaaccactgggaggagcagacatgatggcccacttggtagtggggctcctcctggcctcagggccgtccccctctcctctcccaggatcaggaggaatcactgcctctcctctcccccgacccccttccagcaccagcagcaggtcttgggagccattgagagggccaagcaggtcaccgctcccgagctgaactctatcatccgagtatgtatggggacctgggcgggtgggcgggggacaggtgggccccaggcagctaatgttcccctcccccgccctgcagcagcagctccaagcccaccagctgtcccagctgcaggccctggccctgcccttgaccccactacccgtggggctgcagccgccttcgctgccggcggtcagcgcaggcaccggcctcctctcgctgtccgcgctgggttcccaggcccacctctccaaggaagacaagaacgggcacgatggtgacacccaccaggaggatgatggcgagaagtcggattagcagggggccgggacggggaggttgggaggggggacagaggggagacagaggcacggagagaaaggaatgtttagcacaagacacagcggagctcgggattggctaaactcccatagtatttatggtggccgccggcgggggccccagcccagcttgcaggccacctctagctttcttcctaccccattcccggcttccctcctcctcccctgcagcctggttaggtggatacctgccctgacgtgtgaggcaagctaaggcctggagggtcagatgggagaccaggtcccaagggagcaagacctcgcgaagcgcagcagccccggcccttcccccgttttgaacatgtgtaaccgacagtctgcctgggccacagccctctcaccctggtactgcatgcacgcaatgctagctgcccctttcccgtcctgggcaccccgagtctcccccgaccccgggtcccaggtatgctcccacctccacctgccccactcaccacctctgctagttccagacacctccacgcccacctggtcctctcccatcgcccacaaaagggggggcacgagggacgagcttagctgagctgggaggagcagggtgagggtgggcgacccaggattccccctccccttcccaaataaagatgagggtactaaagttgtcttggtttttattttattattatttttttctttttccagtatactagcttgtcttttaagaaaggggatattaaaaaaaaaaaaagacaaaagtgtttttaaaaaaaagcaacacccacacctgtgtctgtatatagtcagcttatctcgtgttcaatcgtctgatctctacagagagaagtggaaaatgctgtatcaagggtgggcttagctgtgcctttccaataaagatgtgagaagcttc

SEQ ID NO: 555 - DNA, 3312 bp, Homo sapiens
gcggcgcatgcggctgctcctgcggcaggtggtgcagcgcaggccgggtggcgacaggcagcggccggaggtcagactgttgcacgccggctcgggggccgacacaggtgatacagttaatattggagatgtatcctacaagttgaaaattcctaagaatccagaacttgtgccacagaactacatttcagactctctggctcaatctgtagttcagcatctaagatggataatgcagaaggatcttttggggcaagatgtttttctaataggacctcctgggcctcttcgacgctctattgctatgcagtacttggagctgaccaaacgggaggtcgaatacattgccctgtcaagggacaccactgaaactgatctcaaacagcgacgagagatccgtgcaggcacagccttttacattgatcagtgtgcagttcatgcagccacagaaggcagaactctcattttggaaggtttggaaaaggcagagaggaatgttttgcctgttttgaacaacttgctggaaaacagagagatgcagcttgaagatggacgcttcctgatgtctgctgagcgttacgacaaacttctccgagatcataccaaaaaagagttggattcttggaaaattgtccgagttagtgaaaatttccgagtgattgccttgggcttgccagtgccaaggtattctgggaatccattagacccccctcttcgttctcgatttcaagccagggatatttattatttacccttcaaggaccaacttaagttgttatattcaattggagccaatgtttctgctgagaaagtttctcagctcttgtcctttgccacaactctgtgttcccaagaatcttctactcttggacttccagactttcctttagatagtttagcagctgcggttcaaatcttggattcctttcctatgatgccaatcaaacatgcaatccagtggctttatccatatagtattttactaggtcatgaagggaagatggctgtggaaggtgttttaaagcgctttgaacttcaagattcaggaagctctctacttcctaaagagattgtaaaagtagagaagatgacggaaaaccatgtgtcccaagcttctgtgaccatccggattgcagataaagaggtgaccattaaggtgccagccgggaccaggctattaagtcaaccttgtgcgtcagaccgtttcatacagactttgagccataagcagctacaggctgaaatgatgcagtctcacatggttaaagatatatgtttaattggaggaaagggttgtggaaaaacagtgatcgctaagaactttgccgataccttaggatacaacatagaacctattatgctctatcaggatatgacagcgcgtgatctgctacagcagagatacacccttccaaatggagacactgcctggcggtcctcaccccttgtgaatgctgctctggaaggcaagctggtcctgctggatggcattcaccgggtgaatgcgggcacgcttgctgtattgcaaaggttaatccatgatcgagagctaagcctctatgatggttctaggctgctgagagaagacaggtatatgcgtttaaaggaggagctgcaactgtctgatgaacagctacagaagagatccatttttcctatccatccctccttcagaatcattgccttggcagaaccccctgttattggaagcacagcacaccagtggctgggaccagaattcttaaccatgttctttttccattacatgaaaccacttgtgaaaagtgaagaaatccaagtgattaaggaaaaggtcccaaatgtacctcaggaagctctggataagttattatcatttacacacaaactcagagaaacgcaggatccaacggcacaatcattagcggcatcactttctaccagacaactgttgcgaatttctcgtcggctgtcacagtatcctaatgaaaatcttcacagtgctgttactaaagcctgcctttccaggtttttacccagtcttgctaggtcagcattagaaaaaaatctggcagatgctacaatagaaataaatactgatgacaatttggagccagaactgaaggattacaaatgtgaagtaacatctggaactctgaggattggtgctgttagtgcaccgatctataatgcacatgagaaaatgaaagtgcctgatgttcttttctatgacaacattcagcatgtgatagtgatggaagatatgctgaaagactttctccttggagaacacttattattggttggcaaccagggtgtaggaaaaaacaagattgttgacagattccttcacctgctcaacagaccccgagaatatattcagctacacagggataccacagtacaaactcttacgcttcagccttcggttaaagacggacttattgtatatgaagactcacctttggttaaagcagtaaagttgggtcatattctggtagtagatgaggctgacaaagctccaacaaatgtcacgtgtattttaaaaactctagtagaaaatggagaaatgattctagcagatggaagacgcattgttgcaaattctgctaatgtgaatggaagagaaaatgttgtagtgattcatcctgattttaggatgattgttctggcaaatagacctggatttcctttcctaggcaatgatttcttcggtaccttaggtgatatttttagctgccatgcagttgataaccccaaaccccactcggagcttgagatgctcagacagtatggaccaaatgtgcctgagcccatccttcagaagcttgtggctgcctttggagagctgaggagtttggctgaccaagggattattaactatccttattctaccagagaagttgtcaacatagtcaaacatttacagaaatttccgactgaaggtctctccagtgtagttcgaaatgtgtttgactttgattcctacaacaatgacatgagggagatattgattaacactttacacaaatacgggatacctatcggagcaaagcctaccagtgtgcagctggcaaaggagtaaggcaaattcagtactcttctgattcttaaatgctgatagttcttgatttatcattccattctacaaaactgagttgctatggaaattactttccatgagtaagcttttcaaatacatgtatatgttgctgtttgctggctgcttttcagttaaatagcattatttataggcctgtaaattgaaaattttgattattatgtatgtcccatgagtagatgtaataaataaagggaaatatttgtttcttt

SEQ ID NO: 556 - DNA, 2966 bp, Homo sapiens
atgctggcccgggttcttttaagacgggttctggacacaagcgacggcagcttccgcgacccccatcagccccgcctcactctggacaccgggctgtgagctctgggacgcgcccaacttggaaagcgtcttgcttgcccagcgcgcgctacttctcggacgagcacccggcggcggggcacatgctgcccccgcccctgcgcgcctgcggctcccggctctccctcccctgcgccgcgctctcgcctcgctttccgcgggagccttccaaccggttctcggctagggagaaggacgggagcggtgggaagagcgagggtgtagagagggaagttagggctttcgctttctccccccactccagcggcggcgttcggtcctctgggtggaatgtgctcgcagcagcagtgacggcggccacagcacgggaggcacccgagccatacaccctgcagctggagagaaaaggatggccgaggtgggagagactagagtgaaccagcaggaggaagtcccagggccgcgaagctacgacggagatccgtcctggaaaagccttctccaccctgggcactttaagcggcggtggcggcaaacggcaggaggttgcagacccgacagcgagactccctcattccagtcttgctctgccctccggagatgacaagtgagaaagaagtgtccggccgggccatccccttcagttaccaagaataactgtaaaatgtgctgggaatgcaatgtcctgagataaggaagaactgcctgaaacagcctggatcttattcctgtacttcctagggaatgtaacatctcaagttaaagaggaactgcccggaacagcccggggattgttcctctctcctgagaaggaagattacctccaaagctcatccactgagtcacactgcccctgtggtggagggcgggctgcctttccaggttcctcagctgtggtgtaactgaagcaggcacaatcaagactccatctgctcgaggcagctttctcgaaccttggggaacctactcacaatggatcacaggcttcttttgttttgtttcttgctgcctatctgtaagtaattaacttgcttcatgtaacatgttgcatatgagtgtgttctgtctcatagactcagggaattggtaacactgcagctgaggacgcagtggacagaagtgttcagactcctgttccttgtggttgacacagtgatgatgatctcttctgtcctccacagagtggaagtcctctcttgggattggttattggtgaaaccacttcgcaatttattaagatggcaaaagcttacggagggacagatttgaggggaagatcaagatttttctgtcagtattgcaaatagtcaagaatatgtggtccaagaagtgatcattatctttggcattgtgcaagtcattagtgaccttcacatgaacagtctcagtggagtgttggaggaaaaagcctaactgaagaaggttcaagagtgaatggaaaaagagcagtagtatgtggagagtacagacaagtatttccaggagcctttctgtaaagagtggtagagaatgggacatcatttttggatgggggaagagttatttatagcatgttcatatgctaatggaagtgatctactcatggggaaaatcttgatgatgcaagaaagaaagggatttgttggaatcttgtcctataacgggtgagaggggatgggttctagaagaaaaggcatgggtctttgtttgagatcaggcaattcatctgtaggaaccagtaggaagatggttaagtgggtacctgtggtagtggatgtttgtgaacattcttttcttttccattgtttctattttctcaataaagtgggaagcaaaaatcagctgagtgaagatgaggaagaaggtgttaaaggtttgaagaaaaaaggaaaaggatatactaatccaagaggacaagtaagtagaacatagataatgaaaatgctggcccttaggactgttgggcctaaatgctcatattatattggtagtcacaaatttgaactttctctagagccaatttttgcatgtgtgtgcaggcctggagtagttggagagttggatttaatagaattgagggtcaagcaactacaaccagggaagagtgggacaagggagataaaggatattggcaggggagcaattataaacatggaccatgatcaaaactggacaggaaggaaaatagagataagaggggtggaaggttaaaaatagtgaaaatgagatagaatgaataggttgtaggtccctgtaaagttgaagaagtattattatgcagtactcgttattgaaatgaggtcactatgcttaaggcacagtgaatcctagaaaatagtggttttgtttctcattaggcaatacattcctccttgctccagaatgcaacatacatgtatccttttctgtactattttttattaagaattcatacttaattccactgactgccactcaattttaatgtacagtagggaattcctgtactatgtattatgaatccattcctttgaatttcatttataatacttcatgactgacacctggctttccaccaagactcaattttcatagcaagcctcatcatcataagcccccaaattaacaggatgaggaggaagaattggcaggctaaagaagatgattatatcaattaatgcagaaaaagcatttgataaaatccaatattcatttgtaattaaaaactctcagcaagttagggataggaattacttcaacttaatgaagagtgtctttaaaaaccttattttcatcagttataacaaatgtaccactctggtggtgaatgttgctaaggagggaagctatacatgtgtggggaaaggagatgtgtgagcaatttctgtaccttctactcaatcttctgtgagactaaaattgctgtaaaaaataaagttcattttttt

SEQ ID NO: 557 - DNA, 2432 bp, Homo sapiens
agtaataatgaatgaatgcactgtttattgactatttgcaaattgtttttgttatctcagattgaaattttggaggtatcaattccttgagatgggaggagaacggaaggaaaacaaacaactaccttttcctttcctgttgttgctgatgtgcactttccctgtcttccacgtcatgactcaggaaatgagggggtgcatctcagagggcaccctgcctgtgttctctgtcattgcctgtgagccaccgactgataccatcattttaatcactcaagaagccttcctttcaggaatgtatattgcttcttggcccctgccttctccctggaaatcctgggcaaagagccagggaaaaaatgtgagtgctcaggccgaaatcagtgggctggaattgtttcttcactttgggtgactccactgttactcaaggaatgaactgattggcaccaagcaagaagaacagcacatctctttggactcattcccttatttataagccataaccttagggacaataagctagagaccctgccagcatccttgagccaggatctcatctgttgtcacagtagccatgtttccctggcatccgagagcccaaggatgcaaataaggcctgggccaaactaagctctgacaattaatgttattccaaagaggcagcagcgagggtaggaagttctggtcccctcatcttacttcaagtttcacagccaagagtgatgatagctttagtcaataagtacagtcaaggagcctatgagacagaacttgtcacaaagacagctgatgtttcgcatggaccttaacagagtaactggtgtctcttcaggaatggggcacaatccagaggttactaaccacgggtgagtaacaggtgatccacaacaatctcatctgactcatagtagagattgctggcatctacccagcattcattccccctcttcctaagagaaactcaattcgttgtaatcagcaacatattcccaacaggaaaatcacatttcaagccttcctttagataggtgactacattttggccagtgagataggagtgaaagttagtcagatgggctcctcctgacaactcctttagaaggggctgacccagctgtcagccatttgccctggtgtgtcctcctctctactgactacaatataggtgtgatggctagagtagcagctgctatcttgggacaaggggagaccttggggtaaacagaacctaggatagtaaagcagaaagatagaagagcctgggctgatgatgatgtggcagaactgccatacaagctctggactgctaatctctggacttaactttcaggaaacaaaattaaactctatctggctcaagccactcttactttatggaccaagagcatcggcagcacttgggagcttgttagaaaggcagcttctcaggccccttcccaggccaaatgagtgacgatcggctttgtagcaagatccacaggtgatttgcatgcacagtaaagtttgggaagcactgctccagatgtagttagtttctctgtttatgaaattattaactgatatatcctgggaaataatgaattctatttgccggtactaaaacatggtaagaatgatataaccattggataaaacaactaaaatgccctgagttatttggatacaaagaaagaaagcattcatgtcaattagttaattgatgttccagccactatacctggcaccagagaagtaaagatatccctgctctagactccatggtctaacaagggagacatatagatactgtgtattgtgttgcattgcattataagaaccgtttggatgcaataagagctatgcccaggtgttccgggaaaacagatgaggggtctaagccttccctcctgggctagggagtaagttagagaaaacttcttggaagagatgtcacctgagtagttaagaattatcttgcttcttcccccagtttcagggatcagaggccatcctttgtgggcttaagtcagcctgctggcctccccagctgctccttaaattctaagagttggcataaaagacacaggttacaacacgaatgtcttcatcctacacgatctttactttctctgttcacaatgtgggctccttggctccattttacatatacaggaaatttggacactgaatagagagtgaatttcaaaggattcagagaaggcaaacccatatgagtgtttagagttcattgatcactagtatcttcttaattttgtgaacaccgggttctgaattccttcattgactagctatttctcttcatgtcttctacaaacattctgaagttggaaatcctttttattggtgtttagaataagtcaatgtttttcctctctttatatttctacttgatattcctcagttttctgtattattaaaaatgaaatcac

SEQ ID NO: 558 - DNA, 1989 bp, Homo sapiens
agagtgcctggtgactcttacgctagcctcatttctcggcttcatcttgttagaacaaatttcctcgccctcttctcctaggccgcctgccagcgccgcacccactcctgcccctgcctgcaccccacccacttcccggggacttccgagcccacgcccacatcctttacctccaaggggcaaggaagctgttgacttaagatcccatgtggagcagtcagatgctgctggagaactccccgcactgcaggctccagacacacgacctggcccctcccccgtggacgcctatactgctctgttctctaattccagggttcccaacctcggggttgtgccttgcaaatacctgggaaacttttctagctaatgcctaggcccctaccaacccagaaattcccatctaataatctagggtacagcctaggcattgaaacgttaagccgaagagaaatccggcgcacgcatccagtttccaccaccgaatttccagcttcttaaatctgcaggtccagaaaaagaagatgggagtgctgcccacgtcgcgcgctggggctacggccggccccacccctggcgctgccgcggccgtcccgcccttggacttgggcggcgcctggataaacacctgaacctgactgagctccgagccagggactcgggtgcctggggcagacgaggccggcttctccgcggacagctagggagagtgtcctgggtgtcagccagaacatgtctttcaacctgcaatcatcaaagaaactgttcattttcttaggaaaatcactgtttagtcttctggaggctatgatttttgccttactcccaaagccacggaagaacgttgctggtgaaatagtcctcatcacaggtgctggaagtggactcggaaggctcttagccttgcagtttgcccggctgggatctgttcttgttctctgggatatcaataaggaggggaatgaggaaacatgtaagatggctcgggaagctggagccacaagagtgcacgcctatacctgcgattgcagccaaaaggaaggagtgtatagagtagccgaccaggttaaaaaagaagtcggcgatgtttccatcctaatcaacaatgccggaatcgtaacaggcaaaaagttccttgactgtccagatgagcttatggaaaagtcatttgatgtgaatttcaaagcacatttatggacttataaagcctttctacctgctatgattgctaatgaccatggacatttggtttgcatttcaagttcagctggattaagtggagtaaatgggctggcagattactgtgcaagtaaatttgcagcctttgggtttgctgaatctgtatttgtagaaacatttgtccaaaaacaaaaggggatcaaaaccacgattgtgtgcccctttttttataaaaactggaatgtttgaaggttgtactacaggctgtccttctctgttgccaattctggaaccaaaatatgcagttgaaaaaatagtagaagctattctacaagaaaaaatgtacttgtatatgccaaagttgttatacttcatgatgtttcttaaaaggcttcatctggcacaggatgggtcagaatgcctgactgaggctatgtgggacagagcaaaggatcctggacaagcaattcgaaattcaggcttacgatcccactattcactaagtctgtgactctgagcgtgccctttattctccagctttttgcccctcaagacaggactgcttatagctgactatttgggcatccttcatgcaatggatggctttgttgaccaaaagaagaagctctaaagaccaactctatggctaaggtcatctgatacacagtgttacataatgcgtacttcaatgaagaaaagtatttttgtctgacagtggaatatatctggagaccacaagtaccactcctattctgttatctggactagaattttcaatcaatgtgtttgaaaataatgttgctatcacct

SEQ ID NO: 559 - DNA, 2175 bp, Homo sapiens
agacccaaggtggcagctctcactgcggggaccctgctacttctgacagccatcggggcggcatcctgggccattggtgagagcggttcctgtgcctctgacctcccctggcccctgcagcctccagcctgcctgccctcacccctcccttctctgcagtggctgttctcctcaggagtgaccaggagccgctgtacccagtgcaggtcagctctgcggacgctcggctcatggtctttgacaagacggaagggacgtggcggctgctgtgctcctcgcgctccaacgccagggtagccggactcagctgcgaggagatgggcttcctcaggtactgggggccctcggaggggtgggagccgggaggggctggggagcaggcctaacccctgccccgcccagggcactgacccactccgagctggacgtgcgaacggcgggcgccaatggcacgtcgggcttcttctgtgtggacgaggggaggctgccccacacccagaggctgctggaggtcatctccgtgtggtgaggagggcagcgggcaggtggggcaacacctcagacccccaaggcactccctctccccgttttccttccacctgtcttaactggtctctatttcctttctttctgtgtctccaatcccatctctcccagtgattgccccagaggccgtttcttggccgccatctgccaaggtgagatcctaaaactcagaaccctctcctttaggcccttggggaggccacgtcccctcaagctccccaggatggggccatgtactttcagaccccctagggcagggccaagcctgggctctggggacctgggctccagtcccctgtcgccgccccctgctgacccttgtcccacagactgtggccgcaggaagctgcccgtggaccgcatcgtgggaggccgggacaccagcttgggccggtggccgtggcaagtcagccttcgctatgatggagcacacctctgtgggggatccctgctctccggggactgggtgctgacagccgcccactgcttcccggagcggaaccgggtcctgtcccgatggcgagtgtttgccggtgccgtggcccaggcctctccccacggtctgcagctgggggtgcaggctgtggtctaccacgggggctatcttccctttcgggaccccaacagcgaagagaacagcaacgatattgccctggtccacctctccagtcccctgcccctcacagaatacatccagcctgtgtgcctcccagctgccggccaggccctggtggatggcaagatctgtaccgtgacgggctggggcaacacgcagtactatggccaacaggccggggtactccaggaggctcgagtccccataatcagcaatgatgtctgcaatggcgctgacttctatggaaaccagatcaagcccaagatgttctgtgctggctaccccgagggtggcattgatgcctgccagggcgacagcggtggtccctttgtgtgtgaggacagcatctctcggacgccacgttggcggctgtgtggcattgtgagttggggcactggctgtgccctggcccagaagccaggcgtctacaccaaagtcagtgacttccgggagtggatcttccaggccataaaggtgaaagttgggtccagatgggagccagggtggggacgtttgggtgtctaatgggggaagggaggcagagatttgttttaggaaacctacgctcaggcctagaagagggccccccttgggaacagatggactttgaagggttcctggggaagggaagccagtggtgggacgtggaagcctctcagacctcgggagcccccagctgtctttccccagactcactccgaagccagcggcatggtgacccagctctgaccggtggcttctcgctgcgcagcctccagggcccgaggtgatcccggtggtgggatccacgctgggccgaggatgggacgtttttcttcttgggcccggtccacaggtccaaggacaccctccctccagggtcctctcttccacagtggcgggcccactcagccccgagaccacccaacctcaccctcctgacccccatgtaaatattgttctgctgtctgggactcctgtctaggtgcccctgatgatgggatgctctttaaataataaagatggttttgatt

SEQ ID NO: 560 - DNA, 3416 bp, Homo sapiens
gcgacctgctgcaggccatgccccggaccgagttcgcgcgcctcaacggcgacgtgcgtctgctcacgcccgaggcggtggagggctggtcggacctggtgcactgcccctcgcagcgccttctcgaccgcctggtgcgccgctacgcggagaccaaggactcgggcagcttcctgcttcgcaacctcaaggactcggagcgcatgcagctgctgctgaccctggccttcaaccccgagccgctggtgctacagagttttccgtctgatgaaggttggccatttgcaaagtatcttggagcttgtggaagaatggtggctgtaaattatgttggagaagaactgtggagttactttaatgcgccatgggaaaaacgagttgacctcgcttggcaattaatggaaatagcagaacagcttacaaacaatgactttgaatttgcactctacctcctggacgtcagctttgacaattttgcagttggtcctagagatgggaaggtaatcattgtggatgctgaaaatgttttggttgctgacaaaagattaattagacaaaataaacctgaaaattgggatgtatggtatgaaagcaagtttgatgactgtgataaggaggcttgcttatcattttcaaaagaaattctttgtgctcgtgccactgtggaccacaattactatgctgtttgtcagaacctcttatccagacatgccacctggcgtggcacttctggaggactccttcatgatccaccaagtgaaattgccaaagatggccggctcgaggccttgctggatgagtgtgccaacccaaagaagcgctatggcagattccaggctgcaaaagaactgcgtgaatacctagcacaattaagtaacaacgtgaggtagtctatggtgaacttttctttttttctccatttaaacagcactggctaaaactaaaccaccaaaaaacgatctgaaaaaatgaaatttggaagtgttacattcagaggatgataaacttgcactgatagatcttaatgttaacatccatcaaaataagacattacttcaaaaatcacatgatgcttctgcaaataagtatgttcttatactttggaggcttgagctgtcatcagctgctccccactaccccggaatgcttgagtggattaatgaatattgttaagctattggaaatgagtctgatagtacattggcttgtgtatcaaagggtacttggtacttagtttgcatttactatcatgattttgtgaatctcttgcatttactttgaatgtcaagtcagattggtctgttttataggccgctttttccttctgatgtgtagggttttttccccctttttttttttaattaaattttgaaaattcaggttactgtaggtgttcatttaaatttttaatagttgtcattcagtgctatttggtacatatttactgttagggcaggattcccaggtttactgtgtttttttttttttttttttaaagaaagctaaatattacattatgtaaatacttcttttcaccaacttctgtagtttcaccattgcatggtgtcatttcaggttatttaacagttatatccctctatgccaataattagaagtgtacactaaacatgaagtttggcatatgttgcaaaatgtcattttatcttttctaaaggctttaagaagaatatactagaatctatatattgatgttaattttgattcagaaaaaaatacaacccagtatctaaaaagtgttaactagtccaagatagtaatgcatatgccaaagaaatattacacctaatctcatgtttagaatttaaaatagaattggtcagctacttattcttaccaccctacttccagtattttagctctgtcattattaaattcagatcttcctgattattttttctgttgaaagttaaactactgctttcaagtaatttaaagttatcctaccttttattcatgggtagttttgcaaaattaacatggtagccattgtttgaatttaatcgggcatcataacttttcatttattgaggaactaatcattattactataaagcatacaaattagccagtcagcacactttggtcttctttacctaagggttaaacatcagaacatcaaatttaattatttgcatagaaatgtgtgggctctttatataagttgactatcactaacaggtaatatttttctgtttgaagttgttacttttgtttacagcaaagtttgatgtagtgtgcagtagtgagctctagactgatctttttctaaatcagaaagtgattaaagtatgcacaaccaaaggcaggtttttctttttcatttattcagcaactatttattaagcatcaactctgtgccaggcacgttactagctgctacatactgtctgaacatgacatacggttaagtaactttacaattattatcaaatacttcaatgtagatatttcttaagttgaaatagcattaactaggataatgctttcatgttattttattgtcttgtgatagaaattcaacttgtaccatctaaaactaggttgctataaaaataggaggatgaagtcaataaagtttatgccagtttaaaaactggaaggaaaaggtaagagctctccattataaaatagttgcattcggttaatttttacacattagtgcattgcgtatatcaactggccctcaatgaagcatttaagtgcttggaattttactaaactgacttttttgcaactttgggagatttttgaggggagtgttgaaaattgccaaacactcacctcttactcaaaacttcaaataaaatacacattttcaagagggagcaccttttatatttgataagttttcattataaaccttataataccagtcacaaagaggttgtctgtctatggtttagcaaacatttgcttttctttttggaagtgtgattgcaattgcagaacagaaagtgagaaaacactgccagcggtgattgctacttgaggtagttttttacaactaccatttcccctccatgaaattatgtgaaatttattttatctttgggaaaagttgagaagatagtaaaagaattaggaatttaaaattacagggaaaaatatgtaagtgaaaagcaataaatattttgttcactttgctatcaagatgttcactatcagatatttattatatggcagcaatttatatttttaatcattgcccattaatagacgcagtaaaatatttttgaatcagacatttggggtttgtatgtgcattaaaattgtcttttgtactgtaagttactgttaatttgaatattttattgaactgtctccctgtgcctttataatataaagttgtttctacaacttttaatgatcttaataaagaatactttaagaatcac

SEQ ID NO: 561 - DNA, 2649 bp, Homo sapiens
aggaccaggaccaggaccagggccagggtcccagccaggagagtgcagctgagcagggagcagtggagaagcagtaagcagccccccacctggctattcccgaactggacagcacctcttcaaccacctccggcttccaggacctttctcttcctcctcctccaattcccctcccccatcattctggtctttgagctttgagacgatgggcaggcatcagctgttggaaacctgggcagccctctcagtggcttcctatcctccttcttgctggagccatgaatggcaggagctcagtgcttcttgtgcagtgcctggacccaggtatcttacttggggtcttacttgtacccttacagtctctgagaaccagcctctgctgcaggtgagggttgggggcaggaaaccagtgctctgagactggttcctagcagccacctttctgtcaacctgtccggcttcaacaatattagggggaagggaaatgctagtagccttcccctctggtcccttgtgtggaggccccaatagtggtttggcgacccctcctcagtggctgtcatctagtccctgcgtctgatctccagtcatcccatgactcagagtgccttccactgtcttctctggcctctgcctgcccacagaatccaccatgcgtgaaccagagaggtccaccagcctagaaaacagcccttcagagggtcctgatgaggccttcctggactcagctgggagcaagataaattgcaactgagttgcagcttcaagaaagtaaagccagtaagcttgctggcagaatcaatttcttctatcccctcaatcctcccacccaccaggctggggcactttccaccaacactctaaactctactttagaaacgccctatcttcctccctgtcctccttcttggtctcacacttgggactcaaaaatgtggagtcaggacctgcctcctaatccccttacttctctgtccatctcccttccccagcatcgtgcatctgaggcatttgagatcctttttgaagtctgtccaggccttccttttattcctgtggggccagacaggggcttaggaagggccaaaggaccatcatgaggctaagttgccccagagccccaggatggatgggcccattttttccttattccctgctcagttttttcccctgctccttctctagtccttctttcatatttctccttctcatcttgaaaacaggatgttccctcttcccttgctgtcccatttctcccctgtgtccttatttctcccagtctctatcccctctcaagtccagggcaggccgatgctattggtgcttcttcactttgggacccagttccatatttgtctttagtgtatatcctcttcctgatacctccttcagtccctctctgggccccaaggctgagaatcagtgttaactgggtaaggatcatttgcttcctacccagctcaatctgccctggccatggggcttcccagggaaggaagaagagggaagaatccgaccactttccaatccagtgccaattggcccactaagcatcctaaaggtgaatgtgccctgtgccaatctctcctcaggactgagtcaacccccttcaacctcctcacctctctaaacaccatccatagtaacatgtgcattactggggtacctaggagtcaggacttttgacttcaggccagtcatttcctcccgatggggaaagggtgagatttacatccccaaatgcttgagtccctcagtgaaagaattagtttttgtttgtttgtttaagattttggggaagagatttgaggaggaaagaaaggagatggggtgagagggtttttaagtctgaaactctctgtcatgagctgtccccatggttactcaaggacaaggggggacagttttgcctacagctccagagacacagagaacaaaggggtgaccttcatttttcttcaagccggcctctgtgggggtctgtgagcagcttctactggatctttgtttggattctgtgtctgtatttataatttatttgaaatgtgctgggtagtgttctcatttgggggctgaagttagcaactgggccttcagctagggaaagcagttgcgggcagggggtggggggagattatattcactcctgccaaggactcccagcccaggactctctttagagcaaggaagcctcgttctctttcttctcaagaggctctcttgttctccatcaggagagccttgatttaggctacggcctcactctctatggccaccctaagaggaaaggctacttcacctcattacctccagagggctgggcagggccaagtgcctcataggactcatgttctctccaaccagggctggcatcactgctttgcaaagtggggcctgaggtagaagaaggtgtctggtttctccagctgctgtaggaggctaatgggcagggtacttgccctttgtcccactagactctaacccagcaccagggtgcccacctaggacctttcctggacatgagtttccttcactatcatagtcatgagcctcctacttctgggattgcagatcaggggtggggggagaatgttgcatgttgttttctggtgcttgttattatatatttgaataaacagtgctgcaagt

SEQ ID NO: 562 - DNA, 2468 bp, Homo sapiens
ataagaaatgaatacagccatgcttgataattcctttatcaaaagctacctattggtgttaggaagtattgttttaaattctaagacagtgttttcactttctatcttgtgcactgactacctcatgaccccttaggtaccagtcaggactggtagactttaatgtggagagcttctgaaacagcagttctcaaaatgttacctccagacacacagaatctgcatcacccaggaacttgtaaccatgcaaattctcagccacccagacttcctgcatcagaaactctggggcccagcagcctgtgttttaacaaagcccttcaggtgattctgacacttgctcaagtttgagaaccgctgttctaggagctggtcctgcagggaaagggtggcctctcagttcaggttccagtgtggctgggggtgggggtcaaggtgagggtttggttgttgtgtctgacagtcagccaggcttgagcacacggactgtttacaaggctgcactttccatgttctggtcagcagtctcctggttcattccgttacgaatggactgtcaccccaaaattaatgttgaaatctatttctctatttggaggtggggcctttgggaggtaattaggtcatgagagtggagccctcatgaatggaatgactgcctaagagaacagagatggctcacgcctgtaatcccagggtgctgggattacaggcgtgagccactgcgcccagctggcatggtatttgttatagcaacccaagctaagacactccatgttatggactgaatgctcgtctgcccccaaagtttctatgctgagatcctaacccctttgtgatggtaacaggaagtgggaactttgggaagtaactaattaggccatgatggtagggccctcatgagtgggattagtggctgtcttagtccattttgtgctgctataatagaatacccgagactgggtaatttatatagaacagatgtttgttctctcacagctgttgcattagggatagatggaaagacttatttatgtattgactgactgattgatggggccttgttttgttgcctgggctggagtatagtggcatgatcatagatcactgtagcctcaaactcctgggctcaagcgatcctcccacctcagcctccatatagctggtggggaccaagtttctaacacatgaatgttgggagacacattcagaccatcgcagtggccttataaaaagagacacaagagcttgctctctgccatgtgagaataccacaagaagactgtcctcagcaaatcagaaagcgggtggaccctcatcagacaccagatgtgcctgcaccttgatcttgtacttgccagccttcagaacagtaagaaagaaatgtgtgttgtttaagccacccagtctatggtaacttgctatagcagcccactaggagaccccaagatatttaaaaactcatcagcacctgctttctgcatctggaccctgatcttctggtgggtttaccagttacttgtagagtgtccctgtgatagttttaggtgtcaacttgacaggattgagggatgcctagatggctggggaagcactgtttctgagaaggaccatgtttttggaggagactgttttatgagtgaatttcaggggacacattcagatcatggcagtggcattataaagagagacacaaaagcttgctctctctctctgccatgtaagactaccacacaaagactgccatctgcaaaccagaagcaggtgggctttcctcagacaccagatctgcctgcaccttgatcttggacttgccagccttcagaactctaagaaagaaatggtggcatggcttggtctaagttggaaggcctgagaaacaagcacatggtggaactgagttcaaggataaagacttgagaatacctgctcagtggactgagtagggaagatcaaccctcaatgtaggcaggcactatccaatcacctgagggcccagatggaacaaaaaggtggaagaagggtgaattctctcttccagagctgtgacacccttctcatgcccttgtaccacacaactctgggtcctttggcctttggactctgacacttgcaccagtggccctctggggctctcgggcctttagccttgaacttagttacaccatgtgcctccttgtttctcgggccttccaacttggatcaggccatgccaccggcttctctgattctccagcttgcagatggtatattgtgaccctggcatttaataactatgactttggtcttaagcaattttcttcctctgtggattgatatttacatatcaatgtggataataatttcttaccacggtaactgttgtgaggtaaaaatgagttaacataagtaaaaccgagcacatgcaaaccatccgaaatggttaatacttactatttgtacttgaagaaataaatgtttttgacaat

SEQ ID NO: 563 - DNA, 3136 bp, Homo sapiens
cagctgtcttctgcctgcagtgcccaggagcttgtgaagctgctcaacgagctctttgcccgctttgacaagctggcagctaaataccaccagctgcggattaagatcctgggcgactgctactactgcatctgcggcttgcccgactaccgggaggaccacgccgtctgctccatcctcatggggctggccatggtggaggccatctcgtatgtgcgggagaagaccaagactggggtggacatgcgtgtgggggtgcacacgggcaccgtgctggggggcgtcctgggccagaagcgctggcagtacgacgtgtggtcgactgatgtcactgtagccaacaagatggaggccggcggcatccctggcggatcaaagattgaagaaagattgtactcctgtgtcgtggctccaacactgaggctgagatgggagcgcgtgcacatctcccagagcaccatggactgcctgaaaggggagtttgatgtggagccaggcgatgggggcagccgctgtgattacctagaagagaagggtatcgaaacctacctcatcattgcctccaagccagaggtgaagaaaacagccacccagaatggcctcaatggctcggccctgcccaatggagcaccagcttcctcaaagtccagctcccctgccctcattgagaccaaggagcccaacgggagtgcccacagcagtgggtccacgtcggagaagcccgaggagcaggatgcccaggccgacaacccctcattccccaacccacgccggaggctgcgcctgcaggacctggctgaccgagtggtggatgcctctgaagatgagcacgagctcaaccagctgctcaacgaggccctgcttgagcgagagtccgcccaagtagtaaagaagagaaacaccttcctcttgtccatgcggttcatggaccccgagatggaaacccgctactcggtggagaaggagaagcagagtggggctgccttcagctgctcctgcgtcgtcctgctctgcacggccctggtcgagatactcatcgacccctggctaatgacaaactatgtgaccttcatggtgggggagattctgctcctcatcctgaccatctgctccctggctgccatctttccccgggcctttcctaagaagcttgtggccttctcaacttggattgaccggacccgctgggccaggaacacctgggccatgctcgccatcttcatcctggtgatggcaaatgtcgtggacatggtcagccacatggtgaagctcacgctcatgctgctcgtcgcaggcgccgtggccaccatcaacctctatgcctggcgtcccgtctttgatgaatacgaccacaagcgttttcgggagcacgacttacctatggtggccttagagcagatgcaaggattcaaccctgggctcaatggcactgacaggctgcccctggtgccttccaagtactctatgacggtgatggtgttcctcatgatgctcagcttctactacttctcccgccacgtagaaaaactggcacggacacttttcttgtggaagattgaggtccacgaccagaaggaacgtgtctatgagatgcgacgctggaacgaggccttggtcaccaacatgttgcctgagcacgtggcacgccatttcctggggtccaagaagagagatgaggagctgtatagccagacgtatgatgagattggagtcatgtttgcctccctgcccaactttgctgacttctacacagaggagagcatcaacaatggtggtattgagtgtctgcgtttcctcaatgaaatcatctcagattttgactctctcctggacaatcccaagttccgggtgatcaccaagatcaaaaccattggcagcacgtatatggcggcttcaggagtcacccccgatgtcaacaccaatggctttgccagctccaacaaggaagacaagtccgagagagagcgctggcagcacctggctgacctggccgacttcgcgctggccatgaaggatacgctcaccaacatcaacaaccagtccttcaataacttcatgctgcgcataggcatgaacaaaggcggggttctggctggggtcatcggagcccggaaaccacactacgacatctggggcaatacagtcaatgtagccagcaggatggagtccacgggggtcatgggcaacattcaggtggtagaagaaacccaagtcatcctccgagagtacggcttccgctttgtgaggcgaggccccatctttgtgaaggggaagggggagctgctgaccttcttcttgaaggggcgggataagctagccaccttccccaatggcccctctgtcacactgccccaccaggtggtggacaactcctgaatggcctcgagcctgcaacagtccaaaccggaagggagaatttattttttgaaactgaaggaagtcccgaccttcctggattgaagtgcacactcatggactttaggtttagaaacctcctcagccttcatttgttcgtggatgtgtgagctctgagggtggccctgctattcctgtgtgtgcctgtagtgtccccagcataggggtcttaggcatagggctgaacagtccttccagagccctcgttccaatccctgccgtccttgcccctgaggggccctgaccactgtgagcaggagggtggcagagctgggacaaagctgcctttgccgctgggctttccgggactgtggagggagcacaggcggggaagctccacttcagacagggcttggtggggcaggacatggctcccattttgaagggaggtctccatgtggtccgagtgaggtgagacggccctcgtcctggtgttcctgatcatcttgaaaggttcttctggaactcctgtccccttagtcatgagaacagaaagtgcaatatttcctttcacctggcaggggaggggggatttatttctgaaagaaaaatatataaacagatcttctacatttatatttttaatcttctgttaaatacactttccgatattgccttgccttttgagctcttgctacagtcgcctttgctactgctttaagagaatttacaggtattgataaagaacaagactgttttattaaaagctttattcaacttg

SEQ ID NO: 564 - DNA, 3473 bp, Homo sapiens
aaagcagggacaaaatgggacgtcgcgtctccatcctgaagacccagggagatttggtctctgcacgcccgtcccgtggaggaagagtgagaaggggcagtgtgtggggcgtggagctgccgtccacgtgggatgtgccagaactagaactggctctgccgacttctcgggggcttctccgggacaggcctggccttggctgctggaccctgggtcccttctcccggacggcagcccccatcccatttccagggatgtgtagcattccctgccaagcaggggtgagaactgcttctgtgcagaagcaccagccgcgggtcccctcctctctcttggttctcacagtagctgccactggtgtctggaggaagattttcagaaacaacagaggcttggcctgatgacaagatgaaagctggacggtgaccttcattcaggggaacctggaggctccctgggatggtcctgggagggctccccgacgcctcaggggcccctccgatgctgcaatatgttgctggggtcctgagcacccgctggccaacagaccccacatccaccctcgttcatcatcatctctgtggggacagacaagagccgtggccgccgcgggccgcgtggtgccatcaaccctctgcctccctactcaacctgagacaggaaggccaagatcccgcccaagccgccagctgggagcaccgcgggactgagccaaggaaggcgtggggagcgtggtgacaggaggtgggacgagggggcggagctggctggaacacggatgccagaggctgcctccatagtgaatctccagaagtcacagaggccctgggcacccagagccacccagcctggaagcccctgcacgggccagccctgcaggcaccgaagcctcaccccaagcctttgcacacaaggagcagcccaggtggggatggcgggcgcaagaagggaaccgcggggacggcctttcccctcccgccctgtgtggggacgctgcacgagccgtggaccaagaggctgacagagaggaagcagtgcattggtgaaggcaacgttaggtgtgatttccattcctgctgggagacccgggacgcagcccgggagcttcgtccagcctgtggatggagcctgactggctgcagatggaacttctgtgtcctcccaccctaggtgggctaaggttctgctctcagagctgaattgacaggaggtgtgtgtgtgtgctcacttgtgtgcacaagcatgcgtttatgcatgttttcacgcaaccagaagagccattcgtgggatttagccatttcgaggcacctagaagttgaggcagccagctgtgcagccaggtgtgactgttactggcagcattgtataaaagacacgactcagctgccgtagggaggactgggttgtctggaagtattaggctcattttatatttgtgtcagaagaaatgtctgactttggggcagatgacacggtggctgcggaccaggcatggctccctaggttgaaatcagggaaaagctaatagtatcagacagatatgctttttctttggtggctgcaggatttttgctggaaaatgcactattaatcagcacttgtccaagaaagacccatccatttctgttgtcattcaagccacagttcctgatttactcggcaagatactgggccagttcagtgtctctagctgagcctgacctcggggtttgcgtctcgagtctgaaatcctgtttagtcctctgtgcatagttttgtctcattttaacgactgcatcttcttggcacatttattatactcacaactgaatggcacacaatagccttgtgttaataaaagctaccgtggcgctgtgggtgaaccgctgggttgaagtccgatggactctacgatgcaggcatccagaaatatgttgtaactctacctggctccctgccagcctggcctcctcctctgggagagctcctggcatggtcccaatgtgtacctgcatgggaacaacagctgcatgggccagctgtttcggatctaaagatgtgcagtgaaactcacattcccagattcacatccctcatgtttatttgggtcatcatggtttagcatgttgtatatatgtctggagcacttcatacacctctatccaccacagacactcttaatcacagttctgtaataataaggcaaactatacggcaaagagaagcatgtaaatatgtaccaaatccttatgaagttgtaattgtttatatgtaaaaagtatgtatataggaacgggagaaggtgcaaggaatgtgctgaataacatccaaactgcatcgcgtctctgccccattcctgaaagcacacatctagttggagcgtcagttcctctccttagatatcattgttttcactcgtctatcataggcaccttctttacatctgattacaatacccagcatttcagaactgggtttttgcccccaaaaaggtaaatatgagcatttatcactgactcctcctggtccagtgagcagcagcagaattcaagtatttaaaaataaggtgcatttctaaattgcaggctataccttcttttccaaaccaatgggctagagtgaatttcctccaagtacttgggctgtcttactgctagctcttctaacaggggaagtctgtatgaatgcatcaccccctaataaggcaagaggaaggaccctgaaatgttgccagaaatgtactgttacatcaacatttacattatattaacatcatcacactctgtgttcaacacacagaacaacatagatactttagtttgtctaaagtaaaaatccacataaatagcagattcctttgttgacaccagtgtgttgtttaccttgtgcccatggtccagattttgagctggagaaggactatggctgttccttaaagtctctgcccttgcagaatctgtagccttcaggataccccgagtgccttacagggcttgtgaacaccgatactagaagtcaaaaagaagagagtgcccaagtgtgggtttggaggcactgacgcattcgccaactcaccgtcatcccatccttgaaaccctgagagagagtgtgtgttttatcacagtaatggaattcagtttagcctcaggaaactcatattgtgaatataggtatcaaatcatatatttgtttactgtatattttttaaaaagctttattgtaaatttatgcaaaaactaaccgggcctgttttcttacggcggcatgccaggtagtgtgtgtattctcccaggcactcccttcatagtcaccctctaaccacgtgacattccgttccatgctaagcagtattcacaggcctaaaataggtttgtatggtgatctacaagattttacaaatatttttgtattgtgattcctatgatatataccagagaattttttactcgtttgtaaattgttgtacagttttaataaaaaatgttttaaatctt

SEQ ID NO: 565 - DNA, 3106 bp, Homo sapiens
ctgctgttcacaggacatgccattatgtctttccagtacggatcacagtgctgccatatcacagaccctgccagccggcacagaaccatgcctcgtcacagctctgcccaactcacaggctgccaagatgaggccacaggtccacctagggcggcagatgctggtgctatttgtcacgacttttgccaaaacatgtacactgttgctcacatctttcgtaagaatggttgacactaaggggccatggaaaagcacttttaaaaaattatgtggtggaatcaaactcacagaggcagaaatgttagtgccgtgctctaaccaagtaagcttagtgttccccacagtgatctgtatctggcctgagtctcctcaagcagcaacccccactgtccagcatgtggaaggtagatccttatgacaacaccagacccatagttaccaggaaagaaaaaggaagctgagtgttgtgaaggggaagaaatcctttttataagaagtaatcatttttaggccgggtgcagtggctcatgcctgtaatcccagcactttgggaggctgagacaggtggatcacttgaggtcaggagtttgagacctgcctggccaacatgatgaaaccctgtctctactaaaaatgcaaaaaaaattagccaggcatggtggcatgtgcctgtagtcccaactactcaggaggctgaggcaggagaatcacttgaacctgggaggcagaggttgcaatgagctgagatcgcaacactgcactccagcctgggcgacagagcaagactccatctcaaaaacaaaaacaaaaaaaaaacctttttaaagtaaattgagtgtaaaatgttttcaccatgaagccattgcaccctctcccccaggaaacagtgcctaaggatgatgtcaagttacagccagtttgctctgatcccccaggacctaagaaaactgtgagtgcttcagcatgcaaaggtagagctaccagataaggagaataacttggccatttatagcaaactgcctgactttggagtgagaaaccaagcaccttctaggtcctaggataggtgaattggaggtgcagctgctgaagttcccattttctacatacttcaggagccagggtgtttcatttggttttgtaaaactttgctgtaagtcatcacagttaattcttcgaatggacattttagagtgtaactttttttcaaaattagcagaacagatatctctgctcattctctttatacatttagttttttaaagttcccctagtatacctgttaggcactctaaataggacacagttaaagctaaaagaaggaccagttgctccctagagcctacagttcagaactatcttgttgtcatgtcctggtttggtttggtttgtttttaactcaacaagttggaaaccatgagtttaaagcaaactatttccttttcttaagcttaaagagaatttttttttaatctttagctcctcatttaggtagtgaaggcttccctgaaagacagcagtgcccttctctggaagaagaggctgggaccaaaagcctgagtctatgggttgaggattttgagcattcctttgacaagcttctatgtatttttaatataagactcataaatgaacctgatgtggtgttcatgacccatcccttaagcatgcttgctttttttactttactttttgagtatagtacttgtcttgtttttcctggagccatgctaggatttaattcctatgtgccactacccgcccatgtcctggaagatggccatgcctgcagcaatgctcatgtcttgaggagaagcaatgtgaaaagcatcaggaaagctgaaccttacgttcaagtcagcaaacatttgtgagcattctagtatgcttgcgaccttgacactttttaaaaattatctttttatttgcttcgagtatcaaccgtatagttgactctagtggggcgaagggagcagagatgagagcaaaattcagacttgctgcccctgtgtgtctcagttctcatgtctctctgagaaatgtgttggcccaattccctatctgccactctgagtctcttgagtaaatgtgtgtaaatgagaaaaattatctcaaagatttaacttattatttagatattttcttctttttaaactcaggaataaacctggtttgtagataatataatatggctactagagctataattgagtaggtgactagaagcattttttcaaatatatttcttgtaaagacatctactttgttttaactaggaaaagaaactcctcatattaaaataaacatttccataagcactttctagaagagtgtagcatccatctaccatccatcccagaatgtttgtatcttgctcatagtatttcaaaaatttttatgggtgaaaaaaatgcacttttttatttattggaaaagtgtagagttattgaattaaattctcaagtgggacaatttagtgtaaagggaaacatgggttttggagacaagagcacagggctgtggtccctgttccagcattgactttactatgtgacctcgagcaaatgatttaacttctctgtgcctcagtttctccatatacaaaatggggataatgatactaaccattgcctacctcatagagatgttatggggacaaacgaaataatagagataagcacgaatgctttcaactcttcggaagaaaggtgctatataaattgaagttgtgtttttaatgatccaattattaattatgtttagggtttaaataacaatactgttagtcatgttaagaataagttttgttttgatgcatatttccacttctcttctgtggccagatcttgatcattcaaccagtaatggtacctgaggaactgaaatgggtatttgttttcgtatgtttctgccagtagtatttcaattgaatatccagaaaagactggagtttaacttgtaatatcttatagtttacatgtaataaaacttattcaagctatatataaaagtatgattacatgtaaatagcaggtatgttgtaattaaaggcacttatcaaattgtctttgttcttttttaattgtaataaaagtcagttttacat

SEQ ID NO: 566 - DNA, 1991 bp, Homo sapiens
gtgaaaagagagtcctgccaagggctacgaggcagaaaactgatattattaaagtggtcttctgaacggtgaggacctgaggcacagatgctaaccagcttgctggagatcacacactcatgagtggcagagtggggcttggaaccgggtagcctggctctggagccctcactccatccacacaccatgctgggacccagtcgagtgaccagcagaccggttgtgtgggttaggtggaatggtggatataaaccacacagcccagctcctgacccatgctgggccctcagtgtatgtttaagctcaggctggaaaaggatcactgaaagtcacttggatggtgtctcgtgtgtctgtgatgagcttgctgttgctttctttctccttgacagatgagaaaacagtggcttcaaaggttaaacaacttgtcttcgattgcacagctaacaagagctcactgtccaaagggagtctctctccccggtccacatgctgaggcttgctccagagtgaatgtgtgcactggaaagaacccacacaggccccctgagagctgtcagccttgccaggcttctgtgagatccctgggtccgagtagccaagctgggaggagcaccatttgcccactgactcttgggcaacgctgcagcctgcatcccagccggcagaaggcaggtggtatcacagctgagtttacagccacggaaggaaccactgtaggcttttagtagataatatgttttctctgcttcagatccttattttggttgcttaaaatttctgcagaaaacaaacagcttctgccaaaattggctcacaaaattagcttactagtataatcagttgtatagcaagtatttactgagtagctcttggaaggcagtcaacacaagagggatggatcattcttccagttcatcacacgtgggttggacatgctaacagtccccgatagctatcaggcgagtaaatggatgatcacacaaaggcagaggcatcgcagaaggatgctaactagatgtcatgcgtcaaggatactacagaaggatctctttgctgacaaggagggtacctctaaggttccttcagatgggatggttctctgttcaccgtgatcactactatgcaaaggcctgtgggccatttaggagaaaagcattcagtccaattccacagacacagtgaggatgtaatatgccctaggcatatatgagtggatccaaggaggaaatactcagtcactactgtcaagaactcatgacctgctgcagggtttgccaaactatggcttgtgggccaatctggctcaccacctattttagtaaataatgttttactggaatccagacacgcttgtttgattacatattgtctatggctgctgagcacccactataagggcaaagttaagtagatagagactttatcacccacaaaacctaaaatatttgactggatggccctctacagaaaaagcctgcgaacctgtggtcttgtgggaggacactgctgggcacagttaactctaattcttggctgtagcatcttgaatagggtggcagtccctggctgctgagggggacagctggacggctgcctcccaggggcatttccatgacttgcaggcccagaaactagacttgggcatgaccacagagttcttgatggactgaagatgcccaaaccacagactgacttgtaggctagaaatgaacatgtggggtggaatagtccttttggggactagaataatttctagagagccaccctttctacatgatacggcgcacattcttgagacctgaagtgaagaagttaactttatatcaagttacctaccaattaggctagcgatttctctgtcttttaaaacattcttttaaagtcttgtcatgtttcatctttctagaattcatttttcacatcttcattcactgggattctggaccataatatatgtaaacacacaaaatactaaagattgaaaatac

SEQ ID NO: 567 - DNA, 1997 bp, Homo sapiens
gcttccgggagggcggctcgcaggcaccatgactcctgtgaggatgcagcactccctggcaggtcagacctatgccgtgcccctcatccagccagacctgcggcgagaggaggccgtccagcagatggcggatgccctgcagtacctgcagaaggtctctggagacatcttcagcaggtagagcagagccggagccaggtgcaggccattggagagaaggtctccttggcccaggccaagattgagaagatcaagggcagcaagaaggccatcaaggtgttctccagtgccaagtaccctgctccagagcacctgcaggaatatggctccatcttcacgggcgcccaggaccctggcctgcagagacgcccccgccacaggatccagagcaagcaccgccccctggacgagcgggccctgcagccctcccaggagaagctgaaggaatttcctgtgtgcgtgagcaccaagccggagcccgaggacgatgcagaagagggacttgggggtcttcccagcaacatcagctctgtcagctccttgctgcttttcaacaccaccgagaacctgtatggccagaaggcagggccgaggggtgtgggcgggaggcccggcctggcttagtggggacccagggcatcagacacaggtacagcacataggccaggagccagggggtgactggggtggctcggcttgggaggcctgggaccccacagtgcacgctgtgcccctgatgatgtgggagaggaacatgggctcaggacagcgggtgtcagcttgcctgacccccatgtcgcctctgtaggtagaagaagtatgtcttcctggaccccctggctggtgctgtaacaaagacccatgtgatgctgggggcagagacagaggagaagctgtttgatgcccccttgtccatcagcaagagagagcagctggaacagcaggtcccagagaactacttctatgtgccagacctgggccaggtgcctgagattgatgttccatcctacctgcctgacctgcccggcattgccaacgacctcatgtacattgccgacctgggccccggcattgccccctctgcccctggcaccattccagaactgcccaccttccacactgaggtagccgagcctctcaaggcagacctacaagatggggtactaacaccacccccaccgcccccaccaccacccccagctcctgaggtgctggccagtgcacccccactcccaccctcaaccgcggcccctgtaggccaaggcgccaggcaggacgacagcagcagcagcacgtctccttcagtccagggagctcccagggaagtggtcgacccctccggtggctgggccactctgctagagtccatccgccaagctgggggcatcggcaaggccaagctgcgcagcatgaaggagcgaaagctggagaagaagaagcagaaggagcaggagcaagtgagagccacgagccaaggtgggcacttgatgtcggatctcttcaacaagctggtcatgaggcgcaagggcatctctgggaaaggacctggggctggtgaggggcccggaggagcctttgcccgcgtgtcagactccatccctcctgtgcccccaccgcaacagccacaggcagaggaggacgaggacgactgggaatcctagggggctccatgacaccttcccccccagacccagacttgggctgttgctctgacatggacacagccaggacaagctgctcagacctgcttccctgggagggggtgacggaaccagcactgtgtggagaccagcttcaaggagcggaaggctggcttgaggccacacagctggggcggggacttctgtctgcctgtgctccatggggggacggctccacccagcctgcgccactgtgttcttaagaggcttccagagaaaacggcacaccaatcaataaagaactgagcagaaaccaacagtgttcttttaataaaggacctctagctgtgcaggatg

SEQ ID NO: 568 - DNA, 3124 bp, Homo sapiens
ttattgaggttgcatgcccagtgatgtatgcctgtaatcccagctactcaggaagctgaggcaggagaattgcttgaaccgtggaggcagaggcctcagtgagccgagatcacaccaatgcactccagcctgggcaacagagcgagactctgtctcaaaaaaaaaaaaaaaaagggagggaggaaggaaggaaggaaggaaggaaggaaggaaagaaaacagtgttgtcactcacatccccgggccaccctgccctttattttatttcccaccaccctggggaggaagggtgttgccttaaacactgccattctggagttattggtggttcttcctagagtgcaggtcagcaggttgggaggtctagagctttccaggactgtgggacattttgatggcctcgcctctggattctgggccattctcatggccttgcctctctctgctgttgctcattcggtgaatcccgttgctctgggcaaagccaggtcagccacctctttccctcccctgcaggaaggtggaggatctgcagttccgcgtggaggaggagtccatcaccaagggagacctggaggtaacagtcagaggccccttccctgggcacacttagcaccggtgcctggcccttgctagggcagatggttgtgaggtccagcagcacctctaggcccccccggggaaggggctgggggggaaaatggggaaggatcaaaggtctgatgtctgaggtgttagtggctcagccccaggagccccccagggaagctgtgctccccgtgtcagcagctggatggggtgggcaggacgaacccagggcagggcagatggggggctgggccccaggatagagtggctgaggtcctctgtcccttcttcttaggcaatagccctaaaggtgccccttcgttcatcttggattccaggtaaaattttggctgaaagtagcttgctgagtcacagaatttataggtaggaaaactgaggctcagagaccaagggagctgggtatggtggctcacacctataatcccagcacttcaggaagccaaggcagaggatcacttgagcccagaagttcaagaccagcctgggcaacgtagcaagatcccatctctacaaaaaatttaaaaagttagccaagcatggtcatgtgcacctgtggtcccagctactcagggaggctgaggctagaggatcgcttgaatctgggagatggaggctgcagtgagctatgattgcgcctgttttttgttgtgtgtgtgtgtgtgtgtgtgtgtgtgtgtgtgtgtgtgtgtgtgactgtctcaaaaaaaagaatggatgttggggcacaacccagcgtcagagcctcagcccagctcagcatgttctaattaagtttccctcttggccaaggggcaggccatgtggttgctcctggctgacttttccattggcagttgctctcctgcaggggttggatgggcttctgggaaaagcacctgtatttgccaggaacagagacccccctgtgccagctgcagtcaccatgggggcttactgaagggctgtaggaaaggtcacagcctccaagggcaggcatttcaggggactggagccagaaacagcatcgggagctaagcccatccatgtgccccttactcagggtctccttccgatctgtgtctgaggtcaggctcctcctgtctgtttcccactgtgtttctcggctctgctcttctcccagccccgcccactacctaccagctgtcattgagagaggctctgattggtcccagggatagccaatgggctggctggctctggataggggtccaccccggatccagccggccctggctgggagaggcagggggcgggacagacagtgacagctaagtcagtccaaagggctgcagaatccccatgcaacgttttattgtagcaaactgaattgtgatcatattcatggcaaccagaaggcaaaatgaccaaagtcccactcatcccctcatccccacccttttttttcttttttggagacaggatctcactctgttgcccaggctggagtacagtggcaccatctgggctcactgaagcctccacttcctgggctcaagtgatgctttgcctcagcctcccaagtagctgggactacaggcgtgtgccaccacacccagctaatttttgtgtttttttttgtgggggctgggtctcactatgttgcccaggcagggtctcgctatgttgcccaggtgggtctcgaactcctgggttcaagcaatcctgcctcagcctcccaaggggctgggattgcatgcgtgagccatcacatctggcccccacccatcttaaaagtcagaaataaaagccagagcccctccttgacctcctggccccctccgctttatcaccccacctctctgcctgtctttattgcaaaacccccagaaggttatcaggctcatggtcttccctcctgtccacactgccccaactacacaatgagatgcccccattccaactccccagcctcctctgctggcgtctcctccttcctaatctctgaacattgtcccatccaagggctcagtcccaggtccgttcaccccttgtccacactcaccctgagagcttccagtctgtggcctccatgccctggaatgagcccctgtaagatccacagtcttccccaagctccctgtaccatgcccatttgacatctccacccaattgaggaagaaggaagcacctgtatcaatttcctggggctgcaataatgcacagccacaaatgtgtggcttaaaacagcacaaacatatgctttcgcagttctggaagccagaagtctaaaataaaggctgggcgtggtggctcgcgcctgtggtcccaacactttgggaggccaaagcggcggatcacttgaggtcaggagtttgggaccagcctggccaacgtggtgaaacaccgtctctactgaaaatacaaaattagctgggcatggtgacgggcgcctctagtcccagctactccggaggctgaggcaggagaatcgcttgaaattgggaggcggcagttacagtgagccgcgattgcgccactgcgcttcagcctgggcagcagagtgagactccttctc

SEQ ID NO: 569 - DNA, 2440 bp, Homo sapiens
aatacagagagcatggtggagcttctggacttgtatcagttggaggatgaagcctacagcagccttgcagaagctacaaccgaactctatcagtatttactacagccattccgagacatgagagaacttgccatgctacgaagacagcagatcaagatttccatggagaatgattatctgggacctcgaagaattgagagtctacaaaaagaagatgctgattggcagcggaaagctcacatggctgtactgtctattcaagatcttactgtcaagtactttgaaataacagctaaagctcaaaaagctgtgtatgatcgaatgcgagctgatcagaagaaatttggtaaagcatcatgggcagcggctgctgaacggatggaaaaactccagtatgcagtttctaaggaaactttgcagatgatgagagctaaagagatatgcttggaacagcggaaacatgcactaaaggaagagatgcagagtttgcggggtggtacagaagcgatagcacgattggatcagttagaagctgattattatgacctgcaacttcagttgtatgaagtacagtttgaaatcttgaagtgtgaagagttactattgacagcgcaactagaaagcatcaaaagacttatatcagaaaaaagagatgaagtggtatactatgacacttacgaaagcatggaggccatgctggagaaggaagagatggcagcatctgcgtacttacagagagaagagctgcagaaacttcagcagaaagcacgccagctggaagcaagacgtggacgggtttctgccaagaaatcctacctcagaaataaaaaggaaatatgtattgcaaaacacaatgaaaaaatccaacagcgcactcggattgaagatgaatatagaacccatcacacagtacaactaaagagagaaaaattacatgatgaagaagaaagaaaaagtgcctgggttagccaagagagacagagaacactggatagacttcgaacatttaaacagaggtatcctgggcaagtcatacttaaatcaaccagattacgactagctcatgcaagaagaaaaggtgcagcaagtcctgttctccaagaggatcattgtgactctttaccaagtgtgttacaggtagaagagaaaactgaagaggtgggagaaggaagagtcaagcgtgggccatcacagacaacagaaccccagagccttgtgcaacttgaagatacttcattaacacaacttgaagccacctcattacctctcagtggtgttacctctgaactgcctcccactatatctcttccacttttgaataacaacctcgaaccatgttctgttaccataaatccactcccatcccctcttcctccaacaccaccacctcccccacctcctccccctcccccaccaccaccacctctgcctgttgctaaggacagtggcccagagacactggagaaagatctgcctagaaaggaggggaatgagaagaggatcccaaagtcagccagtgccccctcagcacacctctttgacagcagccagctggtcagtgcacggaagaagctcagaaagactgctgaaggtttgcagaggaggagagtgagctcacccatggatgaggtgctagcctccttgaagcgtggtagttttcatctgaaaaaggttgaacagcgaactctgcctccttttcctgatgaagatgatagtaataatatcttggcacaaataaggaaaggggtaaaattgaagaaggtacagaaggatgttttgagagaatccttcacacttctacccgatacagaccctctaacacggagcatccatgaagctcttagaagaattaaagaagcatccccagagtcagaggacgaagaggaggctttaccttgcacagactgggagaactaacaagtgacataacagaagaaaaatatcattcaagattggttctgattcttttggaaaatgacagtttaagcacttggttcctcagttggataacattagatccaaagtgcattggttcagtggtgtgaagaaaggaagcacaattggcaggttatcactttccagtcgttccaatagatgatggttaacatgaattttacatgtgcaatgttcctgactgcaatgaagaaaaggccttctggagatttctgttttttaagcacattctccttccatccacatatttacatccttgtaatggccagttaagctagggcttgctgtaagttggaagaacactgggttgacagagatctactgtgagctgtattgggactgctttgagaaccatctttcaatgcactgaaaagtcatctgaaaaaatagcttcttccatatcagcttatattaaatactgtgacactctgagaaagtttatcatcatgatagctgtaagtcaggcattaaaatcaaatggaaatac

SEQ ID NO: 570 - DNA, 3635 bp, Homo sapiens
gtgcgcgcgcgtctgcgctgcgaggacaaagatgcctcgggccggggaccctggggtcctctccaggcccggcgcgtgccggtgctgggcggtggtccttcggggggcggaggctcaggggaaagcgggtctcccggagccgagcagaccgggagtgctggaggaggtggtcgtgtggcagcatttgcggaattaacaaaagcggtgtgtgtggctgctgtggtgccctacgccccaggtacaaaaggctggttgacaacatcttccctgaggatcccgaggatggtctggtgaagaccaacatggagaagctgaccttctatgccctctcagctccagaaaaacttgatcgtattggcgcctacctctctgagaggctcatccgtgacgtgggtcgccatcgatatgggtacgtgtgcattgctatggaggctttggaccagctgctcatggcctgccactgccagagcatcaacctcttcgtggagagcttcctcaagatggtggccaagctgctggagtcagagaaacccaacctgcagatcctcggcaccaactcgtttgtgaagtttgccaacatcgaggaggacaccccgtcctatcaccggagctatgacttctttgtgtcccgattcagtgaaatgtgccactcgagccatgatgacttagaaatcaagaccaaaattcgaatgtcaggcatcaaaggcctgcaaggggtggtgaggaagacggtgaatgatgaactgcaggccaatatctgggacccacagcacatggataagatcgttccatcactgcttttcaatctacagcatgtagaggaggcagagagccggtctccctcacccctccaagcacctgagaaggagaaagagagccccgcggagctggctgagaggtgtcttcgggagctgctgggccgggctgcctttggcaacatcaaaaacgccatcaagcctgttctcatccatctggataaccattctctttgggaacccaaggtgtttgccatccgttgctttaaaatcatcatgtactcaattcagccgcagcactcacacctgatcatccagcagctcctgggccacctggacgccaacagccgcagcgctgcgacggtgcgcgcgggcatcgtggaagtcttgtcggaagccgcggtcatcgctgccaccggctctgtggggcccacagtactggagatgttcaacacgctgctgaggcagctgcggctcagcatcgactacgcgctgaccgggagctacgacggggcggtcagcctcggcaccaagatcatcaaggagcacgaggagcgcatgttccaggaggccgtcatcaagaccgtgggctcctttgccagcacgctgcccacctaccagcgctccgaggtgatcctcttcatcatgagcaaggtcccgcggccatccctgcaccaggcggtggacacaggcaggacgggggagaataggaaccgtctgacccagattatgctgctaaaatccctcctgcaggtatccacaggtttccagtgcaacaacatgatgtcagccctgcctagcaacttcctggaccgccttctctccaccgccctcatggaggatgcagaaattcgactctttgttctagagattctcatcagtttcattgatcgtcatggcaaccgccacaagttctctaccatcagtaccctcagtgacatctctgtcctgaagctgaaagtggacaagtgctctcgacaggacaccgtcttcatgaagaagcactcccagcagctctacagacacatctacctgagctgcaaggaggaaacaaacgtgcagaaacactacgaggcgctctatggcttgctggccctcatcagcatcgagctggctaacgaggaggtggtggtggacctcatccgtctggtgctggctgttcaggacgtggcccaagtcaatgaggagaacttgcctgtctacaaccgctgtgccctctatgctctgggcgcagcctacctgaacctcatcagtcagctcacaacagtgcctgccttctgccagcacatccatgaggtgatagagaccaggaagaaagaggctccatacatgctccccgaggatgtgtttgtggagaggcccaggctgtctcagaatcttgatggggtggtcattgagctcctcttccgccagagcaagatcagtgaagtcctgggaggcagtggctacaactcggaccggctctgcctgccctacattcctcagctgacagatgaggatcgtttatccaagaggaggagcattggagagaccatctccctgcaggtggaggtagaatcgaggaacagtccggagaaggaggagcgagtgcctgccgaggagatcacctatgagacactgaagaaagccattgtggacagcgtagcagtggaggagcaggagcgtgagcggcggcggcaggtggtggagaagttccagaaggcacccttcgaggagattgctgcacactgcggggcccgggcatcgctgctccagagcaaactcagtcagatctttgaaatcaccatccggcccccaccaagcccatcaggaaccatcactgcagcctacggtcagccgcagaaccactccatccccgtctatgaaatgaagtttcccgatctgtgtgtatactgaattccaagagcctgagctcctcaaggagatggggtctgaggaggggctcacctcacgcccaccccgaccacatggagatctggctgtgatctctgagaaaacatcaccttagatggcagcgcctcccaggctaagccaaggtggagactctctggtccttcttggccctcctacctcctcctcgtcttccctgagggaggtctcaccaatcagcatctcacctgtgccctctttgtcttctcttgtgtcagccaggggcagagaatcatggggtgtctctcaggagaagccgggaggagggggctgagaagctcctacttggtgttttgagtgaagggcatgtcctccccagaggacggagctggatggagacttggttggtgagaggaagctaaggactctactccccctgctccccgcccatgtccctgctgtgtctctcactctcttgctcatctcccagttgtctgttcatgtttctttctgctattaatgaatgctgagcccttataacaggagctggggtggagacatcacgaggggtcgggggacagcaaagggcaggaagcaggatgcagggctggcaggaggtgggcctgtggcatcagcaggcccagcgggcgagtgtggtccctgcagcagcttcccacctcctttgttcataaggagcttgtgttggcctcccacagtcctgtctgctggacgtttttcagagttgggttctctctctttgatgtctttcttctgagggtcccaaggtgttcctggagcttctgggttgaggaaaggcagagcaagataatcttggaggggaactacagggtccccaagatttgcccacatcacctcctatggaaaaggctcccagcctgacctgggttgtaggagagtggggagggtgggatgagtggtgttttggggctcaaggatatcagaagccaactttttggatgttccgtttgaagaaagaaggatctaacacct

SEQ ID NO: 571 - DNA, 2293 bp, Homo sapiens
agcttctgggagagagcaagagaggaccttgggccccgtcctagtgacgacggagaagagggccgctgccgctgcagtggctcgtgggtgagagcaagtgaagaccgccgcagcatcaggggcctggactcaactcctccccagagtcggaggtgttgcgccatgcccggggtggccaattcaggcccctccacttcctctagggagactgcaaacccctgttccaggaagaaggtgcattttggcagcatacatgatgcagtacgagctggagatgtaaagcagctttcagaaatagtgtgtcttcattggctgctctggcatggagctgatatcacacacgtaacaacgagaggttggacagcatctcacatagctgcaatcaggggtcaggatgcttgtgtacaggctcttataatgaatggagcaaatctgacagcccaggatgaccggggatgcactcctttacatcttgctgcaactcatggacattctttcactttacaaataatgctccgaagtggagtggatcccagtgtgactgataagagagaatggagacctgtgcattatgcagcttttcatgggcggcttggctgcttgcaacttcttgttaaatggggttgtggcatagaagatgtggactacaatggaaaccttccagttcacttagcagccatggaaggccaccttcactgtttcaaattcctagtcagtagaatgagcagtgcgacgcaagttttaaaagctttcaatgataatggagaaaatgtactggatttggcccagaggttcttcaagcagaacattttacagtttatccagggggctgagtatgaaggaaaagacctagaggatcaggaaactttagcatttccaggtcatgtggctgcctttaagggtgatttggggatgcttaagaaattagtggaagatggagtaatcaatattaatgagcgtgctgataatggatcaactcctatgcataaagctgctggacaaggccacatagagtgtttgcagtggttaattaaaatgggagcagacagtaatattaccaacaaagcaggggagagacccagtgatgtggcaaagaggtttgcccatttggcagcagtgaagctgttagaggagctacagaaatatgatatagatgacgaaaatgaaattgatgaaaatgatgtgaaatattttataagacatggtgttgagggaagcactgatgccaaggatgatttatgtctgagtgacttggataaaacagatgccagaagaccatcaaagaactgcagggccagctggagtatgaacgactacgtagagaaaaattagaatgtcagcttgatgaatatcgagcagaagttgatcaactcagggaaacactggaaaaaattcaagtcccaaactttgtggctatggttggtgtcctttttaatacatttatttttctcaagaagtatatacaagagtggccaagagtacaagctttgggctggggctctttggacttgaatcctggctatagtctttttttgatttgggctactcatttaacctttttgtgcctcaactataaactggagatgataacttatactttctagagctgatgacaggattaaaggaatacacacacacacacacacacacacacacactctatatgtaactataactttctagatacatacacacatctgtctatctatcttcaaacagcagcctagttcataagtattattgttaacattgtaccatagaaggagaaaatgttttcataagtaatcaatcagaattctaagacagctagaggatatgtatattttaatattctaaataaccaaaataaagtgctttgaatggaatccatattttctttccatagggaagtttcttcatcaatcatcatggatgaattaattctgtttgaggcttgtgtcacctcaaatctgatctattaatattatagaatcttcctggcttctttttattttgcacaaactagtcattggtctctttaataaccactttaaaaatattaaaataataaaacatgtttgttgtatagtgttaaaaacaagatagatgttccttctgacactaagttccactctccagaggaagctattgttaacaatttagtacataccatattagacaaaattctatttatctgcaaacatgtatgtgtatttctatgcatatgcaaatataaccacttcctcagtttctctgggttttggtgtctcaccagtggttgattttccaagaaatataattaactataataatt

SEQ ID NO: 572 - DNA, 1760 bp, Homo sapiens
ttctctgctgtgatccatactcgggggacctttacaaagtgccgtcacctttaacctgtctggctcacactaggactgtcaccactctagctgtctgtatctctcctgaccatgacatctatctagctgctcagcccaggacagacctctgggtgtataaaccagctcagaatagttggcagcaacttgcagatcgcttgctgtgtcgtgagggcatggatgtggcatatctcaatggctatatctacattttgggggggcgagaccctattactggagttaagttgaaggaagtggaatgctacaatgttaagagaaaccagtgggcattggtggctccactgccccattcttttttatcctttgacctaatggtaattcgagactatctctatgctctcaacagtaagcgcatgttctgttatgatcctagccacaatatgtggctgaagtgcgtttctctgaagcgcaatgactttcaggaagcctgcgtcttcaatgaggagatctattgtatctgtgatatcccagtcatgaaggtctacaacccagttagggcagaatggaggcaaatgaataatattcccttggtctcagagaccaacaactacagaattatcaagcatggccaaaaattgttgctcatcacctctcgcaccccacagtggaaaaagaaccgggtgactgtgtatgaatatgatattaggggagaccaatggattaatataggtaccacattaggcctcttgcagtttgattctaactttttttgcctctctgctcgtgtttatccttcctgccttgaacctggtcagagtttcctcactgaagaagaagaaataccaagtgagtctagcactgaatgggacttaggtggattcagtgagccagactctgagtcaggaagttcaagttctctttctgatgatgatttttgggtgcgtgtagcgcctcagtgaaatgcacaggatcaacagggtttgttgtaactagattgaaacactaagttgtttttactgttttggaaaatatcttaaatatcctttttgttcctaaaggagaggaaaagttgattaacttctggtttggtttagaaaaagtaatgtttgaaatacgaaggtaatttaatgttacaaattttaacactcaaatcaaccttttaataattttctgtgctaagggtccagtatttatttgattatttagtatgtttatgtttcatgacactaatttagtcttttgatacattttacattctgtttactgccacaagcactgtggcaataacttttgaattttaatttttataatagaaaaatgattaggaattgctagatagtgttttgaaagcatatctttttcttcagaacaatgtagacttccaaaatggttaacctaaggggtctttacaaaatgtgttataagttaaacataatttgggaagttttacttttgttttcttctatgaagaaaaaaatgcaggctgggcgcggtggctcacgcctgtaatcctagcactttgggaggccgaggcaggtggatcacctgaggtcagttcaagaccagcctggccaacatggtgaaaccccgtctctactaaaaatacaaaaattagctgggcgtggtggcatgcgcctgtaatcccagctacccaggaggctgaggcaggagaattgctgaaacccgggagtcagaggctgcagagagccgagactgggccactgcactccagcctggatgacagagtgagactccgtctc

SEQ ID NO: 573 - DNA, 2117 bp, Homo sapiens
ttcctccatcagcctggctggcagcagccttggactccgcccgtggagccctgggcctgttgacccaccagcttaggagcacccaccaagctctgggtaaggaagctcaccttctggggctcttctgggaaaatagaggtcaacgtggaggtaccaggccaccatgctcagtctcaagctgccccaacttcttcaagtccaccaggtcccccgggtgttctgggaagatggcatcatgtctggctaccgccgccccaccagctcggctttggactgtgtcctcagctccttccagatgaccaacgagacggtcaacatctggactcacttcctgcccacctggtgaggggaggctctgccccaggccgcggccttgagctcagagggggtacccaggcgggcagggaccgtccaggcccacgggctgcagcggcagtcgcgggggtccgcggcggcctgagcacgcgcccgccgcaggtacttcctgtggcggctcctggcgctggcgggcggccccggcttccgtgcggagccgtaccactggccgctgctggtcttcctgctgcccgcctgcctctaccccttcgcgtcgtgctgcgcgcacaccttcagctccatgtcgccccgcatgcgccacatctgctacttcctcgactacggcgcgctcagcctctacagtctgggctgcgccttcccctatgccgcctactccatgccggcctcctggctgcacggccacctgcaccagttctttgtgcctgccgccgcactcaactccttcctgtgcaccggcctctcctgctactcccgtttcctggagctggaaagccctgggctcagtaaggtcctccgcacaggagccttcgcctatccattcctgttcgacaacctcccactcttttatcggctcgggctgtgctggggcaggggccacggctgtgggcaggaggccctgagcaccagccatggctaccatctcttctgcgcgctgctcactggcttcctcttcgcctcccacctgcctgaaaggctggcaccaggacgctttgattacatcggtgagggcacgcctggcccggcccgggaagaggcaggggcagatgccttcccagagcacagaatgaactgggccacagccaccagttattccacatctgtgcagtgctgggcacccacttccagctggaggcagtgctggctgatatgggatcacgcagagcctggctggccacacaggaacctgccctgggcctggcaggcacagtggccacactggtcttggctgcagctgggaacctactcattattgctgctttcacagccaccctgcttcgggcccccagtacatgccctctgctgcagggtggcccactggaggggggtacccaggccaaacaacagtgaggccccatccctgaccctgtcctggagggggcagaggccaggccccagtgctgacgaggagcccagatttgggcctaatcaggtggggacgcatctcagcctggaaccaacaggggctgaggagagagggcacaggagagagggcagagaagaggaggggtgtctagggggactggcagagtgtgagagggaccgtgagggggctcttgatgggagtggaagaagtgctgagggtctgagaggggagatgcatgcgtgtccaggctgaagatgcccctatattctgtcaaaggttggcggggggaggtgttggggtcctttcatctggctccgtttctggtgcttctggaagtctctgctcagcacagggaagaactaacacgactaacctaggcctaccctgaatgcttcttgctaaccaggccgagaggccacacacttgcccccccatccccacaaaccaggtaatgccagtttgccagcagctatttgcctatagagatgagtctgtcctggtcataactgtgtgctcaaggtgtccaggcttttgggggtgggcctatctgggtgcattatggatggtttggtggattgaggtgtggggaggagggtcctaggctagagggggtatccctagttagactttgggaagccaccttcaatgttttctggaacaaggcaggtacaaataaaaaaataaaactttggaaagc

SEQ ID NO: 574 - DNA, 1796 bp, Homo sapiens
cactggagtcagtgcggcgccagctctgcagagcccagacagggtccggttggggaggtcctcaggttctgaatcttgtgcctggagaaccagagaggaccctggagcaggaggagaaagagaagcttgtctcagaagctccacctcctcctggggcaatgcagagtctcaggcctgagcagacacgggggctgctggagcctgagaggaccaaaactctgctgcctcgggagagccgggcctgggagaagcctcctcatcccgcctgcaccaaagactgggaggctgtggaggttggggcctccagccatgacagtgatgagaaagacctgtcttctcaagagactgggctttcccaggagtggagctcggtggaggaagatgacgaatcagagggctcccagggctttgtggagtggtcaaaagctccacaacaaacaaccatagtcttggtagtgtgcgtgctttttttgttcctggttttaacggggatgcctatgatgtttcacatttagctataatggtggctgttgttttaaaagtttaatttaatgaaatagatgccctatgtcatgttaaggaattgtgctagttaaaaatcaggaataggtgttgaatattttcaaatgcctttcaaacatcctttgagatgatttttaaaaaatttttggtgtgagttttcacatactttatttccatgaaatgaagacatcattgattgtaaaacattattttgtataccacggagaaagaaaagtgctgggattacagatgtgagccaccgtgcccagcccagagttcttttatcctctagaaaattcttcattccatagagctttttcatattattagcttaattatgcataatgttttataattaaaaatttctctttattttgttctatcccctgtttcctgtaaactgctgtttgtggtttactcattattagatttgtcaaaggtttatctagcttactattgtttttccaaagaaccaacattaggattcatttatatccattatttcttttatttgtaatttgtttttctttgatatgtattgcatttattttttattgtttttcttctttgtctcagtttttatactgaatacttgatttatattctctttatattttctataatagcatacttattaacgcaaatgtacttctggatatagcgttggccacatcttaacatttgattattcatttttgtttatgttgtctaaaaattacattgtagtgtgtctaaatattacattgtagtgtttctaaagagtgctttgaaactcagtgatttgatttattttttgtttaaaaatagttttgttttcttgttttactgcactgtgaacacagaatgtggcctataacacatctgcttccaaaactttttaaaaagcttttagtgtggcctagaacatgtccattttttgtaattgtttcacgaacatttaagatgaagatatcttctctgtctgtagaactgaaaactttatgtgcctgttagttaactcagtatcgtcaattatattgttcagattcatgtgttatctaattttggcctattatattcattaaaaaccaataaggttatgtgaaactttgttagtacaattgtttttgctaataaatttttataatctttgctttatgtactcaacagctgtgtaattcgaggcatataagtgcagcattgttatgtccttgttaattaaataatatatgtaaaacaccatatgacaatggctggcagatagtaggcactcaataaatgttaattaaaacctg

SEQ ID NO: 575 - DNA, 1559 bp, Homo sapiens
aagaagcaaccagccgcgctatccgctcccgttgctaccggaatgcctcttcaggttagcgattacagctggcagcagacgaagactgcggtctttctgtctctgcccctcaaaggcgtgtgcgtcagagacacggacgtgttctgcacggaaaactatctgaaggtcaactttcctccatttttatttgaggcatttctttatgctcccatagacgatgagagcagcaaagcaaagattgggaatgacaccattgtcttcaccttgtataaaaaagaagcggccatgtgggagaccctttctgtgacgggtgttgacaaagagatgatgcaaagaattagagaaaaatctattttacaagcacaagagagagcaaaagaagctacagaagcaaaagctgcagcaaagcgggaagatcaaaaatacgcactaagtgtcatgatgaagattgaagaagaagagaggaaaaaaatagaagatatgaaagaaaatgaacggataaaagccactaaagcattggaagcctggaaagaatatcaaagaaaagctgaggagcaaaaaaaaattcagagagaagagaaattatgtcaaaaagaaaagcaaattaaagaagaaagaaaaaaaataaaatataagagtcttactagaaatttggcatctagaaatcttgctccaaaagggagaaattcagaaaatatatttactgagaagttaaaggaagacagtattcctgctcctcgctctgttggcagtattaaaatcaactttacccctcgagtattcccaacagctcttcgtgaatcacaagtagcagaagaggaggagtggctacacaaacaagctgaggcacgaagagcaatgaatactgacatagctgaactttgcgatttaaaagaagaagaaaagaacccagaatggttgaaggataaaggaaacaaattgtttgcaacggaaaactatttggcagctatcaatgcatataatttagccataagactaaataataagatgccactattgtatttgaaccgggctgcttgccacctaaaactaaaaaacttacacaaggctattgaagattcttctaaggcctacaggattatgaagcggcacttaagattgatccatccaacaaaattgtacaaattgatgctgagaagattcggaatgtaattcaaggaacagaactaaaatcttaatgactattagaagtaactaagtattgttataagttttttaaaaacaactggaggcatctttgtacatattatggccagttgtacagaatcgctttctgtttagtactttagttctgttgagggcaaaatattataaatctatagaaaataaactgtttgacttgaatcatttctgaataagtaaatctaaataagaatctattttaattccttatttcttcatattaatacatatgtatacttttttgtgttactgaattaagcttgcccttgtaacaaaatatgttttggtatagttaccaggacacttactgattaatttttaacaaggtagaattttaaaataaaagatttataaat

SEQ ID NO: 576 - DNA, 2046 bp, Homo sapiens
atatgacactctaaaattgatcacaaaattagaattaaaacactcctcagcaaatgcaaaataactgaaatcataacaatctctcagaccacagtgcaatcaaattagaactcaagattaagaaactcactcaaaaccacacaactacatggatattgaacaacgtgctcctgagtgacttctgggtaaataataaaattaaggcagaaatcaagaagctctttgaaaccaatgagaacaaagagacaatgtaccagaatctctgggaggcaactaaagcagtgttaagaggtaaatttatagcactaaatgcccacatcataaagctagacatatctcaaattgacaccctaacatcacaactaaaagaactagagaagcaagagcaaacaaatccaaaggttagcagaagagaaaaaaaaaaatgactaagatcaaagtggaactgaaggagacagagacatgaaaaacccttcaaaaaaaaagaaagaaataaaacatgttcaaatagcaagagataaaatcaaattgtctgtgtttgcagaaaacgtgattctatatctagaaaaccacatcgtcacagcccaaaaactcctgaagctgataagcaagttcagcaaagtctgaagatacaaaatcaatgtgcaaaaatcacaagcattcttatacaccagcaatagacaatattcttcaattcctatacaccaacaataggcaagagagccaaatcatgaatgaactcccattcacaattgttacaaagagaataaaatacctaggaatacagctaacgatgggtgtgaagaacctcttcaaggagaactacaagccactgctcaaggaaataagagaggatacaaacaaatggaaaaatattccatgctcatgggtgggaagaatcaatctcatgaaaatggccatactgcccaaggtaatttatagattcagtgctattcacatcaaactaccattgacattcttcacataattaaaaaaaaactactttaagtttcatatgcaaccaaaaaagagactgaatagtcgagacaatcctaagccaaaagaacaaagctggaggcatcatgctatatgacttcaaactatactacaaggccacactaatcaaaacagcatggtactgttaccaaaacagacacacagaccaatggagcagaatagagatctcagaaataagaccacacatctacaaccatctgatctttgacaaacctgacaaaaacaagcaatgggggaaggaatacctatttatttatttatttatttattttgagacaaagtctcactctgtcaccaggctggagtgcagcggcatgatctcagctcactgcaacctctgcctcccggattcaagtgattctcctgcctcagcctcctgagtagctgggactacaggttcgagccaccacgcccagctagtttttgtatttttagaagagacggggtttcaccatgttggccaggatggtcttgatctcttgacctcaagatccacctgcatcagcctcccaaagtgctgagattatagacatgagccactgcacttggccaggattccctatttaaatggtgctgggaaaactgactagccatatgcagaaaactgaaactggacctcatccttacatcttatgcaaaaattaactcaagatggattaaaaacttaaatgtgaaaccccgaactgtaaaaaaccctagaagaaaatctaggaagttccattcaggacataggcatgagcaaagattttacgatgaaatcatcaatagcaattgcaacaaaagcaaaaattgataaatgggatctaattaaacgtaagcacttctgcacagggaaagaaactatcatcagagtgaacaagcaacctacagaatgggagaatatttttgcaatctaccaatctgacaaaggtctaatatccagaatctacaaggaacttaaacaaatttacaagaaaataacaaccccatcaaaacatgggcaaaggtcacgaacagacattctgaaaagaagacatttatgcgtccgac

SEQ ID NO: 577 - DNA, 2307 bp, Homo sapiens
agattccagccatatctgcaagatagaatgaagagggcttagtgatttattggatatgaaagatgaggaagaatctaaaggcaaatgagataatagttgtgccattaaaaagagtctattaagaattcagaaataccagagcttttttaagacgggggttgagaggtggttatggagctacagctttaaatatgaagcgtgatcctttacacgtgaaaatcaaaggagaagaatttcctctgactctgggtcgggatgtctctggcgtggtgatggaatgtgggcttgatgtgaaatacttcaagcctggagatgaggtctgggctgcagttcctccttggaaacaaggcactctttcagagtttgttgtagtcagtgggagtgaggtctctcacaaacccaaatcactcactcatactcaagctgcctctttgccatatgtggctctcacagcctggtctgctataaacaaagttggtggcctgaatgacaagaattgcacaggaaaacgtgttctaatcttaggcgcttcaggcggagttggtacttttgctatacaggtaatgaaagcatgggatgctcatgtgacagcagtttgctcccaagatgccagtgaacttgtaaggaagcttggtgcagacgatgtaattgattacaaatctggaagtgtggaagagcagttgaaatccttaaaaccatttgattttatccttgataatgttggcggatccactgaaacatgggctccagattttctcaagaaatggtcaggagccacctatgtgactttggtgactcctttcctcctgaacatggaccgattgggcatagcagatggcatgttgcagacaggagtcactgtaggttcaaaggcattaaagcatttctggaaaggagtccattatcgctgggcatttttcatggccagtggcccatgtttagatgacattgcagaactggtggatgcgggaaagatccggccagttattgaacaaacctttcctttttctaaagttccagaagccttcctgaaggtggaaagaggacacgcacgaggaaagactgtaattaatgttgtttaaataaaaatgcagtttagtgattgttgacgttcttatttggtgagtgcctgtgagcccaaatttttttctagccatccctttcaaacatttttccagattagattatacattccatgatacaagctttaaaaaataaacacaccattttggccagtaattgatataaaaatatcagcacttggatttgtctgtagtcagtagaaattcgaagttttttcaagctgttccttcacactggctttgcaggttgttgtggcaccttctgttttactagcttaaactactttattgtcttttttgttttagagacagggtctcgctgtgtcacccaggctggagtgcagtggcacaatcacagctcactgcagccttgaccttaagcgattctcctgcttcagcctctcaagtaggtaggactacaggtatgcatcaccacacccagctagtttctttgtatttttagtagagacagttttgccatgttgcccaggctggtctcaaactcctgggcttaagtgatccaccatgtcagtctcccaaagttctgggattacaggcgtgaaccaccctgctgggcctgatcgtcttaatgtacaatactaaaactttcagtgtatagatggatgttggcatgaagagataatttaaagctggttccttcttgaattcatcactgagcagctttctaactgccaaggtttccttttttgttcctccaccataatgtggtcaccacagctcttaaagttctaaatctcttagtgtcatatataaaaatctgcctggtgattcatttgtttatgctcttaatattgaaaggtgagagcagagtttctaactttttaaaacccttacatcttgcataaggattaggcctgtttcggcaattgaaacatgcttctctgagggcttttccatggaaattgcagccttccaatggagcccaaagcttgccactttgatgtcaaatgtttacatttagatatctctccaatcaacccattgcagtgtgcacttcgaatattcatttacggtaagtgtttttacttcctaatatactcatcctcagtattgcacctgatatgcttgcttgtaacttttgatgtagacctgttttgagatttctgcttggtttattcctgttagacactcgtttggtagcatgtatgttagatgtaggcttttctctaaaattgttggtctggtcttactaccgagttattgc

SEQ ID NO: 578 - DNA, 2777 bp, Homo sapiens
acaagggagcctccccgactgtggccatggagtttgggaggctgtggcgtgctgggtgtcggcatctggctggccgccacacaggggagcttcgccacgctgtcctcttccttcccgtccctgtcggctgccaacctgctcatcatcaccggcgcctttgtcatggccatcggcttcgtgggctgcctgggtgccatcaaggagaacaagtgcctcctgctcactgtgagtgccggggcccaagcgatgctccgggtgggaccacgcagggtggggctccggtggcccccaggccttggctgccgcagtgaccccccagacgtgggcaccacctctggggccggacctccaggctggcagtgtggcccggggccctggccactgttgggtcttccaggccacactggggctggggggtgatttgcagagcggtgtgggggtcactcaagagaacgtgctgtaccttgtcaggggcctcccctgacgggacactggccctggtgagtgcaggcgcagccccgcacacacgtacacacgcatgcgcagcctttcacgggcttgcggtctccgtgactcattcctgaccaccccacccccactgtggccccttccccagcttcttgttgggggcctggtctctcagctccctgggaccggctgctgggacgatcccagcccccacctcgcctcggggatggacttacaggcagggatatgtttatcctccttagaaatgttaatcacagataattaaaaaggaaaagggctcctagatggaaacacaggcttgctactgattaacatgcctggccgaggccgtgggccctgcggagggtgtgcagcctgctgaggtcctaaatcacgaggcttccgatcactcctttgtctgggaagccctggatgggttggggcctcccttaggtcgcctcagccagtccactcccctccgtaccccttcctgggggcaagccccaagtctatcagcctccctggcatcaggttggggcccagagacccctggaggcagtcggtgggggtctgtggcagccctactggggcttggagctcctcagttgaggaagctgctgtgtgtgggccccaccaggcctgcagggaccgaagcccaaccccctttcccatgggtgacttgggaccagaaccctgggtacctcctgggggtgaaggactcctgtgtccttagcccagcaccctgtctgccccactcacgcccactctgcctgggccccccagctcctggacacatgctgtccatgcctgccctcctcttttgtgggtgtcactgacccccgcatggaggagcagcagggctggggtcaggctgagctttggggctgccgccaggcgggggaagcttgcatggtcagaggtggggcttgcagcctgtggtcttgctggagggggcatcagccacgctggctgccctgaggactgtgacgtgtgggcagaaggggcctctgcagcccagctgtggcccctgctgggacatcttcccaccatgaagacaggcacccagcgaggcacctgccagacactcagaggcccctggatggaggtgtcctgaaggcagctgacaggggctggggcctcaggaacagggatttgtgcccacttgggggtgtctgggttgccccagggatgggggcaggggaggggagcccaggccagcccagggccccacactcaggggctgagcaggacacaacagccacagtccctggacctggggccaagggttctgaggtgggggcggcgttctgggctctctgggagtgggggcctggcagaggtttcctggcagcaccaggtatccatgagttcttcctgctgctgctgctggtgttcctgctggaggccaccatcgccatcctcttcttcgcctacacggacaagattgacaggtatgcccagcaagacctgaagaaaggcttgcacctgtacggcacgcagggcaacgtgggcctcaccaacgcctggagcatcatccagaccgacttccgctgctgtggcgtctccaactacactgactggttcgaggtgtacaacgccacgcgggtacctgactcctgctgcttggagttcagtgagagctgtgggctgcacgcccccggcacctggtggaaggcgccgtgctacgagacggtgaaggtgtggcttcaggagaacctgctggctgtgggcatctttgggctgtgcacggcgctggtgcagatcctgggcctgaccttcgccatgaccatgtactgccaagtggtcaaggcagacacctactgcgcgtaggccgcccaccgcccgcttctctgctaaaaggacgcccacggggagatggccgcacccacagctgcctttcccaccaccagcctcggtgctctgccccatgctgggaggagggagggagggacaggtgcctggagcccccggaaccctgtttctggaaggccctggctcaggtggcttcagggcctccggaccccccctgggaggggtggccacgtgctggctgcggaacccagggcaggggtgggaggggcctccagcactttttatatttacgtattctccaaagcagtgttcacacgggagccagcctgtggcccccagcctcctggaaaacaggttggcgctggaggagccgggtcttggcatcctggaggtggccccactggtcctggtgctccaggcggggccgtggacccctcacctacattccatagtgagcccgtggggctcctggtgcatcttaataaagtgtgagcagc

SEQ ID NO: 579 - DNA, 1923 bp, Homo sapiens
tacacacactaccaagtgcccctgagcgagagggctcggcccatggcctgcctgggatgtcttccgcagggtgagtgggactgctgtgggtgacttggcaggtgagggtcttcagaacaacccccagccctggcaggtgcctggcctgggtggtgggtaagctgggtggccctccagtctaagcaggggcatgccaggtgggactagggggctggctctgccaggccctgtggtccccctcacatctttccctgtcccctaccctgacttccgcacccaaccaggtttcatgcctgttctggccccagagaaaagggtgctgccacccccacttgctgtgtcccacccggggccaagggaagcaccgcctgcctttcctgactttgttgattctccaaggaatgttatggactctggcaccgagcccccgccaggctccagccctgggtgtggcagccagctgggtcacgggggacatgcttggtgcctgaggtgtggaggctgcctgctggctaaaggattagggtgggagggtctttgggacccctcgccattgtgtgtcctctcctagagcctcacagccccggccacctggaaacgctctttctctactccctgctcggccttggccacagctgctggctgtagcagttccctgcatgactcgcattcctgtggagccctgtgtgcacctcccgagtgcgagccgcctatttccccctggctggcccaccttccaccctctccacccatgaaccctgtacgcacacacacacactcacacgcacacactcacacacattcactcacactcatacacacacactgtctcacgcacacacacactccccacctatgcatacaccccacacacaccctgccctgcctgcatgccacccctccgggacacgcccggacagaactcccaccctccctgccagctgccctggcgcctgtctccactgcacagcctctatatccatccctgcctgggggcgacctgcactatcttcagcacacagggcttgtcctctctgagctcagtggtgcacctgtgaaaagggtgggatttggggccccttccagctctgacatgaggtagtttctggtccctggtcttggctacccttacagaactgctcaggccccagaccatccacgccccaaaccgcccgggctgcaggtggaagttgagaaactgggcctgccctttcctcagcacgcctgacccctctctgaggctgagataagcgggcagcttgggaaggtgtctgagccccagctgacaacactgaattgggcgggaggtgccgctgtcctggtctggggaaggtaccccctggaggccacgggactaaggggacagatggatcagaacacgtgggtgcctctttccacccggggcactaactcacttccccagagccctgcctcagtttccttctttgtgatcatttactgagcacccactatgggccaggcctaaaccaggctccatgtgcttgtgcctgttgtggccacacacagccctttggggtcagactcccccaacttccaccacatttcagccccaccgggtgccgacctggctgtctgcttctttaacagcatttttgagatattcattcacataccttataatttatccattgaaagtacacagtgcggagcactttgggaggcagaggctgttgaatcacttgaggccaggagtttgagaccagcctgggcatcatggtgtgaccccaactctacaaaaaaatttaaaaattattcaggcctggtagtgcaagtctgtagtcccagctcctcgggaggctgaggtaggtggattgtttgagcccaagagtttgaggctgctgcagtgagccattattgtgccactgcaccccagcctggctacagagcaagaccctgtctcag

SEQ ID NO: 580 - DNA, 2780 bp, Homo sapiens
tgttttaattgatgctcattcacctcattgatgaaagagggattcccacactagagttctgggaatggcagaatgcatgacacctgacactggacagatgagattcacagcagttcatgagtctcatatacttacagcccaggggaggaagatactgtataccatacagggccacgtggggattgtaatcaagaacagaatgaacagcaaggggctgtgtgaggtgggctttgtagtatccaggggttgaggtgccccctggttactataggaggatgtgattggcttgttaggaaaattccatgggctggcagggaaccaaaactccttagggataaagagattatgccttggacccttgatgaaaagtatttaattatttattattaagttttaaggtacatgtgcacaacgtgcaggtttgttacataggtatacgtgtgccatgttggtgctgcacccattaactcgtcatttagcattaggtatatctcctaatgctgtccttccccccgtcccccgaccccacaacagtccctggtgtgtgatgttccccttcccgtgtccatgtgttctcattgttcaattcccacctatgagtgagaacatacggtgtttggttttttgtccttgtgatagtttgctgagaatgatagtttccagcttcatccatgtccctacaaaggacatgaactcatcattttttatggctgcatactattccatggtatatatgtgccacattttcttaatccaatctatcgttggttggttccatgtctttgctattgtgaatagtgccggaataaacatacgtgtgcatgtgtctttatagaagcatgatttataatcctttgggtatatacccagtaatgggatggctgggtcaaatggtatttctggttctagatccctgaggaatcgccacaccgacttccacaatggttgaactagtttccagtcccaccaacagtgtaaaagtgttcctatttctccacatcctctccagcacctgttgtttcctgactttttaatgattgccattctaactggtgtgaggtggtatctcattgtggttttgatttgcatttctctgatggctagtgatgatgagcattttttcatgtgttttttggctgcataaatgtcgtcttttgagaagtgtctgttcatatcctttgcccactttttgatgggtttttttttttttgtaaatttgagttcattgtagattctggatattagccctttgtcagatgagtagattgcaaaaatttcctcccattctgtaggttgcctgttcactctgatggtggtttcttttgctgtgcagaagctctttagttgaattagatcccatttgtcaattttggcttttgttgccgttgcttttggtgttttagacatgaagtccttgcccatgcctatgtcctgaatggtattgcctaggttttcttctagggtttttatggttttaggtctaacatttaagtctttaatccatcttgaattaatttttgtataaggtgtaaggaagggatccagtttcagctttctacatatggctagccagttttcccagcaccatttattaaatagggtatcctttccccattgcttgtttttctcaggtttgtcaaagattagatagttgtagatatatgtggcattatttctgagggctctgttctgttccattggtctatatctgttttggtaccagtaccatgctgttttggttactgtagccttgtagtatagtttgaagtcaggtagcatgatgcctccagctttgttcttttggcttaggattgacttggcaatgcaggctcttctttggttccatatgaactttaaagtagttttttccaagtctgtgaagaaagtcattggtagcctgatggggatggcattgaatctataaattaccttgggcagtatggccattttaatgatattgattttcctacccatgagcatggaatgttcttccatttgtttgtatcctcttttatttcattgagcagtggtttgtagctctccttgaagaggtccttcacatcccttgtaagctgggttcctaggtattttattctctttgaagcaactgtgaatgagagttcactcatgatttggctgtttgtctgttattggtgtataagaatgcttgtgatttttgcacattgattttgtataaaaaggatttttaaagctaggagaccttatctacgggagcagagttgggaggggagcttactattaggctatttgaagtattcccagttttgacagatgtcaaggcagtgcataatactgggccttaattttaggccttacatcacagtatgtaaattgtaaactctctttttagacatctgttttatgtgctagtgtttgcatatttttcagataagttaggaaaactgcagatctgaggttcctacctgaaacttctaactctagtcctctgaaaatgttaaccaagaattccctactattaggctgggcacagtggctcctgcatataatcccagcatcttgggaggccgaggcaagaggatcacttgaggccaggagttcaagactagcctaggcaatataggaagaccctgcctctaaaaaattaaaaattagccaggtatggtggcctgtacctgtagtcccagctactcaggaggctgaggtaggaggatcacttgagcccaggaatttgaggctgtagtgagctatgattgtaccactgcactccagcctgggtaacacagccagaccctgtctcc

SEQ ID NO: 581 - DNA, 3188 bp, Homo sapiens
tgtgactcatgtttccctagtggcattgtgttttgacagaattgctacacaggttcgcatgaacagaggtgtggttgaagagacttcaaacaatgcagaacctggtagaacatcaaattttgataggtatgttcatgccacaaagatgcagcctcagtcatctggatctctcagatcaaatgctggagcagaaaaaggcaaagaaattgcagctaagttaaacattcatcgagttcatgggcaacttaggggtcttgatacaacagacattgggacctgtgcaatcactgctattccttttgagaagtccaaagttttatttactcttgaagagttggatgaatttacttttgtggatgaaactgatcagcaagctgttccagatgtaactcgaataggtcccagccaagaaaaatggggatggataatgtttgaatgtggacttgaaaatttaaccataaaaggaggaagacagtctggtgctgttttatataacagttttggaattatgggtaaagctagtgacacagaaaggggtggagtgctgacatccaataattcttctgattctccaaccggcagtggctataatactgatgtctctgatgataatcttccatgtgaccggacaagcccttcctcagacttaaatggaaattctgtttcagatgaacaggatgaaggagtcgaatctgatgatttgaaaaaagatctacctctgatgcctcctcctccagattcatgtagcatgaagttgaccattaaagaaatttggtttagttttgcagctcccaccaatgtgagatctcacacacatgcattttctaggcagctgaaccttttaagcactgcaacaccagctgttggtgcatggcttgttcccattgaccaactcaagtcatctttaaacaaattggaaactgagggaaccttgagaatttgtgctgttatgggatgcataatgacagaagcattagagaataaaagtgtacattttcccctaagaagtaaatacaacaggcttacaaaagttgctcgctttctccaagaaaatccttcatgtttactatgtaatatactacaccactatctgcaccaggcaaattactccatcattgatgatgctacaatgagcgatggacttcctgctttggtaactttgaagaaaggtttagttgcactggcaaggcagtggatgaagtttattgtggtgacaccagcctttaaaggagttagcttacatagaccagctcagcctctgaaacctcaaatagctatggaccatgaacatgaagatggacttggattggacaatgggggtggtcttcaaagtgataccagtgctgatggagcagaatttgagttcgatgcagccacagtcagtgaacacacaatgctattagaaggaacagctaaccggcctccacctggtagctctggacctgtaactggagctgagataatgaggaaactttctaaaactcatacccatagtgactctgcattaaaaataaagggcattcacccatatcattctctgagctataccagtggagacactgccactgattctccagtgcatgttggacgtgctgggatgccagtaaaggacagtccaaggaaggagagcctactcagctacctgactggaagcttcccaagcctgcacaacctcctggaaggtactcctcagagaagcagtgctgctgtgaaaagtagctccctaacgagaacaggaaatacagtagccactgatatgttatctgaacatcccttgctatctgagccatcatctgtgagtttctataattggatgtcaaatgctgtgggtaatcgaggaagtgtgttacaagaatctcctgttacaaaatcaggacacaatagtcttcccacaggtgttgcacccaatcttccaacaataccctcagcctcagatttcaacactgtcttgtctagtgaccaaaatactttggatgggacacattctcagcatagcaccagtcaggatgatgtggcaggtgtagaagaagcaaaccaagggtttcctgctgttcagcttgctgatgcacaggttgttttcaagcctcttctgagtcatacagggatccagtcacaggatacaatgccattctgctaccgaatgtactttggagaacacctttcattttcagggactttggactgcctcagagcagatattgtggattcagacacagccaaagagagaaaaggcaaaagagcaagaaggcaaggccatgtgaatcttcctccacttgagttcaaaccagcattaatgttgggaacctttagcatcagtgctgttgtaatggaaaagtccgtgtgcacccctcagaactctaccagtgccctttcttttcatgatctcagcaagcggtattataacacctttcactgcaactttactatttcctgtcagtcaataagccagcatgtagatatggctttggttcgtcttattcatcagtttagcacaatgatagatgacatcaaagcaactcagactgatattaaacttagcagatatacagccggatctgcttccccaacacctaccttcaaaaccagaaaacatcgggactttcgttcatctgactttagccgcagttctagaggaagtcttaatggtggcaatagagtaaataatgcaaagaacaaacggaccaacaatgagaataacaaaaaggaatctcgaaacaagaattcattaggaagatctgaaagaagaacatcaaaagtgtctaggaaaggttcaaaagatgtggtggatcacatgactattcatatggatgactctgattcaattacagtgtcagaacaaagtgagccttcagctgagtgctggcagaatatgtataaattgcttaacttctattcacttatctccgatccaacaggaatattggaaaagtcttcagaaacatttggaccagcaggagttcggagccctacagagccaacatgtaaagttgtgtttgagaatgaacaagacaacagcagtttgactaagactcagaggaaacgtagcttggtaacttctgaacctcagcatgttactctaatagtgtttgggattggcatggtgaaccgcacacacctagaggcagatattggtggactaacaatggaatcagaactgaagaggatccatggcagttttactcttaagg

SEQ ID NO: 582 - DNA, 2890 bp, Homo sapiens
ttggaattacttgaacaaattgaacagcagaaattaagattagaaactgactgcttcagggctcagctggaagaagaaaaaagaaaaaaaactcaaccgactggggtaggatgcagaaaatctcatcactacataaatcatttggttggcattgctccagcatcatgccctgtaatttctgatgaagatagtcataggcagatgattcgtaactatcaacatcagcttttacaacaaaacaggttacacaggcagtctgttgaaacagccaggaaacaattacttgaatatcaaactatgttaaaaggaaggtgcccatcggtgtcagctccatcattgataactgattctgttatatcagtgccatcatggaaatctgagagaccgactgctatatcagagcattgggatcaagataagtaagcccacagttgaaaatgatttaaaaacccagaagatggggcagctcagagactggtttcctaatacacaagacctagcaggaaatgatcaagaaaatattaggcatgcagataggaacaactctgatgataatcatttggcttcagaagatactagtgccaagcaaagtggtaaaccaggtatttatgaagacagagaccccctgcgagtctcaataagccgagaacaaagtttccttgggagcccactggcccatgatccgtttagttgtcttcaactggttggccaagagaatgtctgtggtgatgactatgatgaagcagttaagctgaaggaatctgttgttgaaaatcatgcagtgttaagttatgctgtggaggaagaacatgcatatttgggtccaactgtgaagccagatgataaggctaaaacactgtcttatgaaccattatcttcagcaactgtttccactgggagccttttaagttatgaaaacacagatttgagccttacagatccagagtcattttcagagcacatggatgatagcaagcaagaatctaccaccagtaaagaagaggaaacaaatattataagttccatagttccttcaacacaagatatttatcagcggcagaactcttcagacgttcataaatctctgttgcctgcagtggatgaaactacatgtggtcacacacactttcagcaaatgatagacaagtacattaatgaagcaaatttgatacctgaaaaaacagatttgcaagaattggaacacatttttcctaatttgcatcatcagctgtttaaacccttagaaccacatccagattttgacttatcatcatcatcctctgggatttctccagacaacagagacttttaccagagatcagattcttcatctgaaagccactgtgctactggattatccaaaagtacagtttatttcacagcactgaggaggaccagcatgcattcttctcttaacacaagtccgaatcaacaacctgacactaacttggctcatgttggagctcacagttttgctacagaaaatattattgggggatctgaacaatgttttgaacagcttcagccagaatattcttcacaggaggagagccagcatgctgatctaccaagtatttttagcattgaagcaagagattcttcccaaggcatgaaaaatcagaactatccctctgaagaacatactgaaatattacaaaacaagaaaaaaattgttcatttccagctttctataggaaacttaagttcagtctacagttcatctgatgaagctaatgtatttgatcagttaaatgtacagcatagcactccatgtggttctaactctagtgagtgctcaacaaaacaccaactagaaagcagaaaggaaagtatgggctttgaagaactatcaaaaagaggggttgttacaatgttacaaagtcaaggactcattgaagataataaaaatgaaacctgtagggttttagacataaatccacaggtagaggaaactgactctcgattatgtgtaagaacagtggagatgggaacttcaattcaggcaccatattccttaactactcaaaatgaaaaatattttgagaattcagctgaaacagacattccaaaaatcaccaaaaaactatctcaactaggagaatcagagctttttgcaagttctggatcattttcattacagagctctataccagtctgggaaacagaaactggccatggtataatggaagaaccagaacttactttaataagcaccactgataccagtattgctgaaatggattttgcaaatttaaccctagaagagaagagcgagaatgaagcaaaatgcttctttcaggtgagtgtgtttctgcctcttgtatcagcaacagaagcctcagattatccagctgtatcagaactttccatagaaaaaccaaggacagcatctacagaaacccctcgcaggcttacacctgtaccagggagcttacaagaagcatttataaagaggaaaaaatcatttatggagagatcccaccagaggcagaaagaaataaggaataaaattcatgtctctgaaaattctcaaatcaaaacagttaaagagaaaccatctataagttcatctgtgagtcgtctaaagggcgtgaataaagtcagagcatcttttcctgaagacagaaagactacacaggctctaaggcaccaaaggggtctaaggttatacaatcaactagctgaagtgaaacaacaaaaggaagaaaaaacaaaacaagaagcttatgcccaaaacagagcaagggcaaaagaattccataagaaaacactagagaaacttcgagccaaaaatacatgctgactttctagaaatagtgtaaaggttttttaattgtgtatatgtagcattagacaaaattatttaaagtcaataaattgttattcgagg

SEQ ID NO: 583 - DNA, 2975 bp, Homo sapiens
attttgtgatgagacctttatagtttggcaggctcttggcaggatgaagatgaagctgttttctctccatctggccaggtctacaactcgaacaaagacagccagagtgaagggagtaagtacgatgcttgggtaaccttctacagccagggttgggagtaggctttgagaagttgctactccaggtgtgaaccaccaggcggtgctgtgggcgtgttgggttggctccagttcccgagtgcagtgggacatgcctccaccccaactttccgccagtgactccagagggacgctgcgcagttggacagcattggcttcagcataatcaggaaatgcatccatgctgtggaaaccagagggatcaacgagcaagggctgtatcgaattgtgggtgtcaactccagagtgcagaagttgctgagtgtcctgatggaccccaagactgcttctgagacagaaacagatatctgtgctgaatgggagataaagaccatcactagtgctctgaagacctacctaagaatgcttccaggaccactcatgatgtaccagtttcaaagaagtttcatcaaagcagcaaaactggagaaccaggagtctcgggtctctgaaatccacagccttgttcatcggctcccagagaaaaatcggcagatgttacagctgctcatgaaccacttggcaaatgttgctaacaaccacaagcagaatttgatgacggtggcaaaccttggtgtggtgtttggacccactctgctgaggcctcaggaagaaacagtagcagccatcatggacatcaaatttcagaacattgtcattgagatcctaatagaaaaccacgaaaagatatttaacaccgtgcccgatatgcctctcaccaatgcccagctgcacctgtctcggaagaagagcagtgactccaagcccccgtcctgcagcgagaggcccctgacgctcttccacaccgttcagtcaacagagaaacaggaacaaaggaacagcatcatcaactccagtttggaatctgtctcatcaaatccaaacagcatccttaattccagcagcagcttacagcccaacatgaactccagtgacccagacctggctgtggtcaaacccacccggcccaactcactccccccgaatccaagcccaacttcacccctctcgccatcttggcccatgttctcggcgccatccagccctatgcccacctcatccacgtccagcgactcatccctgagaattacgtggagttcctctaaccgtgggccccagcagaactgctgagctttacatggtatccatgacaactgctgattccagtgtcgaggccatttctctttgccactgagaaatgcagcgtgactgactctgttgctacctgtcaacatgaatgtttctgtgagctctggtgtcactcatctccatgatcatctcagccaacatgcatcagtactgcaagaaaagaagtcaatcagcagaggagagcatttgataactaagaggaagacttgcaaagccgttttctcatgagtaccctgaatagggggcactcattttgtttcaacggtccaaacgcccaaccttcagaaagaggaagtcagatagaaatagtccctgagagcacactgtgtagctaagcctgctggggctgggtgaagaaattggcgctgagatccaggctggatccattgcttttgtttacaataggcactctctctaccccacctctcagtacttgagacttaaagtgctacaggcagctggatctgtttgcatgcaggatgaagagggttaaaacactgtttatataagatccaatctctcaccatctctaaagcagccgttggcctgtcatcagtgagatacaatccagtcttctcatgcacgggaacacacacaccctgcgtttctccctcccaggctaggaacctctctgccaccaagggctgccatccatcgcctagtaaccacggcaacccaacctactctaaaaccaaaccaaaaaaataaaataacacatcctctttgcatgacacattttttttctcccctttttggtacactttttttgaatggttttctaacaacttgaagcacaggatcaaggaattagggtggtctacttgaggcagatgggatagtagctgggaactgttccctttctgattaatttcagcagcatcggaatatatttggagcacaccctagtaacctcttgagattaaattacatagtcttaatatttctgttcctccatgcaactgatgtttgttttttaaagggtaagatgctgcctcccaatgggtgatgccatctgactggtttccccatgtcctcccattcacccatctctgctcccacccttgcctgcctctaacccaccactggccagcccccttgccctactctgggctgctgaacactggtgctgtggtggttttcaaggttaattcctaggctaaccgtatggcctatagtttaaaagcacatctatgttcactgccactctgaaaaagggaattatttctcagtctttcaaggcttgagactaatataggccattgtgattcaggaagaaacccaaggttggagggtgggatgagtaccctctgaaaaagggaatttgctggtgaaaagaggctggatcttgtggaagactgtcttggatggggaagtactacctggagatttcaaattcacttggcctgcaaacaacagagttatccgtatcttccacatgtgaatgtcattgcaagggtgactctagacaaactacaaaccgatggaccgtcaagctccccaggagccccttggatggcagcgttgcttcagagtgtttcctgtttctggaattccttgttagggaactttaaagaagaaaagaaaaacttgaattgtgttgaattactgtatcttttactttttttttttgaaaagataaacttgtaaatagagtgatttgaaatact

SEQ ID NO: 584 - DNA, 2988 bp, Homo sapiens
aaaacggacatgcgtcccccagaggaaggaagggtgtggaggggaaaacgaaggtgccctgatggggagataacggggctagaattccaaggccccctctctctgataccaggttctccagggagacagatctgggcttctcagcagaggccgcagctgctcagacttggtctctggaacctactgcgccactccctgcctcacttcccatgaaccagaaggtggctcctgcccgctggccagaaacagagacctttcacaaagaccaggctctcctcctctccacggatgaagacagctttcccagctggggtgcagccctgcactggcaaatttggcagcacagccctctcagggtcactggggaggtgagcccagtgcaatgactcacaaatgatggggtggcctctcggcctggcctgggaggtccatgagtcctgggtggacagtgatatgcccttttgctgtggttttatagatgggaaaagttctctggctgtgcctcagacctgaagccccacatggttagttatagaaagctgcaggtgccggcagccaggaaggctttgggggtgaggtcagctctttggggagcagaagatgaagatgctggctttgggaggggaggaggggttggcctacttctcactgctctatggttcaaggtctgaacacaggtcgtttgtaccaggtcacaccctgctccgatatagctcaaagtacaactgacgcctgctcaccacaccctccaactacaagggtcacacctgtgctagacccttccttctctagaaagcacccaacactcatggtgaccacaagcttggatatcctttctcttataaccatgacactggccagatccaacagcctagctggagggatgggctccgaggggctccggggtggggccaggccagtgtgtggtccctggggccggctgcttgcatctcagtccctgctcccaccatgtccctgactaggaggctgtgggcaagtggcctgtatgtgtctctgcaccttggccttctcatgagtaaaccagagggctctgggacaaggactgaagcagggacagtgggaggagccggagggcctcacctcctcaatgttgcgaatccagttccggatgttgtcgaaggacttctcgttggtgatgtcgtagaccagcatgatgccctgcgcggggagagaagacacaggtgcctgatcggctgcaggctctggaagggaggcctcagcggcaccagagaacagtggtggggagcccagcacccactgcacagccaggcccattagctgccgccctccccacctctgtggagccccggaagccagccccctcctctccatccctgtggcccttctttctgctgggttctggcaccagccttgtcctgccccccgggccgctgaggtgacccttctgcctcacaggccagcccctgccacgcactcgctgacaagcccggctggctcccctcatggcccacggggtggtgcagcctgacggtgggagccggtccacaggcccactgccagcagcactcccctcacgctgaccctcccctgcaatcggcctcctcttcaccccttgctcaccccacgctctgcctgagccacctaccaggcacaactgagcccaggaagtcctgacccgacatccacacaacttccagtgaccccaccacagagggaaccggctgtgtgaagatggagccgagagtgccaaggcccttccagttccctaacctagacgtgagcaactgggagacggctcgtgggtcctggaagagcttcggggcagccccgcctcagcctgggtccacagcctcgctactgctgtggacaagcgcaaacatgcccatgcgatgcaaggggaaactgaggcacagagacgtgacctttaagattcaagcacggggggcgggggggggctaactccaaaagcactgatgacacctatcctctcagcaatatccctgggcctttttcagccccagaacccacatgtgggggccaccctctgacggtctgtgtggttctcgatgtccttgtggagtgcccacagcgggccagcctgcagtgccatcacaagtccccctttgttgccgggcatcctgggctccaaggcacgtggcctgctcatggccaggcctggatttcttccttcctcctcgctacctgctccccaggcccagccctgcatctgtggcacctgagggcactgatgacttctgctgctggccaagttgtctggggccatccaagtttgcagaataaggacacgggccatgtggtaatggtgagacagatgtgggtgcaagagtgtgggacaaaaacgacacagatggggcaagaaagtcactgcaaccccaaatcctcctgggaattcagggacatgaataatggcctcacagtcagccgcaaccatggcgaagaacctcaaggctgcagtggcccatgatgtctgccatgccccatccacggtgggcacaccctgtgactgtgacatggtcagggacagggggcgtggggccctttatccggggactggaccctctgaaagcccaggattcctgccttcaccactaagttggtgacatgtgcctaagactcaaattcctggattatacctatttcagggagctgaggggagaacctggacgttagtggggcagtgggtagagctctctcttagaatcaagcagaagcacctggaaaacactgagccagccatcctattccaggttttcctggaaacacccctcagggctccaagtgactattttccagggccccgtctgggcaaacctcaccatgggtctctaggcatccaatgcttcccaaacttgggattttgaggcccaagggtctatgagcatgctgacagagatgaggacacagctgcaatggtggtgctgtcccatatgactgatactggctacacaaggctctagggcatcagaaacatagctgctttgaccc

SEQ ID NO: 585 - DNA, 1588 bp, Homo sapiens
aatgctttctgagagtcatggatctcatgtgcaagtacttgaagcacctgtggttcttcctcctgctggtggcggctcccagatgggtcctgtcccagatgaatctgcagatgcatctgcaggagtcgggcccaggactggtgaagccttcggagaccctgtcactcacatgcgatgtctccggtggctccatcaatagtattagtaattcttggggttgggtccgccagcccccagggaaggggctggagtggattgcgactgtaccgtccagtgggaggggcgcctcctacaacccgtccctcaggaatcgactcagcatagccgttgacacatccaagaaccaattctccctgacactgaagtctgtgatcgccgcagacacggctgtctatttctgcgcgagagtcgaattatggggctcggctggcaatcaccactttgacatctggggccagggaagaatggtcctcgtctcctccgcatccccgaccagccccaaggtcttcccgctgagcctctgcagcacccagccagatgggaacgtggtcatcgcctgcctggtccagggcttcttcccccaggagccactcagtgtgacctggagcgaaagcggacagggcgtgaccgccagaaacttcccacccagccaggatgcctccggggacctgtacaccacgagcagccagctgaccctgccggccacacagtgcctagccggcaagtccgtgacatgccacgtgaagcactacacgaatcccagccaggatgtgactgtgccctgcccagttccctcaactccacctaccccatctccctcaactccacctaccccatctccctcatgctgccacccccgactgtcactgcaccgaccggccctcgaggacctgctcttaggttcagaagcgaacctcacgtgcacactgaccggcctgagagatgcctcaggtgtcaccttcacctggacgccctcaagtgggaagagcgctgttcaaggaccacctgaccgtgacctctgtggctgctacagcgtgtccagtgtcctgccgggctgtgccgagccatggaaccatgggaagaccttcacttgcactgctgcctaccccgagtccaagaccccgctaaccgccaccctctcaaaatccggaaacacattccggcccgaggtccacctgctgccgccgccgtcggaggagctggccctgaacgagctggtgacgctgacgtgcctggcacgtggcttcagccccaaggatgtgctggttcgctggctgcaggggtcacaggagctgccccgcgagaagtacctgacttgggcatcccggcaggagcccagccagggcaccaccaccttcgctgtgaccagcatactgcgcgtggcagccgaggactggaagaagggggacaccttctcctgcatggtgggccacgaggccctgccgctggccttcacacagaagaccatcgaccgcttggcgggtaaacccacccatgtcaatgtgtctgttgtcatggcggaggtggacggcacctgctactgagccgcccgcctgtccccacccctgaataaactccatgctccccc

SEQ ID NO: 586 - DNA, 1779 bp, Homo sapiens
agttaatgttgccatcaacaaacatttaaatgctcaatttacttcactgaatacagacacaacaaatatgaaaatctaaattcatacacatgctacttaatatgaaagtgctttctcttttttaaaaaaatacaccaaatggacactttttacatagatcaaatgtgctcttacaatgcaaaattaaccttcattttcaggttatacattttaaaactgtagctatcaacaccaatctaggaactctaatgctaagagtgctaaaaactatttcatttcttgtaaggaggactctaatacaatatccaatgtaaagaatacatctatatataatcttaacatgttttctgtaaagataaaaaatgttttctttccccttggtgatctttgttcatcctgggtggatcatcttttgaggttttaataatatgaaagtcctattttagaacaatgggaggaaccaaaaggggaattaaaaaattggttaacgtgtgcttgaagcatccaaaaaacaccagtttatcacaacaattggtctttgctaaaattaacaaaattttaataagcaagacaacaaaaagtactaatttaaaaggcttgaaatgcctgccaccattgtcagtatccatccatccaaccttcatttactacaagcacaatactactttgaggatagtttttggaacttattttgacttttttccctataggaaaaacaaagaccaagcttttgaaggagaggactgggaatctagtttaaatgtctacatccaaaattatatcatctttgcgcattcagttgactttttaaaatttaagaatacatatacaaaaagtacttatggaatacatattttaacagcataacatatttgaagaattagttacactttaaaaattaaaacacttgaaaagtattttttaaaccagtaccatggaataactttttgaaacccagattatctggctacttagatgatagtcttcctgttttcaattagtttgaaagattctaatatagattctaacccaacagtttatatggatattttcttgctttaaaaagctgcaacaggctaggcgcagtggctcatgcctataatcccggcactttgggaggctgaggtgggcggatcacttgaggtcaggagttcgagtccagcctggccaacatggtgaaaccccatctctactaaaaatacaaaaaactggccaggcgtagtggtgcatgccagtaatcccagctacttgggaggccaaggtgggagaatctattgaacctgggaggtggaggttgcattgagccaagatcacaccgctgcactcaagcctgggtgacagtgagactctgtctcaaaacaaacaaaacaaaaaagctaaaacaatgataaactatttttaatagatattttcactctatatctttatggagaatgtcagtatcaactgatgttaacaagtaaagctttgtcaacaggaattacaatgtgattcacagatcccagaatgacaaggaagggaccttaacccaatccgattctcccattcaatgtttaccccctagatacttaacaattcaagcatggaactgtttcatgtttacccgttctacatttaaaggatgcccttttactatatatgtgctttctagaatattactgattcttacatatctttaaaagttggatatttgtaatagcttaaagtacagtaacacttattttgtgtaatctttcttaatttaaaaacaaaaaataaatgaacaagtcagttccaatg

SEQ ID NO: 587 - DNA, 2111 bp, Homo sapiens
tttcattttaaaaacacaaagggaaaatgggaaaataataataatactatcagtgatggcattttcccgggctcctaaagcagctgcctccttttgctggtctgagacgggcatcttttcccaaaaggccaggagcccgggcctccctccctgtctctctggctctcatatagaaacttgcaccggcccatgccacaaagaactgggtgcccaggggcacttaggggctgggtgagtcatgaggggtcagggggtggttggcctggtgcccagccagccacagcaggaggaggtaggggctgggcatgcaccttggttaagccccaccccctatggcaaagtctctgccaacactcctctgagggctcattttccagtctccagtggccccggggtctttttgagaactacccacctgccacatagaaagaaatgctctgttggcagggaggcctcctggaaccagtcaggaaccaggctctggaaggcccgggccatttcttccctgacctgtcctgtgaccttgacaggtcagccctctgtagctcagtgtcacctggctatggaaggggctggtaactgaggtttccgccctccacctctaaacacatacacacctatccccccagagaatcacagagatggtagaagctttgtactccccaagtccatggggaaacagtttatctttctggacttagttttatcacatccagctctatattagcatattagcataggtgagaaatatggccagactagacagagatcaggtcatcaggggagcttccgagcttcagcaaagcccacaggtagctctgcgaactcagaatgctaccctaccttccctgcaggccgctgttcatgtctggactcctgggggcgctatttaatgtttacccccatctccagtgccccctccaaggctgtgcagtgtcttggggctctcagggccaacatcgaagagatgggggccacctcttaacacctggcaacagtctcccctcatcctgattcctgacaacagacaaaacaccggtttctagggtttatctgtttgttttttgagttgagggttcctcagggccttggcattgctagtgatggtcccctttgctgtgtgagaaccccctcaaccccttcctcctccctctggggatgaagtgggagtatttggctccccatttttgacaaaagggctcagtgcagggaggtggaggcctctgaggtttgaagggctctgtgagttagagttgtcacatgttctcctggttcttgaatttgcagcaggtcctgaaaaggaaggctctgctggccccgtgccttcctgaccttctctctccttccctcccctctcttttcttgccaagtttgctttggtttctgagcagcccagagaggaggagggttcgtccccagggagagcccagggctggagtccccaatccctgtgctatgggcacaaagagacttcagctcttcctgttgccttggctttttcctgagcaaaaacacaacaaacaaaaaggccagagaagagcacagactctgtccctctcacaactttccagaagagaccccctgatttttcacaccaccggatgccactccagccagcaggattgctacacacaccctctgttctcagaagtcatttgcctgggcagccgcctctcagattcctgttttcgtttcagacacttttttttgaagcatgcccatgtccaccagccaacgtgcccccgtgttcccccccatcagccaagtgattgggggtgaaccagactttaaaagagaggaaaaaaaaaaaaaaaggaaacatgaataaattggaatccagtggtggaggggtggttgtgtttttgttttgcttcaattttttttttttttgatgtttcaatttccctgtctgtctgtgggagaactttggaattttttctatttataactctttttttatgtgattgctctacgtaaaatgacactcaacaaagtttgccttagtgattcaagggacaatcttccataacttcggtcgcacgccacatcccgccgagaaaaactctcagctaattttctggcctatttattaaacagtattaattgacttg

SEQ ID NO: 588 - DNA, 2752 bp, Homo sapiens
gactgcgggagtggagccggcgagagagtggcatcgggggctgatggaagtgcagtgggggctggagagggcaccctactgtatccagcatgctccaaggccacagctctgtgttccaggccttgctggggaccttcttcacctgggggatgacagcagctggggcagctctcgtgttcgtattctctagtggacagaggcggatcttagatggaagtcttggctttgctgcaggggtcatgttggcagcttcctattggtctcttctggccccagcagttgagatggccacgtcctctgggggctttggtgcctttgccttcttccctgtggctgttggcttcacccttggagcggcttttgtctacttggctgacctcctgatgcctcacttgggtgcagcagaagacccccagacggccctgacactgaacttcggctctacgttgatgaagaagaagtctgatcctgagggtcccgcgctgctcttccctgagagtgaactttccatccggataggtagagctgggcttctttcagacaagagtgagaatggtgaggcatatcagagaaagaaggcggcagccactggccttccagagggtcctgctgtccctgtgccttctcgagggaatctggcacagcccggcggcagcagctggaggaggatcgcactgctcatcttggccatcactatacacaacgttccagagggtctcgctgttggagttggatttggggctatagaaaagacggcatctgctacctttgagagtgccaggaatttggccattggaatcgggatccagaatttccccgagggcctggctgtcagccttcccttgcgaggggcaggcttctccacctggagagctttctggtatgggcagctgagcggcatggtggagcccctggccggggtctttggtgcctttgccgtggtgctggctgagcccatcctgccctacgctctggcctttgctgccggtgccatggtctacgtggtcatggacgacatcatccccgaagcccagatcagtggtaatgggaaactggcatcctgggcctccatcctgggatttgtagtgatgatgtcactggacgttggcctgggctagggctgagacgcttcggaccccgggaaaggccatacgaagaaacagcagtggttggcttctatgggacaacaagcttctttcttcacattaaaacttttttcctttctctcttcttcatctcattatcctgattgactctgattataatagaaccatttttactttgctttgagggagatttttgatttaatggggaattttaaggtgtcatggaaatacagattctttgttttggccactgaatggactctctcttcagtgggattatcaaggaacttcagatcagggaaatctccacttcgggaccttctatctgcctcccaactcctcaaggtcacctatagaagcgagctaccaaaagacgtctcctaagcattttggtggcctagtgactcagggcagagtggccagcacacctctcatccgcccctcctgctccatcactgctgagcctctccccatctagaatgttggaactggagcatcataaagatagcaagctaccttccaaggccgagccagcccagagaggagcatgtcttcctttacctccccctaaggagatactacatgggagggggacacagaaaaagggaaggaaattgtctagtctggctttttttttttttttttttaaaggcaaagattgacattattgaaggaaaggggatgaggacaactgtgaactcacagtgagccctgtggaaagaagagacagacagagtgtgggtttgttcggaggcctctgctgtcaatggattccaggagcaaggccatttgtcgcgctttccaaatttcttaggcatttattttgataagtttatagccatcatgtttctaagagacttggagacaccagcaaactgctagaactcaaactcttcaattactcaaagaaggagccatttcagttaactcaagtgaatgaaagagttttggaatctgctgtgggtccttccctgttgaccatttggtaacttataatctgacaaaaactcttgagctgcaacaggccttgccagagggctcaggatgggaaaggaagaaggggataggaaaagaagaggtaattttacatttcccctttaaagtaaattttagccaactcatcattctgaaatgtccctataaagaatgagtcgaactagaccagaagccagcctactccttcttacatagcttctccaacaggggtagcaatgacctgtccacttcaaacacagataaggcctgccatcctcattggttaaaggcacacgtgagactttcagtgggctctgctgagaaggaaggcagcccaggagtcaggtatgcaggcattgcattgtcagtgtctgctctcagagtttacacattcaattgcttccaagggtgaatctcctgctctgtgaatgctatcagaccccaaaggccaaccttgggctgggtctatgtacgttcttccgaagcactgatgatcaaaattgaagacacattcagaggtttgattggttgagattaactggtgtggtggttggtgtatgtatgttttatttttatgtctttgtatgtagttctacataatgcaaattgtgctttctgatggacaagacctcataactgtgattaatatcaataaaaaggggatgttgtgg

SEQ ID NO: 589 - DNA, 2983 bp, Homo sapiens
gtcagtcggagcggcaggtcgcgagagcagggctggtggccagcggggagcctcgcagaggaaagcatcagtcttgctgaaataagcctagaattggaacgtgacagagttagtccttgataattgcctgtgtgtcaatggggaaattgaaggcctgaatgatactttcaaagaactagaatttctgagtatggctaatgtggaactaagttcgctggcccggcttcccagcttaaataaacttcgaaaattggagcttagtgataatataatttctggaggcttggaagtcctggcagagaaatgtccaaatcttacctacctcaatctgagtggaaacaaaataaaagatctcagtacagtagaagctctgcaaaatcttaaaaatttgaaaagtcttgacctgtttaactgtgagatcacaaacctggaagattatagagaaagtatttttgaactactgcagcaaatcacatacttagatggatttgatcaggaggataatgaagcgccggactctgaagaggaggatgatgaggatggagatgaagatgatgaagaggaagaggaaaatgaagctggtccaccggaaggatatgaggaagaggaggaggaagaggaggatgaggatgaggatgaagatgaagatgaagcaggttcagagttgggagagggagaagaggaagtgggcctctcatacttaatgaaagaagaaattcaggatgaagaagatgatgatgactatgttgaagaaggggaagaagaggaagaagaggaagaaggaggtcttcgaggggagaagaggaaacgagatgctgaagacgatggagaggaagaagatgactagatcattctaagaccagattctctaatgtttctgggtgtgcaatagagtgatcacatctttgtttcttcatgtacgatagctatccctacagaagataatgtgtaactttttataggaaaagtgtggttttactatttttgccttatcattccaaataagaactagtctgttaatgatcatattgtatgtagagaaaaattttcattgactcccattgtggaattccctagcaatttatttagacttaattttttaaattcaagcttactgtattagtcatttttagcccataattaaaacatgatcacttttacacaggtgtagtatggtgcatttcattccttatttataaattaactgaaattacagtttgctataatataaatgacaatagtctcttgagtggtaagttggttatttttttagaggtgatccaggaatctttagtttgaaggcagttacctttttttttttttttttttttgactaagagtgtttggttgcttttttgtcacaagtaacttggaaaatagaagcagaatagtaaaggttctattcagcaacatagttcatggattttgtggaggttctattcagtaatatggttcatggatttagtggtgactgataagattttatttttgaaggaaaaattgcttatactaagtccagagacatgcaggtgagcccctttgtcaggctgcaaatcatgacatgccgatggttgtttattttgtttttaggtgtgcattctttttcttcttagcaattcctttatgatcaccttcccttcttgtttcactccctcccgctctctcaaaaggaacttgggaaacttgtgaaacccaggaaaacctttagtcttatacctcaactacctttcagtcctgtctgggttttaaataagtgaagtagaagaaattgagtattttctgacataagaatatattatcaatacagttttatgcagtaagctctccttaccataaatgtttcttggttgacaacatctaagacaatattagtgggatgaagaaagaaaagcaggggtgcttttggaagcagtgttagtgttcctcaaaagtcggaacaattgcctgttgatatattaataagacattaaagtcaaattttaatgttggcctctcaaatgatttggataccactctgcaaagtatttctaacctttaattcccagttttaaaacagatataataatagcatttaattggaatatactaggcagctggaaaagtatttgaaactaaattgacattaaaattaagatttgttttcaagtggatgtccattaaaagtagaaaaatatttgggataagtgagtgtgtgtttccttacatggctactaaataaaatataatgagtatacaagtatatctcctcttttgctatggaggctccatgttcaaggcaatggctttttaaatcttggctatctaaaattttttccctttgttttgaatatttgtaagtttttaagaagttagtgtcagcgaattaattgaagttatgcttctatactgggacatatttaaatactgagtatagtactgctgctactgcttctacaatgtaaaatgtatgacttggtgttttaaagtaaaaattatgatgttacttgtggagaaactaaaaatgttgtacaactgaccgaaagaaaacccttggggataagtttagtgaggggattggaatccccaaaaagataacatttttcttctgcttttaaaaactgaaattccctgttctagttcctaacaattctcattacatactatgccagattacaaaatacttatttttaaaatgaaatctatatattgactttcttatcaatcatcttactgtgcaatcaaaattagagtactttggtttgaaaacaacacttagagcctccagataacttttaagacttatttagctttgtgggtggtattttcatgcaaataagtaagggtgggttttatattttgtagaagttttcggtcctattttaatgctctttgtatggcagtatgtatatattgtgttaagttcctcaagaatctccttaaaaactttgaagttaatacttttgtgcaactgtgttttgaataaagccatgacagtgttaaaaac

SEQ ID NO: 590 - DNA, 4004 bp, Homo sapiens
tccttctagggaagggctggggaggagggggtggtgacacggtggagacaccggctaggccagggggcctgcccttgggacaggtccagacccatggagccccccgggaggagcagcaggtccacagcgtctcatactctacaccagtattgctgtcctactcaggtccttgactccatgaagcttaccccctcaggcaggctggcagagagcagtgtggagggtgatgccccaggcagtgacctgagcacagcggttgatagtcctgggagccaacccccctaccggctgagccagctgcccccctccagcagccacatggggggcccccctgctggagtgggccttccctgggctcagcgggcacgcctccagccagccagtgtcgccctgaggaagcaggaggaggaggagataaagcgctccaaggccctatcggacagctatgaactctccacagacctgcaggacaagaaggtggaaatgctggagaggaagtatgggggctccttcctgagccgcagggctgccaggaccatccagacagccttccgccagtaccgcatgaacaagaactttgagcggctacgcagctcagcctcagagagccgcatgtcccgccgcatcatcctttccaacatgcggatgcagttctcctttgaggagtatgagaaggcacagaaccccgcgtacttcgagggcaagcctgcctcgctggacgagggtgccatggctggtgcccggagccaccggcttgaacgggggctcccatatggaggctcctgtggtgggggcatcgatggtggtggaagctccgtcaccacatctggagagttttctaatgacatcacagaacttgaggactccttctccaaacaggtaaagtctctggctgaatccatcgacgaagccctgaactgccacccgtcagggcccatgtctgaggagccagggtcagcccagctggagaagcgggagtcaaaggaacagcaagaggacagctcagccacatccttcagtgatcttcccctctacctggatgacacagttccccaacaatcccctgagcgactgcccagcacagaacccccaccccagggccggcccgagttctgggcgccagcccctctcccgccagttcctccaccagtgccatcaggaacccgggaagacggtagccgtgaggaaggcactcgcaggggtcccgggtgcttggagtgccgggatttccggctgcgggctgcccaccttcccctgcttaccattgagcctcctagtgacagctccgtggacctgagtgaccgctcagatcgcggctctgtccaccgccagctggtgtatgaggctgatggctgcagcccccatgggaccctgaagcacaaggggccaccaggcagggccccgatcccacaccgccactacccagcccctgaaggcccagccccagccccaccagggcccctgccaccagcccccaacagtggcactgggcccagtggtgtggctgggggtcggaggttggggaagtgcgaggcagcaggcaagaactctgatggtggagataacgagagccttgagagctccagcaattccaatgagaccatcaactgcagctccggctcctcttctcgggacagtctaagggagcctccggctaccggcctgtgcaagcagacttaccagcgggagacaaggcatagctgggactcgccagctttcaacaatgatgtggtccagaggcggcactaccgaatcggcctcaacctcttcaacaagaagccagagaagggtatccagtatctgatcgagcggggcttcctgtcagacacaccggtgggagtggctcacttcatcctggagcggaaaggcctcagccggcagatgatagggggattcctagggaaccggcagaagcagttcaacagagacgtgttggactgtgtggtggatgagatggacttctcctccatggatctggatgatgcgctccggaagttccagtcccatatccgggttcagggtgaggcccagaaagtggagcgactcatcgaagccttcagccagcggtactgtgtctgtaacccagccctcgtgcgccagttccggaacccagacaccatcttcatccttgcttttgccatcatcctcctcaataccgacatgtacagtcccagcgtcaaagctgaacgaaagatgaaactagatgacttcatcaagaacctgagaggggttgacaatggtgaagacatcccccgagacctcctggtgggcatctaccagcgcatccaggggcgtgaactgcggaccaacgatgaccatgtgtcccaggtgcaggctgtggagcgcatgattgttggaaagaaaccagtcctgtctctccctcaccgtcgactggtttgctgctgccagctctacgaggtgccagatccaaaccgcccccagaggctagggctgcatcagcgggaggtcttcctcttcaatgatctccttgtggtcaccaaaattttccagaagaagaagatcttggtgacgtacagtttccgtcagtctttccccctcgtggaaatgcacatgcagctcttccagaattcatattaccagtttgggatcaagttgctgtctgcagtacctggtggggagcgaaaagtcctcatcatcttcaatgcccccagcctccaggaccggctgcgctttacatccgacctgcgcgagtccattgcggaggtgcaggagatggagaaataccgtgtggagtcggagctggagaagcagaaaggtatgatgcggcctaacgcctcacagcctggaggggccaaggactcagtgaatgggacgatggcccgcagtagcctggaggacacttacggggcaggcgatgggctcaaacggggcgcactcagcagttccctgcgagacctctctgatgcaggggtctgttattagcagtccacgccctcaccagaggatgccacctccgcccccacccccgccgccagaggagtacaagagccagaggcccgtctccaactcctcatccttcctgggctccctatttggaagcaagcggggcaaggggcccttccagatgccaccaccgccaacaggccaggcctctgcctcctcttcatctgcttcttccacgcaccaccaccaccaccaccaccatcatggccatagccacggtggcctgggggtgctgcctgatgggcagtccaagctccaggccctgcatgcccagtattgccaaggaccgggccctgccccgccaccctacctcccaccccagcagccctctcttcccccacctccccagcagcccccacccttgccccagctgggctccattccaccgcctcccgcctcagccccacctgtggggccacatcgccacttccacgcccatggcccagtcccagggccccaacactataccttgggccggccaggcagggcacccagacggggggctggaggacaccctcagtttgctccacatggccgccaccccctgcaccagcccacatccccactgcccctgtacagtcctgccccccagcaccctccagcccacaaacagggccctaagcacttcatcttcagccaccacccacagatgatgccagcagcaggcgcggctgggggccctggatcccggccaccagggggctcctactcccacccccaccacccccagtcaccattgtcaccacactcacccatcccaccccacccctcctatccacccctccccccaccctcccctcacaccccgcactcaccccttccacccacctccccccatggcccgctgcacgcctctgggccccctggcacagccaacccccccagtgcaaaccccaaggccaagccaagccggatcagcaccgtggtctgatgaatggagagagtgagctggggaacaggaaagtctggggagccacaggagagggaccttgcaccctctttgcttcctcggttttttcaaaaatatatatacacatagc

SEQ ID NO: 591 - DNA, 2917 bp, Homo sapiens
ttactttcaaaggaaagatgctgtctccaaatgataaaatgttaggaaaactggatccattttatcaaccttcagtgtccaagcagaagaccagtgcagaaatcataagtgaagcaagaaatgcattaagaacagttagaacccaaagaccatttacaccacaggaggctcaaagaaaactattcggacctgcatcctcaagaacatcagaaaatagacctccttcctccttcagcctccatgcatccagttttgagtcatctgattccaggcctatctctggcacacgtcttagtccactagagctgaaaccgaaagttccagcatctcccaccagagaggaggattcctgcttttcctttcctaagcccccagtggaccctgcgaagattagaagagtaagcaacgccagggctcgcttattcagggctgcctcccagcgggcccttctgccggacagatcccttcctccctccgactcaaagaagacagtggaatccaaagaaacagttatgatgggggactctatggtgaaaataaatgggatttatttaacaaaatcaaatgctatttgccacttaaagagtcacccacttcagctaactgatgatggaggcttcagtgaaataaaggagcaagaaatgttcaaaggaacaacatctttaccatctcatctcaagaatggaggggaccaggggaagagacatgcgagggcctcatcatgccccagtagctcagacctgagcaggctgcaaaccaaagcagtcccaaaagctgacctgcaagaagaggacgcagaaatagaagtagacgaagtcttttggaatacaaggattgtaccgattttgcgtgaattagaaaaggaagaaaacattgaaacggtttgtgctgcttgcacacaacttcatcatgctttagaggaaggaaacatgcttggaaataaatttaagggaagaagtattctcctgaagaccctgtgtaaactagttgatgttggttcagactcgctcagccttaaacttgcaaaaataattctagcacttaaagtgagtagaaagaatcttcttaatgtccgcaaacttatatttaaaattagcaggaatgagaagaatgattctttgattcaaaatgacagcattctggaatcattattggaggtactaagaagtgaagacctgcaaactaacatggaagcttttttatactgtatggggtctataaagttcatttctggaaatctgggatttcttaatgaaatgatcagcaaaggtgctgtggaaatactgataaatttgataaaacaaataaatgagaacatcaagaaatgtggtacatttttgcctaattcgggccacttgctagtccaggtgactgctacattgagaaacttggttgattcatcattagtaagaagtaagttcctaaacatcagtgcccttccccagctctgcacggcaatggaacagtacaagggtgacaaggacgtctgtaccaatattgccagaatattcagcaaacttacttcttaccgtgactgctgcacagccttggccagctattccagatgttatgccttatttctgaatctaattaacaaataccagaagaagcaggatttagtcgtccgtgttgtttttattcttggcaacctgacggcaaaaaataaccaggctcgtgaacaattttccaaagagaaagggagcatccaaactctgctgtcattattccagacgttccatcagctggatctgcattcccagaagccggtgggccaacgaggcgagcagcacagggcgcagaggccgccgtcagaggcagaggacgtgctcatcaagctgactcgtgtgctggccaacattgccatccacccgggcgtgggcccggtgctggccgccaacccggggatagtgggcctgctcctgaccacgctggaatacaagtcacttgatgattgtgaggagctggtgatcaatgctacagcgacaatcaacaatttatcttactaccaagtgaagaattccataattcaagacaaaaagctatatattgctgaattgctcttaaagcttcttgtcagtaacaacatggatggaatcctggaggctgtgcgtgttttcggaaatctctcccaggaccatgatgtctgcgatttcattgtgcagaacaatgtccacaggttcatgatggcgctgctggatgctcagcatcaggatatctgcttttctgcctgtggtgttctcctcaatctcactgtggataaagacaagcgtgtcatcttgaaagaaggaggtggcattaaaaagttagtggactgtttaggagatttgggtcctactgattggcagctggcctgcttggtttgtaaaactttatggaacttcagtgaaaacatcactaatgcttcgtcatgttttggaaatgaagacaccaacacactcttactcttgctctcatcatttttagatgaagaactagcactggatggcagttttgatccagacctaaaaaactatcacaaactccattgggaaacagaattcaaacctgtggcacagcagcttctaaaccgaattcagagacatcacaccttcctggaacccctgcccattccctctttctaacatgatgcagattaacaggagaaacgagaactcacgtctccctcattcttaagaactggtaacaaacgtgaacatttttttcagcattaacaaatgtggaaagtttttcaagaactggttttagtgagttgctgaagtattttttaaaattaagcatttcttcttgttaggtattatggaaaaatgaatatacacattatatttcctgttgagagaaatgtaagatgaaaatatgtgcattttcaagtaaatgactttttcttctattctctattaaacaatttagttctagtctt

SEQ ID NO: 592 - DNA, 2649 bp, Homo sapiens
aaaccgcctccttgaagctgccgctgtcgctgctgctcgctcgagtcgcagatccttgccagcacattacagaatatttttgttgagccttcttgagaattcagagaaactgctgagtgaccactgaacgaaaagatctaatcttaaggcttacgcgtgttccatccaccacatcagaacaatgtcgtatgtttttgtaaatgattcttctcagactaacgtgcccttgctgcaagcctgtattgatggggactttaattattccaagcggcttttggaaagtggctttgacccaaatattcgtgacagcaggggcagaacaggccttcaccttgcagcagctcgagggaatgtagacatctgccagttactgcataaattcggtgccgatcttctggccacagattctcaaggaaacacagctcttcacctctgtggccatgtggatactatccaatttttggtttccaatggactcaaaattgatatttgcaatcatcaaggtgctacccctttagttctggcaaagcgcagaggagtaaataaagatgtcatccgattgctggaatctttggaagaacaggaggtgaaaggatttaacagaggaacccactcgaaactggagaccatgcaaacagctgagagtgaaagtgccatggaaagccattcactcctcaatcccaacctgcagcaaggtgaaggagtcctctccagcttccgaaccacgtggcaggagtttgtggaggatctgggcttctggagagtattgctgttgatcttcgtcattgctttgctgtctcttggcattgcttattatgtgagtggggtgctacccttcgtggaaaaccagcctgaactggtgcattaaaggagctcatggaagatgaggcaattaattgcctgtttcctggcttccaatgtttgttctcagtttctcagaatttttcttagcgcaaagcagtgagggcagtacatgttctttttccatttttaattattgtaatccttttagataatgatgtgttcatttgaactaactacatactatgatcaagtatattgcatcctaacgctacctctgactcaacctgactttgtaggaaagcctacacgtagccttgtttgataaaaacacggaagtgactagagaatggaagataaaggaagaagctaggaagtccttgctatcaaaaccttatcctaatataggaccaattgaagtattcaaaaagaaaaacagtatcttatatgattagtttttgttggtggttttgttttcatttatttttgcaagagccactttttatttactttctctagggataagagataaaacttgaagtacttttttcaaatcttgtgtgcaaattagtattgttagcatctatttggcttattttagtatttttaagtctagtcacaaaccaaacaaaacttttgaaaatgagctatattttgttcaaagataattgatttgatcttatatttatttgtttttaggataatttttgatctttttgtaaactgctttgcttgttaatatctgtgaaaaataaatgagttcattttgttcactttccaattttcccgagtatcctagtcatcaaagataacagttcatcagaattacagtcagaaaatcctttttctactgaatagttagcagggaaaaataattctgatatttaactgtcataattctgtagtgctattatagtgaaaaactcagttctataagctagctgtgttgtcacagttttatcatagttcataattatttcatgtgcaatcctatttggaggccctgttagacttttaacaatcccatccatatctgtaattctctgatggcaagaatggatggagcatttctgagttaacagtgctggacagtatcgtactgggtgtcataaactctttatgaatggtaatattatgtaaattgaaatctggccctcaaactatattgcagctttcagcagtatgtttgaaggcctcttttgttaatgattctgtaatgtatgaattatgttcttgagtggttaaaaaagaatatgaaggcttgataattatttattgggtagagtcaggaaattgtagtgaaagaactaatggttttgttttttggaataaaggcacctaagctattgctaattgaattgctgctagaattagaaattatgctttagaatagaattggtatttctgtgattctttttgcttcttggtattttctcttgtatctatgtatctagtattgaggcttgctctttcatgtggctttatcctctctttaatagctgttgtaaaattcctgagtaactggctgcttcaggatcagcttgcagagtcttgcttttaggttagatacaaacaaagtaaatcatagttggtgtaaatccagcaaaaaacagctggctttggaatggagaacactacaattcaaatttgaagtatattcagaagaaaactttggaattagctttacatttgtttgtaaatctaaacaaatatgcaaaattggtcaaaatgtaagtatatagcatttttaaagattaatggttccttttatgtgctgatttctttgtattctgttctctgcattcatcattcaggaataccaccaataaatgtatttatatatccctt

SEQ ID NO: 593 - DNA, 3992 bp, Homo sapiens
ttttagtagagaacagggtttcaccatgttggccaggctagtctcgaactcctgacctcatgtgatccacccacctcggccccctcaaagttctgggattacaggcgcgagccaccatgcctggccatctggataatttttgtatttttagtagagacggtttcagcatgttggccaggctattctcgaattcctgacctcaagtaatctgccctccttggcctcccaaagtggtgggattacaggcgtgagccactgtgtctgcccacctttaattaatgctatacatttgataagctttcctattaagaatttaatgtgatcattttatcatcaaattacttttatcatactgtcttagaaatatttttaaactttgcttttatgtagaaaaggtcaattaccaaacagggtattgttttataggctactggtgtttcccatatgtttatgttttgtgctgtccatgatagagaggtggtgtctgtagtcttttgagtcctgttaactataaaaagccaatagcagttggtgccatggttccacaccctggggtggaggtgagagatgagttcctgccatcttttttgggatggcccattagcctgttggcacccatccctcaaaagatgggtttaatgataaatttggtcgcatgtaggcatctgtctgggaaggaatctgtgtaccttgatactctgagagtgttttcctgggctaacctcagagccaatactttacttctcaggaagtaatctgtgggattaagacaacaatttacacgttaaaaaataaactctacagcccactagcatcaacatagctttatgcttttgacttcattcatctgctactatgacctttttacttttttatttatttatttatttttaccagtgtgcagtatgcctatgtaatactataagcgttttagtttttaaaattgtaatgctttctgttgctcatatattgatcaaaaactgatcaacctatgagtagtactttgaggttgtatgtgttcgattttgtctcctcctgcagtgaattgatttttcttgagcagattgattagatggagctgccttgatttacacatcagtgaaagaagagaaaaacctcgacttgttgtataagtatattgttcataaaacatacggtttccacttcaccacacctgccttagttgtggaaaaggatgccgtttttatgtgagttattttgagctgatgctttgaaactcttctttttaaagtacatttgctttttacattttaccccttcaaggaaggtgccttctgtctgtgtcttctacagccagctctctcactgcaccttctctctgttcctttccggattatgaggcatctgcctgagggaagtgggtggtgtggtcaggggtgctgcctttcttcctcgagagcaagttgccaaaacctaagccagccatttttggcactcactgtcaactctggtaaaatactggctggggagggaatatagggaattgtgcttgggggatcctgaatgtcttctattaaagcgcctgctttatctgtgtgttggcagggatgactgcaaacatcctctcggcatctctgtcagcatgggctttggctatattaagtgcttactgtgcttctggcatttcacattttgggagccaccgggattgattgtcctcgatagagacttggatacctgttttcctaagctggtgtctttctctcactggagaatcatagtgttgctggatgcataaatatgaagctgtggtctctgacaagacttgtgttagcagattgatgttcaggcttcagtatcctcctgacttaacaaacaattacattattcattcaggaaaccttattcagcacccactaggtgctcaggttctctgcaaaggacacagaaatgaatgatacgtgttccttgcatatggcactgtctagaggggacatacacagctgaagaagggaagggcagtgatggggttatggaggaagtatggcagggaaagcaggagggtgatgctggaagacaaatggtagatcccaggcggactggaaagaattgcaatagggggagccggggagtgcagtctgtgagaggctggaaatgtgaaagccaggagctctcagggatttgggttgcctcctgcacagtcaaggagagtgtcactcaggctagtcatagatggcatacctacaggcttgggctgattttagatagttgttcagagcagtcaggcaggcgccagaggcacaagccctgtgagaggtgtgtttggaatcacttggtatccaaatcacatgtcatccctaggagcaaggagaccggttggatttggggctggtctggaatgaagaagcatctctcagcttctgaaggctgcatggctcacggcagtatctcaatcatgccctgcccgtttgcacatttggtcctgttggtagttacctctctggtgactggcaaagtcagcaaggatattggggtggagcaccctggctaagcaccctcttgattatagagctatggagtagaagacagatggagaatgagaggcctgtgagaacaatcagtcagttgccatctttcagagctgctcgagttcaaaagtgtgtcatacagggtattttaacattgctacctttaagggattcaggtgggaaccctaggctgtggcttcacataatggaacttgggtgccatcctaccctgtgatgttgagctggccagcactggtgtaggaacctcaaggactctgtgctcctctggtttggggcctaggataaacacaggccctgcttgccccttggttctaggacacatcttcccatgccagcaaagttaatgaaccagtctacaagataactgttgaaagaattcttagagaaacaacccacaggaggggagccatgtcagagcccaagaaaaccatcccatcctgagctctgccttctgtgctgctctctgcatcctattctctgtcggaacaggaccccactgtgtccttgctcttctaggcagagttgtgggagagtgctaaatgcttttgagtggggcagcctgtggaatgggatctcatactggctccttagaccttgggcccatgaactcagtatggagcaggacctgcgatgttctgatggattatacccacagtgtattttggcacatctgccaaaagctacaaacaacccccaacaactacacactatatcttgtgagaagtgtcctacccaggagtcctgaatgtgatctgagtatgctctaaggcagccccaggaaaagcaattcagtccctctctctttgcctttagacctgcaggctgggacaatgaaaagaaaatagctattttacatgaaaattttacaaccgtgaagccggaagatgcatatgaagactttattgtgaaacctcccgtgagaaagctggtccacgacaaagagttggcagcagaagatgagcaggtgttcctaatgaagcaacagtcactccttgccaagcaaccagccactcccacgagagcttctgaatctcctgcaagaggaccctctggctctccaaggacccagggtcggggagggccagccagtgtgcctagctcctccccaggcacgtctaaaaaagccggacccaaacatcaaaaataatgcagcaagtgaaggggtgttggccagcttcttcaacagtctgttgagtaaaaagacaggctctcctggaagtcctggtgctggtggggtgcagagcacagccaagaagtcaggacaaaagactgtgttgtcaaatgttcaggaagaactggatagaatgactcgaaagccagactctatggtaacaaactcttcaacagaaaatgaagcctgaacctccttaaaaagtgcatatgtcgaatgaccaaataactatgtatattgatctgctaagaccaggatttttctgatatggcacatgctatcagttttttggggcaggggagatgaacttt

SEQ ID NO: 594 - DNA, 3049 bp, Homo sapiens
agagccttcggccggacctgaaaaagcgagagggagagcgagcaaaaggcgcgatccggagagccaggcaagcggggcgccgacctcgggcggccccggcccgcgcccttgcccctcggccgggcggacgttcacttcttcaactgagatggacatgatataatctccattgagtcaaagaatggcatccagtcctgagcttcccaccgaagatgaacagggttcctggggcatcgacgatctccatatttcattgcaagctgaacaggaagacacccagaagaaagccttcacgtgctggataaactcacagttggccaggcacacttctccctcagttatatccgacctattcacagacattaaaaaggggcatgtcctcctggatctgctagaagtactttctgggcaacagttgcctcgggataaaggatctaataccttccagtgtagaatcaatatagaacatgccttgacattcctaagaaaccgatcaattaagctaataaatattcatgttactgatatcattgatggaaacccatccattatccttggcctaatttggacaattatcctgcactttcatattgagaagcttgcccagactctttcttgcaattacaatcagccttccctggatgatgtgagtgtggttgactcatctcctgcctcaagtcctccagctaagaaatgctctaaagtgcaagcaagatggcaaatgtctgcaagaaaggcccttcttttgtgggctcaggaacaatgcgccacctatgagtctgtcaatgtgaccgattttaagtcaagttggagaaatgggatggcttttttggccatcattcatgccttgcgaccagacctaattgacatgaagagtgtgaagcatagatccaacaaagacaatctgagagaggccttcagaattgcagaacaagaattaaaaatccccagattgctggaaccagaagatgtggatgttgttgatcctgatgaaaagtccatcatgacctatgtggcacagtttctgcagtattccaaagatgcccctgggactggagaggaggctcagggaaaggtgaaagatgctatgggctggttaactctgcaaaaggaaaaactacagaagttgctaaaggattcagagaatgatacctactttaaaaagtataatagcctgctgtcctttatggagtcattcaatgaagaaaaaaagtcctttttggatgtcctgtcaataaaacgggatctggatgagctggacaaggatcatttacagttgagagaagcctgggatggcctcgatcaccagattaatgcatggaaaataaagctaaattatgccttgcccccacccctccatcaaactgaagcttggctccaggaggtagaagagcttatggatgaagatttgtcagcctcccaggatcactctcaagccgtgactctgatacaagagaaaatgactttattcaagagcctgatggatagatttgagcatcattcgaacattctccttacctttgaaaataaggatgaaaatcacttgccattggtaccacctaacaaattggaggaaatgaaaagacgaatcaacaacattttggagaaaaaatttattctacttctagaatttcattactacaagtgcttagttcttggtttggtagatgaagtgaaatcaaaattggatatttggaacattaaatatgggagcagagaatctgtggaattattgctggaagactggcataaatttattgaagaaaaagaattcctagctcgacttgatacttcttttcaaaaatgtggagaaatttataagaatttggctggagaatgtcagaatattaataaacagtatatgatggtgaaatctgatgtttgtatgtatagaaaaaatatatataatgtgaagtccactctacaaaaagtgctggcatgttgggctacttatgtggaaaaccttcgcttactaagggcttgctttgaggagacaaagaaggaagaaattaaagaggtaccctttgagacactagcccagtggaatctagaacacgctactttaaatgaagcaggaaatttcttagtcgaagtcagcaatgatgtggttggatcatctatttctaaagaactgagaaggctgaataaaagatggagaaagttggtttcaaaaactcaacttgaaatgaacctgccactgatgataaaaaaacaggatcagcccacttttgacaattctggaaatattctatctaaagaagagaaagcaactgttgagttttcaacagatatgtcagtagaacttcctgaaaattataatcaaaatataaaggctggagagaaacatgaaaaagaaaatgaagaattcacagggcaactaaaagtggctaaagatgttgaaaaactcattggacaagtggaaatctgggaggcagaagccaaatctgttttggatcaagatgatgtggacacctcaatggaagaatctttgaagcatcttattgccaaaggctctatgtttgatgagcttatggcaagaagtgaagatatgttacaaatggatatacaaaatatttcaagccaggagtcctttcaacatgttctcacaactgggcttcaggcaaagattcaagaagctaaagagaaagtccagatcaatgtggtaaaactcattgcagcgttgaagaacttaactgacgtttcaccagatttggacatcaggctgaagatggaagaatcccagaaggaacttgaatcatatatgatgagggctcagcagttactggggcaaagagagagccccggtgaactcatttcaaaacacaaggaagcactaataatttctaatacaaaaagtctggccaagtatttgaaagctgttgaagaactaaaaaataatgtaactgaggacataaagatgtctttagaagaaaagagtagagatgtctgtgccaaatgggagtctcttcatcatgaactgtctttatatgttcaacaactaaaaatagatattgaaaaaggaaagcttagtgacaatattttaaaactt

SEQ ID NO: 595 - DNA, 2460 bp, Homo sapiens
actgcttcttcaggatcccaggtcttggggccgtgtgtttccaggtctgcacagaccgaccctctgtcacttacaggggcctcgttgtgatgaatcagggaagaacgtggctgtacctgtggggggtttccctggaccagtggtgggctcctgggcctgctctgctcctggaatggaggctgaggaccacctgccctcctgcaggttttgggtacaagctgtgtgcctctgcagagcagctgtgtcctctcctgtcctgtgcagttaatcagggctccctgtggctttcaggagcaaggccccgctccctcgtgtggcacgcagggcctctcccaggtgggcctctcccaggtgggcccctgctcaccttgccaggcccagcccccaccccctgcctttccagccagctcccctggcctgggacatctcatgcttccctgagggtgccccctgccatggcatgtgcccatcaccctgcctggaaggccggcatctcctgtgtctcctgctgtgctggacctgctcagatcctttccccacctgtcctgccttgaggctgggtcagggacccctcatgggcactcccacaggccagcctgcacaggtctccacggtgtctcgtgaggtccaggagctccccaagatcagggcctgctgtgtgtcccctgtcatgtccccaggtcaggctctcccacgtatgggctggggagtgagaggatgagctagtgagtgggtacaggaagcccggggagttcctctgaggcccagtcctggccccgattctgcttcctccagtccaggaggaatatccctctaccttgggactggggtctcctgggaacattctagaaatctctcttgcaatcagggaggatacaagcccctcctctttcctgatgaggatgtaagattaacaggccagagtggcaatggcgtctttgtgtgagtgtgtaaggtgtgtacccgtgagaggttgtgtgaatgtgaaagtttgcgcgtgtgtccatgagtgggtgacagtgtggacatgagtctatgagtgtgagtgtgagtatggggaagtttgtgagtatggggaagtttgtgagcatgtgctggtgtgtgtgagtctgggaatgtcagtgtatgtgtgtgaatgtacatgtgagcggcacgtgaatgggtatgagtctttgagtgtgtgtcagcctgtgagcatgtgcctgtgtgtgaatctgggagtgtgagtgtgtgtatgagctgtgtgtgaacgtgtgtgtgagtctttgtgtgtgcatgtgtctgagagtgtcaatgtgtgtgtgaatgtgtgtatatgagtctttgagtgtgtatctgtgagcatgcgcctgtgtgtgaatctgggagtgtgtgtgtgagctgtgtgtgaacgtgtgtgtgtgagtctttgtgtgtgcgcatgtctgagagtgtcaatgtgtgtgtgtggatgtgcctgtgagctatgtgtgaatgtgtatataggagtctttgagtgtgtgtgtatcgatctgtgagcatgcgcctgtgtgtgaatctgggagtgtgagtgtgcatgtgaactgtgtgtgaatgtgtgtatatgagtctttgagtgtgtgtcagcctgtgagcatgtgcctgtgtgtgaatttgagagtgtaaatgttcgtatgagctgtgtgtgaatgtacgtgtatcagtctgtgtgtgtctgagagtctcaatgtgtgtgtgtatgtgcatgtgagctatgtgtgaacgtgtgtgtatgagtctttgagcatgtgtgtgtcaacctgtgagcatgcacctgtgtatgaatctggaagtgtgtgtgtgtgtgtgtgagctgcgtgtcgatgtgtggcttatcctgcaggagtgctgacccgggactccgggcggtaaagaagcctgggtccaggctctccccttccccaaagccacaggcaaccccagagacactcagagccctctgcattctgggggttctgggggcgatctggggagcttgtaggctcactttgctccactgagcgatgagtggtctttccacattctagagagggctcggaggcctttattttgaaaagagtaatactgaatagattcaaaataatatttacaaaacatgtgtaggatttaagaatgaaggcactgccgggcgctgtggctcacgccagtaatcccagcactttgggaggccgaggtgggcggatcacctgaggtcaggagttcgagaccagcctggccaacatggtgaaaccctgtctctactaaaaatacaaaaattagccgggcgtggtggcaggcgcctgtaatcccagctacttgggaggctgaggcaggagaatcgcttgaacccaggaggtggaggttgcagtgagccgagatcaccccatttcactccagcccgggcgacaagagtgaaactcgacctcaaaaaaaaaaaaaaaaaaaaaaaaaaaagaaaaaaac

SEQ ID NO: 596 - DNA, 3200 bp, Homo sapiens
aggtgagccctgactgcgcagggagggacagcgcggggctcccgagtagcagccggcctcgcacctgccccttgcggccgcgcactggactgcggcgccgacccgcaccctgggcccgagggctgcagggctcgcccgccctctcggagccgagcctctcccggtccaggcggcccctgccctggcctgcccgggtgccgggtctctgctgaagttagaaccgagacccccgcttgctggtgaccccgagtttggatctttgctcctgcgccgcgttctagagcaagcgtttgcctcagcatggagggcggggccgcggcagccacccccacagcactgccttactacgtggccttctcccagctgctgggcctgaccttggtggccatgaccggcgcgtggctcgggctgtaccgaggcggcattgcctgggagagcgacctgcagttcaacgcgcaccccctctgcatggtcataggcctgatcttcctgcagggaaatgccctgctggtttaccgtgtcttcaggaacgaagctaaacgcaccaccaaggtcctgcacgggctgctgcacatctttgcgctcgtcatcgccctggttggtgagttcccggacgcggccttccccgccacctgcctgcctcttcaggcttggtggcggtgttcgactaccacaggaagaagggctacgctgacctgtacagcctacacagctggtgcgggatccttgtctttgtcctgtactttgtgcagtggctggtgggcctcagcttcttcctgttccccggagcttcattctccctgcggagccgctaccgcccacagcacatcttctttggtgctaccatcttcctcctttccgtgggcaccgccctgctgggcctgaaggaggcactgctgttcaacctcgggggcaagtatagcgcatttgagcccgagggtgtcctggccaacgtgctgggcctgctgctggcctgcttcggtggggcggtgctctacatcttgacccgggccgactggaagcggccttcccaggcggaagagcaggccctctccatggacttcaagacgctgacggagggagatagccccggctcccagtgatgcgcccggccggccctgggggttcgcggggtgtcttcttgcctgcccctgctgaggcgtcttcaggactgcaggctccggagagtggctctggcagcaggcgggcgcgtgggtgcagctgcatctgtttgagtgctgctttctggggtcaggtctccgcctcctctgcttctcctttctccgccgctatagaccagttcattgtgtgtggctcccgtgtctctgttgcccccttcagtgcagaaggctttgggtaggacttcgggtgttcggtcctggtcgcagagcacagatctttaaagaagcgagagaggaggccccaccctcctggcagcagatgcctggggcaaggccaggggaaactgggggggcctcagggacaggcctggaaaggccacgatggctgctgaattcaaacaaggagtccctccagcctgaataacacgtggcacaaatgggcccggcctttggcagaggagcaagtgatatgatgtgtaaagtatgttggtggtgaaagcaaggttccccaggagaggggagggactggcccctgggaagctctgagatgaggctgtggcccagctgtagtcctgaccttcctcttctttaaccctttagccctaggatggctttggtgggagaggggatagaagcccatgacttcagacagactttctcttggcagatgcaggcgggcctcctcccaggctgctccagacatgggggttggggatggggggcaccttgcagccccttcctgctggggctccctccttgtagcaccccccttgcggctcagctctggtttcctctcccaggctcacccaggctctgctcaggctgggaggcagagggcacaaaccttataattttttaaatgaaaaaccgctgctgctggctgtggctagagccccctggggctgctggagctgctgcctctgttctggaggacgagccttctccttatctgctgcccatctttccaggaagtcaggatggagtcagaacaactacagtcatcccccgtggtgtctgcacatcactccagccccataaagagtgtcatgttagctgagtcaccatttggcttcggcctggaaatagtgtgattagaacactgatcgtgtgcgaggccaggagatcaagaccatcctgactaacaaacacagtgaaaccccgtctctactaaaaatacaaaaaaattagccaggcgtggtggtgggcgcctgtagtcccagctacttgggaggctgaggcaggagaatggtgtgaacccgggagatggcgcttgcagtgagctgagattgcactccagcctgggcgacaggctcaaaaaagaaaaaaaaaagaacaccgatcatgtgcttcttggatctggtgactgttctctccctgttttcctttctttttgggtgtttgaggagcatggcttagcttgagacacacacagacactgtgtacttcagtgaagggcttaatatacagtttccaaacctgacgactcttcttcttgtaatggctgcccttttcctacctgaggccgtcttagagaaaggggccagtctcctctaatgctcagatttcccatagttggcttttgctgtgtctcctgcctcaggcagtgtcatttctgggagcaggtggttgtagtccaggcccctccccagcagggtctgcccaggctccttcgagcccctttccccgcctcctctcagcctgtccggatgacagtgttcgcctcctgtttagactgtacactcttcaggggtaggggtgccgtcagttcttcaatcagctggcacacacttgtatagtgaaatgtttacatgtgggaaaactccgccttagacaaactaccaaagtacaatcgtgtctctctctagccggaatgctacagagagaaatggaaccttagatttgcaacaaaagtctgtaaactggtctgtttgccaaagtgaacactggatgactaaggagctgaagaaggcccccagaagcggatttgtggtgggttattttattttgcctgtggccaatcttctgtgaaatacaatgtgctgttggtgcaacagatgattcaataaatgtctacagcag

SEQ ID NO: 597 - DNA, 3447 bp, Homo sapiens
aacaacaacaacaacaaaaccaaatgaggttaatattccacagtggtgtggggctagacacagttacacagactttatacaggcggcaatcaagcgtcctggacttcaagaaatctagtttgtctgtcgcgccacgcagtcaactggagtgtcactgtgggttctatttacaccgttatgagaaaaacctgtggcggaggaaaactcggtaactccggtcgcagaccgcccatctacagcagtgagcgaacccaaaccccacacggccaagtcccgcgggtttcaggagactccgaagaggtcgggggccaggggcgactatggcgcgggggaggctgggaattgtagtctccacctgcctccgagggcggggtccgagggcggggctctcaggccgagggggtgggtgggtcgccgagcgccccggctcgccccggcgtttccggtcgcaggcgggctctggaggaggaggggcgccgcgaccgacgcgcgcgaggcggtctgggaaaaagggcggtgcgagcgggtgcgcgcgcagcgggccggcagtggcggcggagatggaggggggaggccgggacaaggcgccggtgcagccccagcagtctccagcggcggcccccggcggcacggacgagaagccgagcggcaaggagcggcgggatgccggggacaaggacaaagaacaggagctgtctgaagaggataaacagcttcaagatgaactggagatgctcgtggaacgactaggggagaaggatacatccctgtatcgaccagcgctggaggaattgcgaaggcagattcgttcttctacaacttccatgacttcagtgcccaagcctctcaaatttctgcgtccacactatggcaaactgaaggaaatctatgagaacatggcccctggggagaataagcgttttgctgctgacatcatctccgttttggccatgaccatgagtggggagcgtgagtgcctcaagtatcggctagtgggctcccaggaggaattggcatcatggggtcatgagtatgtcaggcatctggcaggagaagtggctaaggagtggcaggagctggatgacgcagagaaggtccagcgggagcctctgctcactctggtgaaggaaatcgtcccctataacatggcccacaatgcagagcatgaggcttgcgacctgcttatggaaattgagcaggtggacatgctggagaaggacattgatgaaaatgcatatgcaaaggtctgcctttatctcaccagttgtgtgaattacgtgcctgagcctgagaactcagccctactgcgttgtgccctgggtgtgttccgaaagtttagccgcttccctgaagctctgagattggcattgatgctcaatgacatggagttggtagaagacatcttcacctcctgcaaggatgtggtagtacagaaacagatggcattcatgctaggccggcatggggtgttcctggagctgagtgaagatgtcgaggagtatgaggacctgacagagatcatgtccaatgtacagctcaacagcaacttcttggccttagctcgggagctggacatcatggagcccaaggtgcctgatgacatctacaaaacccacctagagaacaacaggtttgggggcagtggctctcaggtggactctgcccgcatgaacctggcctcctcttttgtgaatggctttgtgaatgcagcttttggccaagacaagctgctaacagatgatggcaacaaatggctttacaagaacaaggaccacggaatgttgagtgcagctgcatctcttgggatgattctgctgtgggatgtggatggtggcctcacccagattgacaagtacctgtactcctctgaggactacattaagtcaggagctcttcttgcctgtggcatagtgaactctggggtccggaatgagtgtgaccctgctctggcactgctctcagactatgttctccacaacagcaacaccatgagacttggttccatctttgggctaggcttggcttatgctggctcaaatcgtgaagatgtcctaacactgctgctgcctgtgatgggagattcaaagtccagcatggaggtggcaggtgtcacagctttagcctgtggaatgatagcagtagggtcctgcaatggagatgtaacttccactatccttcagaccatcatggagaagtcagagactgagctcaaggatacttatgctcgttggcttcctcttggactgggtctcaaccacctggggaagggtgaggccatcgaggcaatcctggctgcactggaggttgtgtcagagccattccgcagttttgccaacacactggtggatgtgtgtgcatatgcaggctctgggaatgtgctgaaggtgcagcagctgctccacatttgtagcgaacactttgactccaaagagaaggaggaagacaaagacaagaaggaaaagaaagacaaggacaagaaggaagcccctgctgacatgggagcacatcagggagtggctgttctggggattgcccttattgctatgggggaggagattggtgcagagatggcattacgaacctttggccacttgctgagatatggggagcctacactccggagggctgtacctttagcactggccctcatctctgtttcaaatccacgactcaacatcctggataccctaagcaaattctctcatgatgctgatccagaagtttcctataactccatttttgccatgggcatggtgggcagtggtaccaataatgcccgtctggctgcaatgctgcgccagttagctcaatatcatgccaaggacccaaacaacctcttcatggtgcgcttggcacagggcctgacacatttagggaagggcacccttaccctctgcccctaccacagcgaccggcagcttatgagccaggtggccgtggctggactgctcactgtgcttgtctctttcctggatgttcgaaacattattctaggcaaatcacactatgtattgtatgggctggtggctgccatgcagccccgaatgctggttacgtttgatgaggagctgcggccattgccagtgtctgtccgtgtgggccaggcagtggatgtggtgggccaggctggcaagccgaagactatcacagggttccagacgcatacaaccccagtgttgttggcccacggggaacgggcagaattggccactgaggagtttcttcctgttacccccattctggaaggttttgttatccttcggaagaaccccaattatgatctctaagtgaccaccaggggctctgaactgcagctgatgttatcagcaggccatgcatcctgctgccaagggtggacacggctgcagacttctgggggaattgtcgcctcctgctcttttgttactgagtgagataaggttgttcaataaagacttttatccccag

SEQ ID NO: 598 - DNA, 2946 bp, Homo sapiens
agcggcggtgggaggagtgggggacctggagggaggtggtgaaatagaatggtcctgggggacgggactccaggggtttgacaattaggcgtcaagactgacttagacctgggaagaaaaccagaggcagtcgagcagagaggccaaacgccaggcagggcgaagtcagccggagatggagtggaaactggagcgcaccgcgcctcggagggtccgcacggaagaggagatgctgtgggaaagtatcatgcgtgtgctctccaaagacttgaagcagaagagaagtcaagattccgccaacgtactcgattcagttaatgctacgtattctgactttaagagcaactttgcgaagaggctgtccgcagaggttcctgttgcgagtagccccattaccacaaggtggcagcaaagtcaaactagggctctgtcctctgattcctttggggaagagcagtcaaccacctacctcccagaagcttccggatcagtgctgaagacaccgcctgagaaagagaccttgactctaggatcctgcaaagaacaactgaagacccccagcaaaggaatttctgaaacaagtaactctgctctccatttttgcaaggcacctcatgcaatggacagagactggaaagaaagtgttgcctcaaaagggcagaaatgcctaaaacaactctttgtaacccagaacgtggttcagcaggctaatggaaaaatgcagctctgtgagcaatccgaatgtgtttggaaaggctgcaaagatggagtcagagatgaatccttccatcttaaaagttctggtgatataaacgattccatactccaaccagaggtgaagattcatattactggtcttcgaaatgactactatctgaatatcctagattggagttttcagaatcttgttgccatagccctgggctctgctgtatacatctggaatggggagaaccacaatgggattgaaaacatagacttaagtctcacttgtaactatatctcttctgtgtcctggataaaagagggaacttgcctggcagttggcaccagcgagggagaagtgcaattatgggatgtggtaactaaaaagcggctgagaaatatgcttggtcatttgtcagtagttggggctctgagctggaatcactttatcctcagcagtgggtcaagactggggcgtgtttatcatcacgatgttcgggtagcccagcatcatgttggaacacttcgccacaagcaagctgtgtgtgctctgaagtggtcaccggatggcaggctgctttccagcggctgcagtgatggactgctgacaatatggccccacgatccaggtgccagtgcacagggccaaccgctgaaagtcataacccagtctacggcagtcaaggccatggattggtgtccctggcagtctggggtccttgccattggaggaggaatgaaggatggacgcttacacatcttggatataaatgctgggaagagcatccagaccccaagcacaaactcacagatttgttccttaatctggctacctaagacaaaggagattgcaactggtcaaggtactcccaagaatgatgtgactgtgtggacctgtcccactgtgtccaggtcaggccacaggggcagagtgctgcacctggctttgagtccagaccagacccgggtgttttctgctgcagctgatgggacggcctctgtatggaattgctactagcacccagcccctctaggtttcagtttccttatttctgagtgaagatgatgatgttggctatgtcttctccatggggtttttatgagtatcaaacaagttgaaatactcttcttgatgtgaatgcctgttctcctgttcttcttttgcagattgctttacttgctctgcttcccagagatccgcttcttttcttctctgctttcttctttctgcccctcttcctccccctcctcttcttcctcccattcttacccctttctagagattcattttcactactttattcagaataacatctatagcaaagatttctacttctttcccgtatgacttttctccccagctccaaacctcatatttctgattgcctcaggatagttcccttttgagatactttcctgtctttagctcaatctcaacacattgaaaacacaactcattcacttgaaaaacacttactaaaatctcactatatgctaggcagtatgttaagcatgcatattgctctctctaaaaatcagttctgtaggaatccctttcccctcctgatggtctcatccttatcctggtctcccactcagggaacctcctgattattctgctctgtgcttcctcagttcaccctttgctctcttttcttttgcttcacctagtcacatcctgtgtgcctgacagccagtctgctgtaattgtcttagaactgatcctcttgactccacaccactgctaggttgaacatctaaaagtcctgtgctgatcctctcagtcccctgctcatcaactctcaaggacaacctattaccaaacacctttgacctcaacctctggagtcctcagcccaggacttgaagttaggagatctttttttgccttggctctgccataaatacaccctgtaaccttggatgtgttgcaacatctgcaaggataggaatttgatcactgctaaggttccttcaaacttgatcagttcgctgttctgtcttttggatgttaattcacattcatctcctatattaagactttggctaagtcttgtgatttcttgccttattggagcttttcttctaatctgaattcttgcttctctctccttttcctttacacacccacacaagtcctaacctctccaggaagtgttttgaaatgatgttacctgggtttgagttcttggcattagcctgtatcatctatttggtattattatactattatagctgttt

SEQ ID NO: 599 - DNA, 2942 bp, Homo sapiens
gtctgggctctgaagaggaccggatacataaggcagaacccaaggaagccttaggctcaggtctctgcctgaaggacagaagtcggtcctaggccccccaggctctgaccttctttcccaggatgaggtggggccaccatttgcccagggcctcttggggctctggttttagaagagcatctcaacctcgacttccggctggcaggcacgggactttgtagtgacccggaggaaccgcaggaaccagctgctatcatcgtcaacctgctgcgcaaatacatgctgcctcaggccagcattctggtgaccactcggccctctgccattggccgtatccccagcaagtacgtgggccgctatggtgagatctgcggtttctctgataccaacctgcagaagctctacttccagctctgcctcaaccagccgtactgcgggtatgccgttggcggttcaggtgtctctgccacgccagctcagcgtgaccacctggtgcagatgctctcccggaacctggaggggcaccaccagatagccgctgcctgcttcctgccgtcctattgctggctcgtttgtgccaccttgcacttcctgcatgcccccacgcctgctgggcagacccttacaagcatctataccagcttcctgcgcctcaacttcagcggggaaaccctggacagcactgacccctccaatttgtccctgatggcctatgcagcccgaaccatgggcaagttggcctatgagggggtgtcctcccgcaagacctacttctctgaagaggatgtctgtggctgcctggaggctggcatcaggacggaggaggagtttcagctgctgcacatcttccgtcgggatgccctgaggtttttcctggccccatgtgtggagccagggcgtgcaggcaccttcgtgttcaccgtgcccgccatgcaggaatacctggctgccctctacattgtgctgggtttgcgcaagacgaccctgcaaaaggtgggcaaggaagtggctgagctcgtgggccgtgttggggaggacgtcagcctggtactgggcatcatggccaagctgctgcctctgcgggctctgcctctgctcttcaacctgatcaaggtggttccacgagtgtttgggcgcatggtgggtaaaagccgggaggcggtggctcaggccatggtgctggagatgtttcgagaggaggactactacaacgatgatgttctggaccagatgggcgccagtatcctgggcgtggagggcccccggcgccacccagatgagccccctgaggatgaagtcttcgagctcttccccatgttcatgggggggcttctctctgcccacaaccgagctgtgctagctcagcttggctgccccatcaagaacctggatgccctggagaatgcccaggccatcaagaagaagctgggcaagctgggccggcaggtgctgcccccatcagagctccttgaccacctcttcttccactatgagttccagaaccagcgcttctccgctgaggtgctcagctccctgcgtcagctcaacctggcaggtgtgcgcatgacaccagtcaagtgcacagtggtggcagctgtgctgggcagcggaaggcatgccctggatgaggtgaacttggcctcctgccagctagatcctgctgggctgcgcacactcctgcctgtcttcctgcgtgcccggaagctgggcttgcaactcaacagcctgggccctgaggcctgcaaggacctccgagacctgttgctgcatgaccagtgccaaattaccacactgcggctgtccaacaacccgctgacggaggcaggtgttgccgtgctaatggaggggctggcaggaaacacctcagtgacgcacctgtccctgctgcacacgggccttggggacgaaggcctggagctgctggctgcccagctggaccgcaaccggcagctgcaggagctgaacgtggcgtacaacggtgctggtgacacagcggccctggccctggccagagctgcccgggagcacccttccctggaactgctacacctctacttcaatgagctgagctcagagggccgccaggtcttgcgagacttggggggtgctgctgaaggtggtgcccgggtggtggtgtcactgacagaggggacggcggtgtcagaatactggtcagtgatcctcagtgaagtccagcggaacctcaatagctgggatcgggcccgggttcagcgacaccttgagctcctactgcgggatctggaagatagccggggtgccacccttaatccttggcgcaaggcccagctgctgcgagtggagggcgaggtcagggccctcctggagcagctgggaagctctggaagctgagacactggcggcaggcacctagctatgtgaccactggccctaaaccttttccctctgtgtcctcctggcttgcactgctccctctagaaagattccttcaggtctggaggcagaggaatgggcatagctgagccagttgccctcctagggcatgtttgaccaggactgagtctggaatctccaagttaaagatggtgaatcaatgcttcgggcttggagatggaacatgcctcctctccattcagctagaaggaccaaagcatgtggcatttggatggccagagtgccctgaagcaccactaccaaccttgcctccccctcctctcaaagagcctctgactgtgtcaccaaggggctcacatcttatgtctgccatgccaggggtgtcgccatccagatgtgttggaagcttcccctcctgccttatgctcacctgtggacaccgaggatgccctcacattggtgctttctcctcatcctcatgccccctttgccacaatggtatgatggcttggtagcccctcgaggcagatgcacctgacttgctgctattaaaaagccgtgtgccttct

SEQ ID NO: 600 - DNA, 2995 bp, Homo sapiens
aagatggcggcgcgccggggacggagagacggagtcgcgccgcccccgagtgggggccccggtccggaccttggcgggggagcccgcggcagtggttggggaagtcgaagccaagcgccgtatgggactttgggcgctgtgagcggcggcgagcaggtgctgctgcatgaggaggcgggtgattctggctttgtcagtctctctcggctgggcccatctctgagggacaaggacctggaaatggaggagctaatgctgcaggatgagacactgctggggaccatgcagagctacatggatgcctcccttatctccctcattgaggatttgggagccttggagagagcaggttatctctggaggaccagaatgaagtgtcgctgctcacggctctgacggagatcttggacaatgcagattctgagaacctttctccatttgacagcattcctgattcggagctgcttgtgtcaccccgggagggctcctctctgcacaagctgcttactctctctcggacacccccagaacgtgacctcatcaccccagttgacccactggggcccagtacaggcagcagtagagggagtggggttgaaatgtctcttccagatccctcttgggacttctccccaccctctttcttagagacctcttcccccaagcttcctagctggagacccccaagatcaagaccacgctggggccaatccccacctccccagcagcgcagtgatggagaagaagaggaggaggtggccagcttcagtggccagattcttgccggggagcttgacaactgtgtgagcagtatcccggacttccccatgcatttggcctgccctgaggaggaagataaagcaacagcagcagagatggcagtgccagcagctggtgatgagagcatctcctccctgagtgagctggtgcgggccatgcacccatactgcctgcccaacctcacccacctggcatcacttgaggatgagcttcaggagcagccagatgatttgacactgcctgagggctgcgtagtgctggagattgtggggcaggcagccacagctggcgatgacctggagatcccagttgtggtgcgacaggtctctcctggaccccggcctgtgctcctggatgactcgctagagactagttctgccttgcagctgcttatgcctacactggagtcagagacagaggctgctgtgcccaaggtaaccctctgctctgagaaagaggggttgtcattgaactcagaggagaagctggactcagcctgcttattgaagcccagggaggtcgtggagccggtggtgcccaaggagcctcagaacccacctgccaatgcagcaccaggttcccagagagctcgaaagggcaggaagaagaagagcaaggagcagccagcagcctgtgtggaaggctatgccaggaggctgaggtcatcttctcgcgggcagtctactgtaggtacagaagtgacctctcaggtagacaacttgcagaaacagcctcaggaagaacttcaaaaagagtctgggcctctccagggtaaggggaagccccgggcttgggctcgggcctgggcagctgccttggagaattctagccctaagaacttggagagaagtgctggacaaagtagtcctgctaaagaaggccctctagacctctacccaaagctggctgacactatccaaaccaatcctataccaacccatctctcattggtcgactctgcccaagccagccccatgccagttgactctgttgaagctgatcccactgcagttggccctgttctagctggccctgtacctgttgaccctgggttggttgaccttgcttcaaccagctcagaactggttgagcctctcccggctgagccagtgctgatcaacccagtcctggctgactcagcagcagttgaccctgcagtggttcccatctcagataacttgccaccagttgatgctgtcccgtctggcccagcaccagttgatctagcactggttgaccctgttcctaatgacctgactccagttgacccagtgctagttaagtccagaccaactgatcccagacgtggtgcagtgtcatcagccctggggggttcagcaccccagctcctcgtggagtcagagtccttggacccaccaaagaccatcatccctgaagtcaaagaggttgtggattctctgaaaattgaaagtggtaccagtgctacaacccatgaagccagacctcggcctctcagcttatctgagtaccggcgacgaaggcagcaacgccaagcagaaacagaagagagaagtccacagcccccaactgggaagtggcctagccttccagagactcccacagggctggcagacatcccttgtcttgtcatcccaccagccccagccaagaagacagctctgcagagaagccctgaaacaccccttgagatttgccttgtgcctgtaggtcccagccctgcttctcctagtcctgagccacctgtaagcaaacctgtggcctcatctcccactgagcaggtgccatcccaggagatgccactgttggcgagaccttcccctcctgtgcagtctgtgtcccctgctgtgcccacacctccctcgatgtctgctgccctgcctttccctgcaggtgggcttggcatgccccccagtctgcccccacctcccttgcagcctcctagtgtctggtactcctggtgcctatgccgtgcctcccacttgcagtgtgccttgggcaccccctcctgccccagtctcaccttacagttccacatgtacctatgggcccttgggatggggcccagggcctcaacatgctccattctggtctactgttcccccacctcctttgcctccagcctccattgggagagctgttcccccttcccctactctaggggagagagctgctagtgagatgactgttttataaagaaatggaaaaaagtgaaataaaaaatatgttgaatcag

SEQ ID NO: 601 - DNA, 2853 bp, Homo sapiens
gtacccattttgcagataaggaatcagaggcaccacgaggtgaaaggacttgcctcagctgctcggcgaggctggagcttgggccaaggtagttggggcccagagcccgtgccctggagcgctgcgtcggtgaggtgctcaaattgcatgaggctggagtttctgggcctgccagagcggggaatagaaggctcaccgtggaggcactgaccctgctccgaggggctcggagtctggtgagggccagacacaaagcaggtcatttctacattgtgatcggggtactgagaaaactgaggtggccggagattgtgtctacttctgtagacagccacggacacagcacatggcgggagaccagagagaagccactgaccggcagaggctgtcccagaggctggcgctgggggccctgcaggggtccaggtgccccagagtctggtgctgggggctccccaggggtccaggtgcagaagggctttcccggatgagggaacagcaggtgtcaaggctggcagcagtgactgtgctgatgatgtctgggggccccagctgtgggaggtggcgggaacaggggtgtggggaggtgagggaccccgactaattcacgagcagccctcgaggtgtcttgtgggcactgaaccatgtgaaggtggctctggggtctgattcatgttctgagagttcttcagctgccctggtgggggttgtgtgagagagagccagcgaaggaggtacaggaaagttcttgtcccccgcctcgtgttagtgcaaacggaggtaaactgaggagcacgggaaaggctgtgcttctgcaggggagtcacgagtgagcagagtgcgtgcaggcggctcacccaggcctgccatgggtccttagccctgcctcccaggaaccccggagggccaccctgctcaggctgttcctggcataagcgcgtgacagcggggaaggtacagatgtgggattctggacccttctgccaacagaagaaccgggcgccgtggagcctcctcccagctgccctgggcacgctggaaatacctccgcaggctgttttctttcccttcctgtcagtgcccaacgcgtgttgttctgtgcccagaggaactggctcttcgggttctgtgagtccaggggattggagccattggagccctggggcctgggagtctaaatttgaccttgcgatttgcttattttggggggtcagggccggttgcccacagcggggtcttagcatggagccagggttccacgtccccctcgttccagctcagggcgaggaggcggaagggaaaggagggaaacagagcggtggggagtttcacttttgttctctcttttctgtgtgcttccttatgttttaaataacatttatgcgtcatttaccaggcggcgtgtgcattataattccctcaattttactgatgaggaaatcgaggcaggaggaagttgagtactacagagctgtcctgtggagccgggccgtctggcactggagacaggcttctatccactctgcctgcggttcgcaaagtggggtccccagccatcggcaccagcatcacctggaacttgtgacaaatgcacattccagggcccttctccagacccacggaatctaggacaaggctcagccatctgtgccttagggagctctcctggagattctcacactggtccagggggttcttcagttaactgacacctttgttgagcacctacttaccacataagccattgacgagattgtgctggaaacatgcaactatgctaaaaacaaagactgtcacctgccctttcagagctacgcagagcagcctgggactcacagcgaaacagcttttgtctctgggcagttgcagagcaggtttgtttgtttgtttgttttgttttaggctttttgccaaataccagaggccagaactatggagaggctgctgaatccagggccaggagggctccaaggagtttgcaaacctagatctccgggaggccctggttaaaggaggctaaatccgttgggacagacatgggtgtttcaggttgggatctcatggctgagtgtgcaagctgccaacacttccgtgtatgctttattcccgtggtttttgtttgttttgtttttttttccagatttaaagactaataggagatgagcaatggcagctttggggaccttttgtctttgctttggcattttggccattggctgattttaaaaacaaaatagaactatctggtggccccaagccccaatgcataagctcaaggtggagtccccagggctgtttttcccgatggagagtttggtgcccattctgtgatcacaggggaagctgctgggccgttttcacctcctcctcccacatacacaggcatgcttgcggtagactcacaagaagttacagaacatcagctgcccgcaaaaagcatcttttgtgaaagacagggagcaaggatatattaaaaacaagcaagcagctgaggtgggtggatcatgaggtcaggagattgagaccatcctggctaacacagtgaaaccccatctctactaaaaatacaaaaaattagctgggcatagttgcacgtacctgtagtcccagctacttgggaggctgaggcaggagaatcgcttgaacccaggaggcagaggttgcagtaagccaagatcacaccactgcactccagcctgggtgacagagtgagactccatctcaaaaaaacaaaaaaacaagcaggtgcaggtgctcatgcctgtagtcccagctacttgggaggctgaggtggagggatcgcttgaatccaggagttagaccagcctgggcaacatagcaagaccctgtctt

SEQ ID NO: 602 - DNA, 3559 bp, Homo sapiens
aagaatcaagaacaaagccctgacctgttcaggacagcaaagacaaggctgggtttccagcagaagccagagtgcggccggtgctgaggagtctcttctgagcaccacgtcccttggcaatgccgccgaaaaagagagctcctggccgagaatcacatgaaaatggacggggacgtttataccaacacaacgccctctcagccccatcgtgcacaaacgcagcgcagagccccagtcttgagagtggagcagccaagccaggggggactctgggcccctctgccacccacagccccagtggccgaggcccagggcagcacaaggttgcccatcagtggaggtgggaggtcattcccacctccacttgcctgcccggagcagaaagggatgcaggaggaagcaagacggcttacctggccatggctgaagaagagcagggctcccgagtacatgagctcccgggcctccgtgtgcttgctctgggacatgtacctgccacagagaggagaccgtgagccacgcccacgtgccctcgccaccgcgctcccccgctcatcttcaggtcagaagctaaaaacaaggcgcccaggaacaggtggcatcctaaaagcagccgctcccagggcccaggtgctgcgtggagggggtctatcctgggtgtcctgctgaccatgagggctgcatggggcgcctctggacactaagggcctatctgtgtccaaatacaccaggagccagaaagcagcctcaccctggagcagctcaccggtttcagtagctgggaccagaaaggccactgggcagggcaggtgcgcagggaaggagcagggcatgtgcatgtggccacctgagagctgagtggccacaggcaggagccaaaggatggggggctccaggctggggtcccacgggggacagtaacggctgtgacagcaccttcttcccccacggggccagtgtccccgccctctgcccctctgcgtgccacacccctccccccacgggagggaagggtctggggtgccccgttgcatcatgctcgccctgcatcacgtccccactcccagagcaccgctggcagggaaagctggagctcctcaggccgcacggggacagaggcacggggtggcgagaggtatggtggggaccagcacgtgacagacgatgtggagagaagccgagatggccgcactgctgtaagcagcagagcccctgcctgcgagagcagcaggcgtggagggcaggaggcagcctctgcttggatgcgctgcacctcccagtccagtggtggggcccagaacatgttatttcattggctacacgtttttcttaatgatcgctgccttattatcaaaagatacataacgagttaatcagctctgtgcctgcgagccaaatgtccttggacaaagccttgtttaaaaataaatctagttaaagaaaaatactaagtaaacagcagtgcacaccggattcgggggctcacacctgtgatctcagccctttgggaggctgaggtgggaggatcgcttgagctcatgagtttgagactggcctgagcaacatagtgagaccctgtctctacaaaaaacacagaaattagctgggcatggtggtgtgcacctgtggtcccagctactcgggaggctgaggtgggaggactgcttgagtccgggtagtcaaggccgcagtaagccatgattgcaccactgcctagacggatgacagagcgaggcgccatccccccaaaacaaacaaacaaaaaccaattgcagtggaggtgataaagagccacagcaacgccactgaggaccagaatgaccttggtgttgccaggacgggaaggccagccgagaacgcaaagggttggatgctcagttaaccacagaaaagggctcctcttcagaaggcaccacagccagggaccccaaacacagacagccccgccacatccgggcatctcattagcctggcacacaggccctccccccacaggagaccgcttcgtgctgcacagaggcagggcaccaggagggaaaagcccgcacccaagagagaaagtgcccccgcacccccgtcagcctgcaggccgttggcaggcctccggttttgctgtgctccccgcacagtgaaggttctggagggagacccaccccaacaccacagcaggagcctcgacaggaccactgactctgtgaccggccgtcctagttccagtcctgcagggacatgactgactcagaggaggccgggagccgtctggcacagggcactctggaaaaacaagctcccagacacgcctggcctcacgatgccgccagtggggccacgggcagaaccgcatgcaccgaccctgagcaagcaccacaccagcttctgctttgccgatactacagcgttctggatgcttctatctgaggtaaagcaagaggtggcgacttagaaaccagaagaaaaaaaggactccctggaaggcagtgacccatattcctgcacgaggagcctgctctggggggcactgccgatggtcacggcccccggcctggtttggactgcgccttgcagccggctcccttcttccctgggcagctgggagccgggcaaggggaaaaaggacgggaggagaattctgggcacacagtggtccccggcctggctgggggcacccgtttccaggtccaggaatgccggtgacaggcaaaccgtctaaggcggctctgaacgtggacggcttctcctcctgtactggagaattctggaagctgcgaaggattttggtttccaggtgactaagccaggacaggtaccctctcaagcccgaggccggggagagtggggggcagctgggcatggccgggccttctcccggcccggctctgcatgctgcgcactattggccgtgccatgtggacacccagacgtgccttccagatagggaaatggcttctgcctgctgacaggcgctgagagccagtgagcgctggtgctctctgccggccaaaacatctgtatccacagagcaaagtgtctgggcaaacaatctagctgattttgctcttctcttacaaaaacattaaaaagcagaacacagaaacgcaagcattagaactagtggccgagactgtcggtgtcaaatgaagaaagaccgagctcatggggcgaatcccgcccttctctcttggcagacggaagctggcttgcgcgttcagctgtcagggacacgtgaaggatgaagaggaaatactcaagacacacacaggtgcctcgggacagggggccagaggagatttcacaaggacccctccgccgactgccgcgagctaaagcgcactcacgcccggacgcagggctggctggacgcgcctgtaaggagggctgaggcctgctctgctctgccaggagtcactccgagaagggacctgagccggcaggtacagctccttcacaagacgctcctcttaggccctgggctaggggtgcaccgcacacactagaccgttttccttttaaaaatctctttagatgactgaagagacaaaagaaggtcagaggccgcaat

SEQ ID NO: 603 - DNA, 4182 bp, Homo sapiens
agtgctgcgccgacagcggtcaggatctcggctttcttgcttcgagagggactaggtgcctccaccagagcttctgtcgctctgtaacctgcactgtgacctacactagtcgcgggagccacgcagaggacgccggaacaccctggaagccgagaaatggacccagtggcttttaaggatgtggctgtgaacttcacccaggaggagtgggctttgctggatatttcccagaggaaactctacagggaagtgatgctggaaactttcaggaacatgacctctttaggaaaaaggtggaaagaccagaacattgaatatgagcaccaaaaccccaggagaaacttcaggagtctcatagaagaaaaagtcaatgaaattaaagatgacagtcattgtggagaaacttttaccccagttccagatgacagactgaacttccaggagaagaaagcttctcctgaagtaaaatcatgtgaaagctttgtgtgtggagaagttggcctaggtaactcatcttttaatatgaacatcagaggtgacattggacacaaggcatatgagtatcaggaatatggaccaaagccatgtaagtgtcaacaacctaaaaaagccttcagataccgcccctcctttagaacacaagaaagggatcacactggagagaaacccaatgcttgtaaagtatgtggaaaaacctttatttcccattcaagtgttcgaagacacatggtaatgcacagtggggatggaccttataaatgtaagttttgtgggaaagcattccattgtctcagattatatcttatccatgaaagaattcacactggagagaaaccatgtgaatgtaaacagtgtggtaaatcctttagttattctgctacccatcgaatacataaaagaactcacactggagaaaagccttatgaatatcaggagtgtgggaaagcatttcatagtcccagatcctatcgtagacatgaaaggattcacatgggagaaaaggcttatcaatgtaaggaatgtggaaaagcattcacgtgtccccgttatgttcgtatacatgaaaggacccactctaggaaaaatctctatgaatgtaagcagtgtgggaaagcattatcctctcttacaagttttcaaacacacgtaagattgcactctggagaaagaccttatgaatgtaagatatgtggaaaagacttttgttctgtgaattcatttcaaagacatgaaaaaattcacagtggagagaaaccctataaatgtaagcagtgtggtaaagccttccctcattccagttcccttcgatatcatgaaaggactcacactggagagaaaccctatgagtgtaagcaatgtgggaaagccttcagatctgcctcacaccttcgagtgcatggtaggactcacactggagagaaaccgtatgaatgtaaggaatgtgggaaagccttcagatatgtgaataaccttcaaagtcatgaaaggacacaaacacacataagaatacactctggagaaagacgttataaatgtaagatatgtgggaaaggcttttattgtcccaaatcatttcaaagacatgaaaaaactcacactggagagaaactctatgaatgcaagcaacgttcagtagttccttcagtagttccagttccttttgatatcatgaaaggactcacactggagagaagccctataaatgcgagcaatgtgggaaagccttcagagctgtgtcaatcctttgaatgcatggtaggactcaccctgaagagaaaccctatgagtgtgagcaatgacggaaagccttcagatctgccccacacctttgaatacgtggtaggacacacaatggagagaaaccctatgcatgtaaggaatgtgggaaacccttcggatctgcccagaaccttcgaattcatgaaaggacacaaacacacataatgcactctgtagagagaccttataaatgtaagatatgtgggaggggcttttattctgccaagtcatttcaaatacatgaaaaatcttacactggagagaaaccctatgagtgtaagcaatgtgggaaagcccttgtttccttcacttcctttcgatatcatgaaaggactcacactggagagaacccctatgagtgtaagcaatttgggaaagccttcagatctgtcaaaaatcttcgatttcataaaaggacacacactggagagaaaccctgtgaatgtaagaaatgtagaaaagcattccataatttctcttctttgcaaatacatgaaaggatgcacagaggagagaagctctgtgaatgtaagcattgtgggaaagcattcatatctgccaagatcctttgaatacatgcaagaacacacaatggagagaaaccctatgaatgtaaagaatgcagaaaagcattcagcttgcctacttcctttcatagacatgaaaagacttacactggaaggaaacactatgaatgcaagcaatgtggcaaagctttctcttcttccagttcttttcaatatcatgaaagaacacactagggagaaaccctatcaatgtaagcaatgtgcaaaagcctttatttcttccacttcttttcaatatcatgaaaggactcacatgggagagaaaccctatgagtgtatgccaagtgggaaagccttcatttcttctagttcccttcaatatcatgaaaggactcacactggagagaagccctatgaatataagcaatgtgggaaagccttcagatcagcctcgcaccttcaaatgcatggaaggactcacactggagaaaaaccctatgaatgtaagcagtatgggaaagcgttcagacctgacaagattctttgaatacagataatgaatgtaaacaattaactgtttataataactgtatactaacaaatgatattctttttaaataagaagctataatatcccattggtgtcatgtattagatcagccttatactgttaaattgttattatttggacattgtgagtcagtataaccatgtggataaaatgccagacatctttttattcgaaaattttacttttcatgcttctgtacttacatttttatctcaaccttaatttttctttcttttttttttttcccccagaaagaatctcgctctgtcacccaggctggagtgcagtggcgtgatctcgggtcactgcaacctctacctccagggttcaagcaattctcctgcctcagtctcctgagtagctgggactgcaggcatgcgccaccatgccaggctgattttttgtgttttttagtagagacggggtttcaccgtgttggctaggctggtctcaaactccagacctcatgatttacccacctcggcctcccaaaatgctgggattgcagacatggaccatcatgcccagctgcaaccctaatttttcattcagtcataataccaatagttatctcatgcacctctgagtgccttcttccccaaaaccagcagtgccatacctgctgtcagcaagggtgtaatataccatagtgataaatatgaccaaaagccataaatgactgtgagatgtatgagaattacaagtcacattagtaagaagagaaaaattttggtcatgtttatgatttgaaatacgttttcctctatcacatttaaaaatatagttacaaaatgcccttgtttttgtcctgattcatcatggtcactgaggagcatcgtctcatatgcctggtatgtgacacgtgtctctccaacaataaaagacttggccttggctgggcatggtggctcacgcctgtagtcccagcactttgggaggccgaggtcaggagttggagaccattctgaccaatgtggtcaaaccccgtctctactaaaaatacaaaagttagcagggcgtggtggcatgctcctgtggtcctagctattcaggaggctgacataggagaattgcttgaatataggaggcagaggttgcagtgagccgaggttgcaccattgtactccagcctgggcaacaagagtgaaactctgtcttaaaaaacacaaaaaaagacttggccttagggccgagtgcggtggctcacgcctgtgatcccagcactttgggaggccgaggcgggcggatcactaggtcaggaaatggagaccatcctggccaacacagtgaggcccagtctctact

SEQ ID NO: 604 - DNA, 3252 bp, Homo sapiens
ggattcccgccccgaggtttctaaatccagacattcccgtttggctgagcactctaggcctacatccatgaagctaggagagcgacactcaaagactgcactattgagagaagctaacgttaaaggcagtgaatatattcgggagtccagctccggaacccgggagctcttttagtgggaggggcggcgctgatggcgcttctggcctccgaatgctagggggcgctgtgatcgccgggcggcctcttgggcgctgggagtccaccgcgcaagcgcatcctggcctttcttcagtccccacgtgcgatccttcccggcaactttttcgagaaaaatgcccaaattcaaggcggcccgtggggtggggggtcaggaaaaacatgcgcccctggccgatcagatcctggctgggaatgcggtgcgggcgggggtccgggagaagcggcggggtcgcgggacaggagaagcggaggaagagtatgtggggccccggctgagccgacggattttgcagcaagcacggcagcaacaggaggaactcgaggccgagcatgggactggggacaagcccgcggcgccgcgggaacgcaccacgcggctgggtccaagaatgcctcaggatggtaattctgaatcattaagataagattatgtttgatacacccaacaatactgtttaaggaggctgaaaagaatataatcagtcttagaaatatttccatagataacgcttactgtgtactgaccattccaagtaatgaacagacattaacttatttaatccttccattaatcttttaaggtgggtaccgttattatccctattttacaaatgaggaaacagaggcatagagaggtaaagtaacatgcccaagatcataccagggagtgggtgagccaggatttgaacctgggcagactgacttcagagttgaggttcataataacctccgtacaactgctagctttgtcctaaatggaatgactttcagttcctttgcaccctgcagtgattctgtctgtggtggatgaatgggcacagagagagaactctaagctgcatatcccagcaggatcgcagtatggcggtgctcacaggggactgtggggagtctggagcctcctggacagtgaccacagtgctccttgccccctctctcccctcctcttggcacttcccctctcaggcgcaccctggctgacatcatcatggagaagctgactgagaagcagacagaggttgagacagtcatgtcagaggtgtcgggcttccctatgccccagctggacccccgggtcctagaagtgtacaggggggtccgggaggtattatctaagtaccgcagtggaaaactgcccaaggcatttaagatcatccctgcactctccaactgggagcaaatcctctacgtcacagagccggaggcctggactgcagctgccatgtaccaggccaccaggatttttgcctctaacctgaaggaacgcatggcccagcgcttctacaaccttgtcctgctccctcgagtacgagatgacgttgctgaatacaaacgactcaacttccatcctattgcatttggttttggtattcttagtttttttagcggtaagctcaacttccttggacaagtcttcatatcctaagcttcatttaagccaaggtttttcaacctcagcattattgacattttgggctgggtaattttgtgtgtgtgtggaggctgtcctgtgcagtgtaggaggtttagtagatatctctgatctctacttctagactccagtagcaaccttcccccagttgtgaaaaccaaaaatgacatcagacattgccaaatgtcctctgggaggcaagactgcccctagtcaggaccactaatttattcccatctataataaatgctagctccaaaacatgcaggcatttagactgcctgtggtcaaactcctgagcccataaattttggcccttgggagtggagtctaggataagggtcctcaaccagttcattctgaccctgtgatattaacataatggtgtccctgatactttaggctgttttgggctaatgcatctcattgctaatcatactataaaaggacagggaggctgataaattctgtggcagcttatttgaaaatgcagaatgaagaaatgaaaatgagcccctctcccagattgatgcctaacagttgaaatatatgtcataaagtatgtacttgggcttgtccccccagagagcctctcaggttctcactcagcacctcataactcctacttcactgataatgctgaccaatttagcagaatgcttttccagcttgtagtaaatagagtagacaagctccttgaagtaatcagaactcctggcagtcgtaagaaatgatagctggcatcttcagaaagcaagcctagatccacatgaattcaacaatcagaggccatttagtttgggggcacattataaggtactataaagcaccttaactcaagacttccaaaaacctgagtttgactcttacccccacctgacagctgtgaggccttgggtgagttattaacctgaggcccagttcccatgtctgcataagtttccgtgtcctataagtgttgcgctgactctgggactgaaaagtcccaaactcagtgcctggcattgagtaggacttcagaaaagaggagcagtttgttttttgttttgttttgtgacaggatctcactctgtcgcccacgctggagggcagtggcatgatctcagctcactgcaacctcagcctctcgagtagctgggattacaggcacgtaccaccacgcctggctaatttttgttttattagtagagacggggtttcaccatgttggccaggctggtctcaaactcctgacctcacgtgatccacctccctcagcctcccaaagtactgggattacaggcgtgagccactgcgcccaactgagaagcagctttaaatacatttcagtctgggcatggtggcccgggcctgtaatcttagcactttgggacgccaaggcaggagcccaggagtgtgagaccagcctgggcaacatggggaggccccatctctacagaagaataaaaaactagctgggccttgtactatgttcctgtggtcccagctactcgagagactgaggcgggaagatcgcttgagccagagagatagaggctgcagtgagccatgatggtgccactgcatgccaacctgggcgacagaggtagactctctctc

SEQ ID NO: 605 - DNA, 2722 bp, Homo sapiens
tgggctttgtggagcgctgcggagggtgcgtgcgggccgcggcagccgaacaaaggagcaggggcgccgccgcagggacccgccacccacctcccggggccgcgcagcggcctctcgtctactgccaccatgaccgccaacggcacagccgaggcggtgcagatccagttcggcctcatcaactgcggcaacaagtacctgacggccgaggcgttcgggttcaaggtgaacgcgtccgccagcagcctgaagaagaagcacctgggccgctacctggcggcggacaaggacggcaacgtgacctgcgagcgcgaggtgcccggtcccgactgccgtttcctcatcgtggcgcacgacgacggtcgctggtcgctgcagtccgaggcgcaccggcgctacttcggcggcaccgaggaccgcctgtcctgcttcgcgcagacggtgtcccccgccgagaagtggagcgtgcacatcgccatgcaccctcaggtcaacatctacagcgtcacccgtaagcgctacgcgcacctgagcgcgcggccggccgacgagatcgccgtggaccgcgacgtgccctggggcgtcgactcgctcatcaccctcgccttccaggaccagcgctacagcgtgcagaccgccgaccaccgcttcctgcgccacgacgggcgcctggtggcgcgccccgagccggccactggctacacgctggagttccgctccggcaaggtggccttccgcgactgcgagggccgttacctggcgccgtcggggcccagcggcacgctcaaggcgggcaaggccaccaaggtgggcaaggacgagctctttgctctggagcagagctgcgcccaggtcgtgctgcaggcggccaacgagaggaacgtgtccacgcgccagggtatggacctgtctgccaatcaggacgaggagaccgaccaggagaccttccagctggagatcgaccgcgacaccaaaaagtgtgccttccgtacccacacgggcaagtactggacgctgacggccaccgggggcgtgcagtccaccgcctccagcaagaatgccagctgctacttcgacatcgagtggcgtgaccggcgcatcacactgagggcgtccaatggcaagtttgtgacctccaagaagaatgggcagctggccgcctcggtggagacagcaggggactcagagctcttcctcatgaagctcatcaaccgccccatcatcgtgttccgcggggagcatggcttcatcggctgccgcaaggtcacgggcaccctggacgccaaccgctccagctatgacgtcttccagttggagttcaacgatggcgcctacaacatcaaagactccacaggcaaatactggacggtgggcagtgactccgcggtcaccagcagcggcgacactcctgtggacttcttcttcgagttctgcgactataacaaggtggccatcaaggtgggcgggcgctacctgaagggcgaccacgcaggcgtcctgaaggcctcggcggaaaccgtggaccccgcctcgctctgggagtactagggccggcccgcccttccccgcccctgcccacatggcggctcctgccaaccctccctgctaaccccttctccgccaggtgggctccagggcgggaggcaagcccccttgcctttcaaactggaaaccccagagaaaacggtgcccccacctgtcgcccctatggactccccactctcccctccgcccgggttccctactcccctcgggtcagcggctgcggcctggccctgggagggatttcagatgcccctgccctcttgtctgccacggggcgagtctggcacctctttcttctgacctcagacggctctgagccttatttctctggaagcggctaagggacggttgggggctgggagccctgggcgtgtagtgtaactggaatcttttgcctctcccagccacctcctcccagccccccaggagagctgggcacatgtcccaagcctgtcagtggccctccctggtgcactgtccccgaaacccctgcttgggaagggaagctgtcgggtgggctaggactgacccttgtggtgtttttttgggtggtggctggaaacagcccctctcccacgtggcagaggctcagcctggctcccttccctggagcggcagggcgtgacggccacagggtctgcccgctgcacgttctgccaaggtggtggtggcgggcgggtaggggtgtgggggccgtcttcctcctgtctctttcctttcaccctagcctgactggaagcagaaaatgaccaaatcagtattttttttaatgaaatattattgctggaggcgtcccaggcaagcctggctgtagtagcgagtgatctggcggggggcgtctcagcaccctccccagggggtgcatctcagccccctctttccgtccttcccgtccagccccagccctgggcctgggctgccgacacctgggccagagcccctgctgtgattggtgctccctgggcctcccgggtggatgaagccaggcgtcgccccctccgggagccctggggtgagccgccggggcccccctgctgccagcctcccccgtccccaacatgcatctcactctgggtgtcttggtcttttattttttgtaagtgtcatttgtataactctaaacgcccatgatagtagcttcaaactggaaatagcgaaataaaataactcagtctgc

SEQ ID NO: 606 - DNA, 3143 bp, Homo sapiens
ttgcaaaatactgcgttgcagagggactgtgtgaggtgaaacctccctgccctgtgaacgggatgcaggtccactcgggcgaaacggaaatactcaggaaggcagtggaggactatttctgcttttgttatggtaaagccttagggacaacagtgatggtgcctgttccctatgagaagatgctgcgagaccagtcggctgtggtagtgcaggggcttccggaaggcgttgcctttcaacaccctgagaattacgaccttgcaaccctgaaatggattttggagaacaaagcagggatttcattcatcataaatagacccttcctaggaccagagagtcagctgggtggccctgggatggcaacagatgcggagagatccatagtatcaccaagtgaaagctgcggccccatcaatgtgaaaactgaacccatggaagattctggcatttcactgaaagcagaagctgtctcagtcaagaaagaatcagaagatcctaattactatcaatataatatgcaaggaagccacccttcttccacaagcaatgaagtaatagaaatggaattaccaatggaagattccactccgctggtcccttcagaagaaccaaatgaggaccctgaagccgaggtgaaaatcgaaggaaacacaaattcatccagtgttacaaattctgcagcaggtgttgaagatcttaacatcgttcaagtgactgttccagataatgagaaggaaagattatcaagcattgaaaagattaaacagctaagagaacaagttaatgacctctttagccgaaaatttggtgaagcaattggcgtggatttccctgtgaaagttccctacaggaagatcacattcaaccctggctgtgtggtgattgatggcatgcccccgggggtggtattcaaggcccccggctatctggaaatcagttccatgaggaggatcttggaggcagctgagtttatcaaattcacagtcatcaggccgcttccagggcttgagctcagtaatgtgggaaaacgcaagatagaccaggagggccgtgtgtttcaagaaaagtgggagagagcgtatttcttcgtggaagtacagaatattccaacatgtctcatatgcaaacaaagcatgtctgtgtccaaagaatataacctaagacgccactatcaaaccaatcacagcaagcattatgaccagtatatggaaagaatgcgtgacgagaagcttcacgagctgaaaaaaagggctcaggaagtatctcttaggcttgtcagacaccgagtgtcccgagcaaaaacaagtgtttgcaaacccaagtccaacccagaaatcccccgtgcagcctgtagaggacctagctgggaacttatgggagaagttacgtgaaaaaatcaggtcttttgtggcatattctatcgcaatcgatgagatcacggatataaataatgccacccagttggccatattcatccgtggtgtcgatgagaatttcgatgtgtccgaagaacttctggacacggtgcccatgacgggtacaaaatctggcaacgagatcttttcgcgtgttgagaagagcctgaaaaagttctgtatcgactggtcgaaattagtaagcgtggcctccactggcaccccagcgatggtggatgccaataacgggcttgtcacaaaactgaagtccagggtggcgacgttctgcaagggtgcggaactgaagtccatctgttgtataattcatccggaatcactctgtgctcagaagttgaagatggaccacgtcatggacgtggtagtgaagtccgtgaactggatatgctcccggggactgaaccacagtgagttcacaaccttgctctatgagctggacagccagtatggtagcctcctgtactacacggagattaagtggctcagtcgcgggctcgtgctaaagagatttttcgaatccttggaagaaatcgactccttcatgtcatccagagggaaacccctgcctcaactgagctccatagattggatccgagacctggccttcttggttgacatgacgatgcatctgaacgctttgaacatctctctccaaggacactcccaaatcgtcacgcagatgtatgacctgatccgggcgttcctagcaaaactgtgcctctgggagactcatttgacgaggaataatctggcccactttcccaccctgaaattggcttccagaaatgaaagcgatggcctgaactacattcccaaaatcgcggaactcaagaccgaattccagaaaaggctgtctgatttcaaactctacgaaagcgaactgactctgttcagctccccgttctccacgaagatcgacagtgtgcacgaggagctccagatggaggttatcgacctgcaatgcaacacggtcctgaagacgaaatacgacaaggtgggaataccagaattctacaagtacctctggggtagctacccgaaatacaagcaccattgcgcaaagattctttccatgttcgggagcacctacatctgcgaacagctgttctccattatgaaactgagcaaaacaaaatactgctcccagttaaaggattcccagtgggattctgtactccacatcgcaacgtgatggagagaaaactcctggcagggccctatggtgggaaaggctggagtcttctagtcccaagggattgggagatgacaaaatgaatttttttttcttttttgagatggagtcttgctctgtcgcccaggttggagtgcagtggcgtgatctcggcttactgcaacttccagctcctgggttcgaacgattctcctgcctcagcctcccgagcagctgggactacaggcgtgcgccaccatgcctggctaatttttgtattagtagagatgaggtttcaccatgttggccaggctggtctccaactcctgacctcaggtgatccacctgcctcgacctcacaaagtgctgggattacaggcatgaaccactgtgcccagctgacaaaatgagttcttaaactttttttttttttcagttttttttccactttgaatcagaaatataatctgcagtatcatacttgtttatattacattgtatgcctcactattcattaaaaatcaagaaagttttattgt

SEQ ID NO: 607 - DNA, 3212 bp, Homo sapiens
aaaaagtgaaatggccgcccgggacgagctcggcctcggcggggattctcttgaggccatgcccgtgccggccgccagaggtcgcccgaggatcacgaatgggcccgaggagctggctgccccttcccccgcggccttggctgattatgaggggaaggatgtggccaccagggtcggagaggcctggcaggagaggcctggagctccaagaggtggccaaggagacccagctgtacccgctcagcaacctgcagatcccagcaccccagagcggcagagcagccccagcggatctgagcaacttgtcagacgagagagttgtggcagcagcgtgttgactgattttgaggggaaggatgtggccaccaaggtcggagaggcctggcaggacaggcccggagccccaagaggtggccaaggagacccagctgtacccactcagcaacctgcagatcccagtaccccagaacagcggaacagccccagcggatctgagcaattcgtcagacgagagagctgcaccagcagggtgaggagcccctcgagctgcatggtcactgttactgtcactgccacatctgagcagcctcacatttatattccagcccccgcaagtgaattggactccagctctaccaccaaagggattctcttcgtgaaggagtacgtgaatgctagtgaagtgtcttctgggaagccagtatctgcacgctatagcaacgtcagcagcattgaggactcattcgccatggagaagaagcctccatgtggcagcactccatactctgagaggacaactggagggatctgtacttactgcaaccgtgagatccgagactgtccaaagattaccctagaacatcttggtatctgctgccatgaatattgctttaagtgtgggatttgcagtaaaccgatgggcgatctcctggatcagatcttcattcaccgtgacaccattcactgtgggaaatgctatgagaagctcttctagcgaccccccaccgccaggctgatcagaagctgatgactcgtggacaaatttggctgtccccagttttgccccaagttgctgtctccccttccctcacctcctccctccctgtttgatttcttcatgcttttgcccttctcaagttgaagttgcatacatccaatatcgtatcttaatgatgctatgataattgcttgtgtgtgtagcttcttgtagcttagaaagcgctttatgcccatgatgtcatttcaggctcaaccaaagaggatcaaacaggaattccatcttggcttccctaagacagattggctttctaatgagtttaagtgggcagaagtgtagggttcagtgtgtcctgactcccttgaggcttataatgggccaagttgaagactgttgatgatccctggtgggtaaattgcagacatcaaatgctagggattggcataggctagtgtttagcttgtctatttgccatatctattttttttaaatttccatacacttgtaaaagtagttagttgcttttgattgagttatatagcagtttttcatttggtcttcgactcacctttcactatatttgagtgttcccttacaggtatgttggcatgtgttggaaaatttacacaattaggtttaaattcagtaggatgtgattttaggatgctactgatcaaagtgatatctgtgtctgttggaatcttgatagctgattaatttgccctcaattctgctccctgaacttcacacataaatcttcccaagtgggttttagggtgtatagatcccagcaggattaaggaggtggaaaagcagctaacatttcttgaggctctaccacatagcaggcactgtcacagagtaatggcattaatccccataataatcctgtgaaggtgatattctcatcccatcttagacatgaggatattggaactcagagaggtggctattgcattgcgcagaactctacagagcccatgctcttcccagagcagcacccacaaaagcaagcattgattttgtgctcagtgtgtgccaagcactgtgcagagggtacacagttcctgccaggttaacaccctcccttcaggcctcccaaaggcataggcttgcaaagagcagaaggtgtgaaatcacactcttcctctgggcatcctggatccctgaattatccccccccccatgaagtacttcaagggccaagctgcccctttccctcctctccgcccatgaaaatgcctccaaactgagatgctttcagctgagaacagatttgactcacagacattaccaaagaggagcttgtgaatccaggaaaagctccagggggctagctgatctgagcagagagctttcagtgacccattttcctgtctagactctgccttaagctagtggcaactgctggggccccaggtacttgggacatggaaactcgttggatggctgggcagatgtaagcctgtccatgcagtcagccgaccctctgctcaggttcagctggactctgccatctgtgggcccagcatcactctgtaagttccttgaaaggaagaacaaccttagagtatttctgatacaaaatgagggcctctgctcttgatttaattataaaatgtctacgtctttctccagtttctgagccctatgcacattggcttgtggacttgttcttcctgccaaatgatcagagaggaacattccatttatttgtattggatttcctctggagggcatgtacccacactaaataccaactgctcttcctcagctgtagtccccaacatcagacttggcacgtggtggacactaacacacaggcactcaatgaatgagtgaaggaaataaaagtcaccccgttggtgagaggtgctatccctgagtctcagtgcaggaccagtggatgaaaggcaaggtaaagaggcccaagataggctggcttcccccgttcaaggtatagtctgcctttaagggagttttagaaccaacatgcaagacattgaaagaaatcttgcaagagccattattgacttagatccaaaacagcctctctcatgtctaaaaaggcacagaattttgcagatctgaggaagagggatgcattacctttttgcttcttttcaattgcttagtgtttctaatcatacttaatccacactaatgtgcgcaattataataaatggtaagatatcacaaaaaaaaaaaaaaaaat

SEQ ID NO: 608 - DNA, 2607 bp, Homo sapiens
agtgttccagttcaaagagtacctgctgcagttggtggaagtataaagcattttctgtttgataagagaactggccaaggtgcccggcttggtaggggataccagacaaccaaaggccatatatggacttggcaatccactggtccctggacccggataagtttccagggaaggctgcatagacagctatgaaagctggtcagtgaaagtgaaacctgtgtctttgcacctgggcatcagctgcttggctctccacttatgcactgtgtatgtctcttgcatgcctgaggacattcttgggggtggatgttttgcaagacttggcagctgtgccacctgtcatggacttgatggaccgtttgacaacagaactgggatggtgccactgtgtggtggacttgaccaatgcattcttctcaatcagcattgctccagagagccaggaacagtttgccttcatgggagggcgacaatggactttcatagtgttgctgcagggctatatgtatagccccattatatatcattttcttattaatgatgttatgttaacctctagttcttttgctggtttggaggccacaacacccctcttgcctgggattgggatgatgaggctgaaacagcccttctgatgacataagccctctgggtggttaaccagggtgcccatttaaactagatgtgcatgtaaccaccaatagagttggctagggcctatggcagtatatggagtgcttggaagcgccagtcagcttttagtcccagctatggaagggagctgagccccagtgttcattaataaagaagcagttagtaaccatatatgctgcccttcaggttcataagagcgtggctggatgggttacagtcgtgtggatggcttaccccatagtgggatgggtgcgttcatgagcaatgacccccccagactgggacagcacagacatccactttagcgaagtggggcacctacttagagcagtggagtacgctaagtataagtcccttagcagcagagttgcaagaggtcttggaacctgtagtcctaatgcaagataaggccatggggcctggggcacccctagaccccgagccttcactgttagaaagggtgttcttccattcctaataggacatggtacacagctatgtctagttggggtgccactgctgcctggactgctggtgcagtccagcctagtactgacaccatatggtttgaaaccaggtgtagacagcggggcagtcaggattatcaatatcactgttttacagcttcacatcttagctgactggaaagccttccaggagcagtaatatgcatggagctgtcatctcctatgataacaatgccttcttctggaataccttctgtaggatctgcctgaggctgttttacagttaactttttttaaataagtagaagtacactctaaaatattaaattggtgcaaaagtaattgccgtttttgccattgcagttacttttgcaccaacctaataacaataaaaagtaaggtaaatacacaaaccagtgatatagtactttcctatcaggtattatatagtgctattttttttttgagaccgagtctcactctttacccagaatgcaggcagtggcatgatcttggctcacgacaacctctgcctctcggattcaaccgattcttgtgcctcagcctcccaagtagctgggaatataggtgtgagccaccacgcctggctaatttttgtatttttagtagagacagggtttcatcatgttggccaggctggtcttgaactcctgacctcaggtgatccacccgccttggcctcccaaagtgctgggattacaagcgtgagccaccacactaggcctttagtgctatacttttatatgattggcagtgcagtaagtttgtttacaccagtatcaccacaaacatataattgtgctatgatgtcactagttaataggcattttccagctccattataatcttatgtgatcactgtcatttctgcagtccattattgaccaaaatgtccttgtgtggttcataactgtactcaaatatctacaaagagagtttcttctggtacccagtaaatatttcattacttaatatactctcccccctgctcctgcgaacctcactccatcctaagaacaatcttcgcatctgcctttctggactttctgctatgaactaaatatttattcaccagagaaactgctgtatactaggtgttatgaaatataatttttttatatcaaagacattgtataattacatgaagaccaatggagtaattcatcttaattctaagtattagaaaagctttgttttccttgaagaatggacatatttttttccttctaaaacaatgtaagcaaatgaccttctcattttggttgccagaatgctcagtttgtatccctaactgactgcctgtgtaggttatcataacttgtcctgatctcctagtgctcatttgtatgtgttgttttctattttactgtatcttgttcgccatcttgagtcatttttttacacacaatggagttataataaaatagctattgcctattatgataaaagaaataccttctagctt

SEQ ID NO: 609 - DNA, 2458 bp, Homo sapiens
aatatccagtccctctcgtccaaggacgtgcagggtctgtacttgcccagtcgcactgggacttcaaattggggatgcagacacggccctgctcctggtgtgcgcgaagcccgctcagccggccagctcgcctgcacgcccgccgcgtccctgggccccaggagggcccccgtatccagctccgaccaaacagcaagcccgcagttggcgagcatctttcccagaccgggagcggggacagagcagagcagacggatccgaccagcgcaccacggcgccccagggccctcctaccgtcctcggccctcggccccccgttccccggccaccgcgcgggctccgccgctcctgggacgcgcactggctccggcccggcgccaccctctgcccctctgtcaccccgcacggaggctcccatcacccaagccgcgcccagccgtcgccgcgccgttccaggaggcctccgtcctctccctactccgccccgcaggccacacggcgccccggccccgcgcgcgggctgcccctcggcggcgcttcccccccgcgagccagcagaggcggtcagcggtcgggtacctgcgtccagtggcggcccgtacagcgcgagtgcggccgagagcaatgcgacaacgaccgcgccggcgacggcagttccggcccccgcgcgtgtgaccatccccgggccaaatggaatcgaccttacctcgtctgcaagcccggattgccccacagcgaggacccagggccatcgggcagcattccggattcccagctgcccccgcgccgtcgccggaaacacagccattggaagcgttttccggtttcccgaccgcctccgcgcggctgtcggcagtgggatcccaactcgctcaatcacacccggttctagatgattgacaagcgcgacgcccaacccggcctggtcccagctctggcctaagaggttcggctggaaggcaggttgaagagttaacaacgatctggttcagggtctggtttgtgtttatcggcccatttttaggcttgcggcgttatagaaaatgattttgctggcaggtggagtgccgaggcccactatgtgcccccagtatagcagtcaggtgcctttctgctccaggcgcaacctctgccctgaaccccaaaccagctcgctgcgaggccccttcgctttccaccgtctcaggtcagggcagctccatcactccaacgctgaggcccaaacccctggaaggcattctgacctctcctgccctcccacccacgctcctcctgtggctgatggcctcttacctccactgccgccctatttgaagccaccgtcatggtgctaaaagaaacttgtggggccaggtgcggtggctcgcgcgtgtgatcccaatgctttgggaggccaagatggaaggatcgtttgagcccaggagtttgagaccagcctggacaacataaggagacccccttctctaccaaaatttttttggaaaattagcaggggatggtgtggcacacctgtagtccagctacttgagaggctgaggtgaaaggatggctcaacatgtcagaggccttttaaccagagcgattccatcttgaatagggactgggtaaaatgagggtgagacctactgggctgcattcccagggggttagacattcttggccacaggatgaggtggtgggcacaagatacaggtcacaaagaccgcactgataagatgacacagtaaagaaactggcccaaagcctaccaaaaccaagatggccacaaaagtgacctctgtgtcctcattgctcattatttgctgattataacgtattagcatgctaaaggacactcctaccagcgccatgagagtttacaaatgctatggcaacatcaggaaattactctatatggtctaaaaaggggaggaaccctcagttccagcaattgccaacctctttcccagaaaactcatgaataatcccctccttatttagcctataatcaagagataactataactatgtgtggagttagttcctgccggtgggttcatggtctcactgacttcaagaatgaagctgcggaccttcacagtgttacagctcttaaaggtggcatagacccaaagagtgagcagcagcaagatttattatgaagaggccgggcgtggtggctcatgcctgtaagcccagcactttgggaggccgaggcgggtggatcacaaggtcaggagatcgagaccatcttggctaacacggtgaaaccctgtctctactaaaaatacaaaaaattagccggacatggtggcgggcgcctgtaatcccagctacccaggaggctgaggcaggagaatggcgtgaacctgggaggcagagcttccagtgagccgagatcgggccactgcactccagcctgggccacagagcgagactccacctcaaaaaaaaaaaaaaaagattcattatgaagagc

SEQ ID NO: 610 - DNA, 3551 bp, Homo sapiens
attgctgggcaactaggtcccgccggagcgttccagctcaaagattacctgctgcagtcaggcagaaatgtaaagtctttcctgtttgattgggaactgacccaggtgccgggcttggggggacaccggacaaccaaaggcaatatgtggactcggcaagccactggtccctaaacctgaataagtttccgggcagagctgcatttattgacggttatgaaagctgatttagaagcagcaacgcagcctcttgcctggaattgggatgatgcggctgaaaccaccttcctggcagccaaacaggctattcagcaggcacaagccctatgggtagctgatcggggcacccatttaaacttgatgtgcatgtgaccagatagttttgactggggcttatggcatcacacagagctctttagaatgccagtagacttttggtcccaactttggaagggagctgagctccagtattcctcgacagagaagcagttactaactgcatatgctgccctttagactcgtgacagcctggcaggatgggctacagtcgtcgcgcgcatgacttaccccatagcaggccccgagtgttctttcaactacctgccacccatccaacaactcccctcggacctcagtatgggctggaacctgacacttggcatgacagtgcagaccccaggcatccaaaccatgacagttccatcagctctccaaatgagactttgggattccagaagacagaggtttgagtgtaaaacacaaaataacaaaaccacaacaaaaacaactctgtattctcgtccccaccattaccatctctcctttgtgatgtcaaagagaccagaggaagtggacagactcggggaagaatagccagagtaagccttccaaattaaccccaggaatggcttcaacagaggaacagtacgatcttaagattgtgaaagtggaggaagaccctatctgggaccaagaaacccaccttcgagggaacaacttttctggccaagaagcctcccgacaactttttaggcagttttgttaccaagagtctcctggtccccgagaagctctgagccggctccgagaactctgtcatcagtggctaaggccagaaatccacaccaaagagcaaatcttggagctgctggtgctggagcaattcctgactatcctgcctgaggagctccaggcctgggtgcgggagcaccatccggagagtggggaggaggctgtggctgtagttgaagatctggaacaagagcttagtgagccagggaaccaggctccagaccatgaacatggacattctgaagtgctcttggaggatgtggaacatctgaaggtcaagcaggaaccaacagacatacagcttcagcctatggtgacacagctcagatatgaatctttttgcctccaccaatttcaagaacaagatggtgaaagtatacctgagaaccaggagttggcatcaaagcaagaaatcttaaaagaaatggaacatttgggggatagcagactccaaagagatgtatctttggattctaagtacagagaaacttgtaaacgagacagcaaggcagaaaagcagcaggcacattccactggagagagacgccacaggtgcaatgaatgtgggaaaagcttcactaagagttcagtactcattgagcaccagagaatccacactggggagaagccatatgaatgtgaagaatgtgggaaggccttcagccggaggtcaagcctgaatgaacatcggcggagccacactggagagaaaccctatcaatgtaaggagtgtgggaaagccttcagtgccagcaatggcctcactcgacacagaagaatccacacaggggaaaaaccatatgaatgcaaagtgtgtgggaaggctttcctcctcagctcatgccttgttcagcatcagaggatacacactggagagaagcgctatcagtgtcgtgagtgtggcaaagccttcattcagaatgcagggcttttccagcatctccgagtccacactggtgagaaaccctatcagtgcagtcagtgcagtaaactctttagtaagcggacacttcttaagaaacatcagaaaatccacactggagagagaccataagggtgatgagtttgggaaagccttcagtcatcattgcaaccttattaggcattttagaatccatactgttccagcagaactggactaattctgtggaccctcagacccctaaatggggccgtcttggaaagtaagattttcaagtggcttattctgttcttataaaatttattttgtattgcattgaaccacttgtctacaaaccaggtgttggtgtctcctgtgtggatgactgtgattgtagggggttgctgggtggccttcttattccctagcctttggtccatttcttatgatttcctttaaaggcaccaaatcttatctggaaataaattgttatggaggggctgtttttgagcaatactgcatattgaacaattctaaaagaccagtatctatgtatacttttaaaaaaaagatttgctaagatcaaaggatattcagaggtgcatctttttctgtaagagtgacattttaaacaaatgtaaggttttggggaataagaatcgtccacattcccacaggaaatcattgctatggtctcccctaggaatgtgatagatagcttctataattatgcagcattatccatagtatgaaacctgtagttttaatggtttagaaatctatgtctcatttcatatctaactcatgtttttgatacgaatcaatatatatgttgatatcatgagttaatatgagtttgacatgaatcatcaacatagtatatacatatcaacataactatgttgatgattcatatcaaattctcaatgcaggtcattactgtaagttttccatttttgttacaaataataagtaagatgatactttaaaatctctgttcttcacaaggtacctctttaattcatagccttttatgtcagcattattcttcttttgggggttggtcagcaactttgagtgccattgcaagcagcatcatttaagtagttttataaagaaaagaagtctgatatcctgggcagcttgctgcttactggggagaccagcatgcttagacacttattgccagggttaaacatatgctctggcaccaagttcaaatctttcctccccatttgtgagctgtgggactttaggcaagttatctaaatgctgctatgctatagtctccccacctgtaaaacagaggatgataccaataccttcctcatagggtacataagattaaataaatacaaacttgtacttaaaatgtagctctcaataaatgtgcattatgatttacatacgaaataatagcatttaacaaatgtaggtagaattttaagtatcatgttaaaattaggatacgaaatgcctctgctgacattcttgttactcttttctccacagtcaaaacctgaatcagaatatttcaaaagagaggaaataaaagttcagcttaaaactgttctgccct

SEQ ID NO: 611 - DNA, 3064 bp, Homo sapiens
atcatgcttagacttttcaaagagacaaactccattttcttatgaatggaaagtgaaaacccctgttccgcttaaattgggttccttcctgtcctgagaaacatagagacccccaaaagggaagcagaggagagaaagtcccacacccagaccccgcgagaagagatgaccatgaccaccatgccagaaagtctcaacagccccgtgtcgggcaaggcggtgtttatggagtttgggccgcccaaccagcgaatgtctccttctcccatgtcccacgggcactactccatgcactgtttacactcggcgggccattcgcagcccgacggcgcctacagctcagcctcgtccttctcccgaccgctgggctacccctacgtcaactcggtcagcagccacgcatccagcccctacatcagttcggtgcagtcctacccgggcagcgccagcctcgcccagagccgcctggaggacccaggtacgtgcgcttgccagggagagggagaggaggaggtacaagggagagagggaaagaaggagcgggggagaagaggagagggagagagagagaaagagaagagaggagagcgaggtggggtgggggtggggagggcgcgggagcagtggaggtttcgaatatcaatctatagatccttgtcacagcaaataaatttttttaaaaattccctcaatttgcaactatccagccaaggataaatcccagagcgtctcctggcactggctgggcctctgggcggctcggtgtgcagagcacacaatgccccgctggaaaacagaaacccacatgtgcacgtattagtctcggtaattatttattgcgtagcgctataaacaatgtatgcaattaagggtaattaaacctcaactaccgcctgcaaaaatagcaaactttccctgcaaaggcaggagctgagctcctgggaacggctctatccctcctgcagcgtcccgggacaggccctcggattttgggggacccttccctggctttcagagtttcttgaacgttctctccctggtgctgcctccgccacccttcggtagccactcgctctcggctgttcgcactaaaggcggcccctcgtattaacaacgggccctacttctgctgtccctccaggggcggactcggagaagagcacggtggtggaaggcggtgaagtgcgcttcaatggcaagggaaaaaagatccgtaaacccaggacgatttattccagtttgcagttgcaggctttgaaccggaggttccagcaaactcagtacctagctctgccggagagggcggagctcgcggcctctttgggactcacacagtctcaggtacctcgccgctgccgctccgttctgccacgcaggctttccgcggccggcctgcgcccgggtcttcatttgttgctcgctgggactcagggtcggggtgtcactgtgtgtatgtgtttgtgtccacccctggctctcagcgtgtctccttcctccctcattccctctgccctagctctgtcactgctctcggtatcccgagctgcctgccgtccggccctctgtccctggacaatctgattagggcgcaggaaggatttccccagacgatttgtttgggaactcagaggtcacacgtgcctaaacaactggaacaatagactccgggcttaatccctcctttgcctttaaattgtgtgactaatcactcggggcctgggtccgcgcctcagcctccctcctcctcctccttcttaccggttgggggtggggggagatcctttcctccgccctctcacctctcaagtcccagaccttagagaagaaacgggaccttccttcccggctttctgtaagactccggggagcccgtgagcgttcctgacggcggcgggcgcgggtttccgacgtccggtccgggatttggagcagagctggagaaagcaaacagacactagtgcaagaatggttttgaatccaaagagaagttcagcaaaaccttgaggcctccttagtccgtcccaactcaagggcagaaaagatggcgcatagaaaagttgggtcgcgttgcaaataaatttcctccactccttcctaggttttcgattctttttattgatgttgatattggaattgctggctcggtgttatgcaggcgctgtatcttccgcaggcggtagccacggtcggactgagcccctggcaggctaaggcctggatcccggttctcccctcatcacaactcctccctggctctctgagagctgcccccgtgggctgacggcggcgggcggttcggccttcgagcctttggctcttatgggggaagggaggaagggggatgtctctgcttctctggcagggagctgccagctggcgcagggttgggaggtcctatctctgctgttctgcggtcccttttttcctccctgtgacctaggtaggctcagtggtcccagcctgagtcacgttgttgtccgctcttgcaggtcaagatctggttccaaaacaagcgatccaagttcaagaagctgatgaagcagggtggggcggctctggagggtagtgcgttggccaacggtcgggccctgtctgctggctccccacccgtgccgcccggctggaaccctaactcttcatccgggaagggctcaggaggaaacgcgggctcctatatccccagctacacatcgtggtacccttcagcgcaccaagaagctatgcagcaaccccaacttatgtgaggttgcccgcccgtctccttcttgtctccccggcccaggtccctcccgcctccaggtccatccatcccgtccggaaaagaaggacccagagggaagaaggaacagtggaggcgggacgccctccatctcctcggagccccgcgaggtccggcccagcaacttcccggcatccgcgctctagcctgaaccctggcctgggccgagcagtggcagcagagagtggcctcggagggaagccactgccacctgagacagcccaagcagcaagataaacccgctccacccgacccgccgaccttcagctttgtgggactatcagg

SEQ ID NO: 612 - DNA, 2744 bp, Homo sapiens
cgtttagtcactgcttcagtcagctcatgtgtgtggagcacctgctgtattctagctacttgcttgtttggttctgtcacactgatgctgtgatctcttagaatagttaacaggttagaggtaattttcatccaggtccccctttgaagggagtttatcccacccccaccctcagacgacaaccgaatcatgacggcatttgtcattaaaggcagtgggtaatttgggatcctgcgtcgtggacaggtgcgatgttctgtgtgttagagcttgctgtgtgttcgatgttcctggctcaggagtgccaagagcttctattttggcagtgaggtgccatatgctgaagaaacggggagaacgcatctcattttcgttgtgctcatcctgagtccctgatgtcagtgttgggttgtttcctagcagctcgtgtttctccacagggcagcctggcgtggagggttcatgccgccctcatctgcctgtgtggagccacgctttgtgctggaaatcaggcgcccggtgtcattgagttggtagagtacttgttcttgctccaggctcttggacataatattcctgctgatgcagtctctgtccgtctctctttatactgaaccaggaagaaatgcctggaggtctccccttcctgggagaactgttagatagtttaaaagcactcagttctgttttctctgtggtttatacgtccagattctttttggcaacttttagtttaggtgggggagactgtcaggaagtgtctcagctcttcaaagctggcaggaaagatgccacccagttcagcaccaattcacagtggctttgctaaatggaaatgaaaattagtcaattttcagagcgaggattttaactgaaaatctgtgggggttttagcaagtccctgttactgttaccattcgggtggcacagacgctgctgccttcgattctacgcacagtgcatgggggacgtcagagcccccgcacccgggcttctgtaaagatgggagactaatttcctggagtgcatatgggcttccaaacaggaagagcagtgtgtgtgtcaggaagggaatttcatgtgacagcacaaggagagacttcaccgaaacagaataagcagatctagcagtgatgaggaattctctaccatcgtctattagtgacactcaagtagccatcgggtacacagctgcagtgcgctgatgagctttgaactgtaaatgggaagacacagtccatactcaagacaccaagtggagaacggggagcgctctgaagctgcctcctcgcatgtgcttgcagaagggcagcaggttcagtggtaccagcaagcagctgcccagcccgtgctgttcccgggagtgtgctggtggcagcttatgcactgggtacagcaccacccaggaggggcgaggctgcaccacccaggaggggcgaggctgcaccacccaggaggggtgaggctgcaccacccgggcctccaagacagggtggcatgtgtaggcagatggggcggtgggggggggggtgcagagaagcataatgtgcagacagggcctgctgaggaagaggacgcaggagggtggacgtgtttgtgcacgcgtgcacctgagcctaacaggtgagtctgtaaaggcagcttgggaccagctgagactgagggtggacttcaggctctcctaggaacacagcgattgaggtgtcttgaagcagggcagtaaatttaccagcttcttgatgaaacataactccagtgatgcagggatgatactgctaataaatgacagtggctgctaacatctcttgagcactgcccttgcagccagcacgatgctaagcactcaacactgccaggccctgggacagggtccagtggaggtctgagggccgccgctgggacactgatgtggacaccctgcctacgtcccacggacaactagaacagagacctccgatagaccacgcggctttcgctcagtggtgtctcctctttatgcagagagcatcagtgatgtcacgtttggagcaggggtcagttacatcgggacaccacggactccgtcgtcagccaaagagaaaattgaaggccggagtcaaggaaatgacatcttatgtttatcactgcctgataaaccgcccccacagcctcagcagcggaatgtgcggtctcccgccaggaataaagacactccagcctgcagcaggaggtccctccgaaagacccctctgaaaacagccaactaaacagcgcctcccaccagtgtccaggcaggcaggagcccttgaggaagcagtctcgtgtcctccgtgtgaaggcagctggatcacttcccgcagtccttgggcagcgctttgctgtggaacacgagagctcctcctcaggggcctggcactcaccttctattctgtatgatgtatttggttaaacactgtcaaataatagagatgtgccagatttagattttcttaccctaatctgtttaatattgtaactttattccatttgaaagtgtcaagcccattcagataagctataatctggtctttaaggaacacaactttaaaactgcagctttcttttatataaatcaagcctctgttaacttgaattccttatagtacatattttcccatctgtaatgacgaaattttgattctaatattttttctattatttataagtgcaaattttttaaaaaagtgtacagctttctaaaagtaataaaggtttagcataaatac

SEQ ID NO: 613 - DNA, 2875 bp, Homo sapiens
actccgaggccaggaacgctccgtctggaacggcgcaggtcccagcagctggggttccccctcagcccgtgagcagccatgtccaaccccagcgccccaccaccatatgaagaccgcaaccccctgtacccaggccctctgccccctgggggctatgggcagccatctgtcctgccaggagggtatcctgcctaccctggctacccgcagcctggctacggtcaccctgctagctcgaggcagggctggtggggcctgaggccagtgaggagtgtggagtaggcgcccaggcatcgtgcagacagggcgacatcagctggggacgatgggcctgagctagggctggaaagaagggggagccaggcattcatcccggtcacttttggttacaggacgtggcagctggttggacgaggggagctggtgggcagggtttgatcccagggcctgggcaacggaggtgtagctggcagcagcgggcaggtgaggaccccatctgccgggcaggtgagtcccttccctccccaggcctcgcttccccagccttctgaaagaaggaggtttaggggatcgagggctggcggggagaagcagacaccctcccagcagaggggcaggatgggggcaggagagttagcaaaggtgacatcttctcggggggagccgagactgcgcaaggctggggggttatgggcccgttccaggcagaaagagcaagagggcagggagggagcacaggggtggccagcgtagggtccagcacgtggggtggtaccccaggcctgggtcagacagggacatggcaggggacacaggacagaggggtccccagctgccacctcacccacccgatgcccatgaactacggcccaggccatggctatgatggggaggagagagcggtgagtgatagcttcgggcctggagagtgggatgaccggaaagtgcgacacacttttatccgaaaggtttactccatcatctccgtgcagctgctcatcactgtggccatcattgctaccttcacctttgtggaacctgtcagcgcctttgtgaggagaaatgtggctgtctactacgtgtcctatgctgtcttcgttgtcacctacctgatccttgcctgctgccagggacccagacgccgtttcccatggaacatcattctgctgaccctttttacttttgccatgggcttcatgacgggcaccatttccagtatgtaccaaaccaaagccgtcatcattgcaatgatcatcactgcggtggtatccatttcagtcaccatcttctgctttcagaccaaggtggacttcacctcgtgcacaggcctcttctgtgtcctgggaattgtgctcctggtgactgggattgtcactagcattgtgctctacttccaatacgtttactggctccacatgctctatgctgctctgggggccatttgtttcaccctgttcctggcttacgacacacagctggtcctggggaaccggaagcacaccatcagccccgaggactacatcactggcgccctgcagatttacacagacatcatctacatcttcacctttgtgctgcagctgatgggggatcgcaattaaggagcaagcccccattttcacccgatcctgggctctcccttccaagctagagggctgggccctatgactgtggtctgggctttaggcccctttccttccccttgagtaacatgcccagtttcctttctgtcctggagacaggtggcctctctggctatggatgtgtgggtacttggtggggacggaggagctagggactaactgttgctcttggtgggcttggcagggactaggctgaagatgtgtcttctccccgccacctactgtatgacaccacattcttcctaacagctggggttgtgaggaatatgaaaagagcctattcgatagctagaagggaatatgaaaggtagaagtgacttcaaggtcacgaggttcccctcccacctctgtcacaggcttcttgactacgtagttggagctatttcttcccccagcaaagccagagagctttgtccccggcctcctggacacataggccattatcctgtattcctttggcttggcatcttttagctcaggaaggtagaagagatctgtgcccatgggtctccttgcttcaatcccttcttgtttcagtgacatatgtattgtttatctgggttagggatgggggacagataatagaacgagcaaagtaacctatacaggccagcatggaacagcatctcccctgggcttgctcctggcttgtgacgctataagacagagcaggccacatgtggccatctgctccccattcttgaaagctgctggggcctccttgcaggcttctggatctctggtcagagtgaactcttgcttcctgtattcaggcagctcagagcagaaagtaaggggcagagtcatacgtgtggccaggaagtagccagggtgaagagagactcggtgcgggcagggagaatgcctgggggtccctcacctggctagggagataccgaagcctactgtggtactgaagacttctgggttctttccttctgctaacccagggagggtcctaagaggaaggtgacttctctctgtttgtcttaagttgcactgggggatttctgacttgaggcccatctctccagccagccactgccttctttgtaatattaagtgccttgagctggaatggggaagggggacaagggtcagtctgtcgggtgggggcagaaatcaaatcagcccaaggatatagttaggattaattacttaatagagaaatcctaactatatcacacaaagggatacaactataaatgtaataaaatttatgtctagaagtt

SEQ ID NO: 614 - DNA, 2588 bp, Homo sapiens
agacatggcggacggcagcggctggcagccgccgcgcccctgcgaggcctaccgcgccgagtggaagctctgccgcagcgccaggcacttcctacaccactactacgtccacggcgagcggccggcctgcgaacagtggcagcgcgacctggccagctgccgcgactgggaggagcgccggaacgccgaggcccagcaatccctctgtgagagcgagcgggcacgagtccgggctgcacggaagcacatcctggtgtgggccccgaggcagagcccccctccagactggcatctccctctgccacaggagaaggacgagtgacaagcatccctgccattggcctgtgcagcttcctcagtctgtttcaagttgctgttgcacagccctggggactgtgaccagcctacacagtctggtgggtccctgtgagctcttgctcacaggaacatggagactctggtttttaagaaatgcacacagctacagaacacacaaccttgcataaagagggtttgtggactcagctgaagaaatccaagtccaagacatatggaattaagcactccttccctcaaaatttcccctggtggttaatgtatcaaaagccatttcatctgatttcaaatagaagctgaaaattaagttcacacttgttagattttgtgtgtaacagtgttgtacctggacagtattagaaatttgtatgcttattctcttgttaagtgttttaaaatgtatgaaccaccaaaaacactatttcttgaagaggtctgtttattactaatagaatggtttctcatcctatggtggccctgttgtgtgatgctgagggctaggctgggtctgtgcccagcaccctccctgctctcttcctggacacaggcagcaagttgaatatcttttaatttgttctttggggcagaataatctatcacgttagaagggtgtccattaaagaacagtatttccctgcttgagtgtgttttctcctgtgctccctaagagcccctgtgtctgtgaacagtgggggtgggggtgggggttgtgctcacgggatcccaagagcaggagcatctaaagaggagccagcgttcccccatcatcaggggagtactgatgtgtctaaggcaaccagggtgcctccagcatggctgtggctggtttaataatgaacatttccacccagtgagggaagagaggaagactgctagagatctacaaggtttttcttactcttaaacacagggacggggcatctgaatttgcagtctgctgtaatcccagcactttgggaggccaaggtgggtggatcacttgaggtctggagtttgagaccagcctggccaacatggttgaaaccccccatctctattaaaaatacaaaaattaactgggcatggtggcacgtgcctgtgatcccagctactcgggaagctgagacaggagaattgcttgaaccccagaggcagaggttgcagtgagctgagatcgtgccactgtactccagcctgggcgacagagtgagactcttgtctcaaagataaaataataaaatgagtttgcagcctgcatgtgatgcctgggattgcagcagctgccctcaggttcctggggcagagctggagagtgcagcaagccagggcatgccagccagcaccccagtccatgaggggcttcccctcagtgcagccacgctccctgccacctgcttgtttagcaaggtatgcattgtgcggctgcatgctctgttaggaagcattaagtcctgcctctgtagtgtgactatcatgttttgcctcctccttcactactcaagttccacatcaacagataatctctctggacaggatgttcctgcatttgtttctatgtcaattgcttcacaacatctgagtgtccacatgttggacagggtttgaggcttataagaccacagttttgaaacagacaagttgtcttcaaagagtttctgttgtagtttgggtaaaagacagacattaaacatcaataaataggaatttaaaacggtggctggatgtggtggctcacggctgttatcccagcactttgggaggctgaggtgggaggattgcttgagcccaggagttcgagaccagcctgggcaacgtaacaagaccccatctctacaaaaaataaatgagctatgcatggtggcgtgcatttgtagttccagctacttcggaggctgagataggaggattgtttgagcccaggagtttgaggctgcagtgagccatgattgtgccccactgcacttcaacctgggtgacagagcaatatcctgtctcaaaataaataaaaataaaatggtggtaatttctgaagcagtttggtattttatggtggtggtatgaagaaaacaaatactgtaataagagcaatatctttcaaactttttggacaggtgctaagtgtggtggctcacacctgtaatctcagctacttgggaggctgaggcagaagaatcacttgaggataggagtttgaggttgcagtcagctatgatcgtgccactgcactccagcctgggcaacagagcaagaccccatctctaaataaatgtttt

SEQ ID NO: 615 - DNA, 2563 bp, Homo sapiens
agacctggaagagggcaggcgtgagcaaccatggccgggcagcacctcccggtaccccggctggagggcgtttctcgggagcagttcatgcagcacctctacccacagaactttaccttttgaccagttggtccagagggcagctgaagagaaacataaagaattctttgtttcagaggatgagaaatactacttacggtcacttggagaagaccctagaaaggatgttgcagatatcagaaagcagtttcctttgttgaaaggagatattaagtttccagaattcttcaaagaggaacagttcttttccagtgtttttcgaattagttcaccaggattacaactatggactcattatgatgtaatggataatttgttaatacaagtgacaggaaaaaagcgtgttgtactcttcagtcctcgagatgcccagtatttatatttaaaaggtactaaatcagaagtactgaatatagataacccagacttggctaaatatccacttttttccaaggctagaagatatgaatgttcccttgaagctggtgatgtattattcattcctgctttatggttccataatgtaatttctgaagagtttggagtgggagtgaatatcttttggaagcaccttccatctgaatgctatgataaaacagatacctatggaaacaaagatcctacagcagcatcaagagctgcacaaattctggacagagccttgaaaacactggccgagttaccagaggaatatagggacttctatgcacgacgaatggtcctacacattcaagacaaagcctacagcaagaactctgagtaaataatgaagtgaatgcaatgcacattaacactttagtaaggtataacgatataaattaaagattttgttaaaataggaaagatacatcagatttacagattatgtaagtacgaaggggtgtttgtgtggattctacttgatacagattgttataattaaagaatgctgtgctgggaccactctttaacattcagatgctgaccactaaaagtccaacttaaaatgacttaaaaacagtaagaaaatatattgattcacaatacatgaaatctattgacagaatgtgctgcagtgtttctgatccaatgattcagtaatgtcatcaagaaccttgggaacccgcctccacaccccacccccttttcaaccacaacattggcatcatcctaaggctggctaccctcgtggtcatgggatgattgccagtagcagttggagccttgtgcatcttcatttacatgcagcggaagagtcaggctggattctaggggccctgtcctagtatgagaaagctttcccagaattcactttccatatccttaggtctcattgctctaaagtaacttagacctgtccatccctgagccagtcactggcaaagggtctagaataacctttagggcagtcaggtccactggagctgagagtagaagtggaggccacatgagggatatatggggacagaaaggatagtttttttaaaatcatggttctgataggaaaaacatgagcaacgcacaatatctattacatttgcctagaagcagaattttttgaggaactttaaaaaatgtacagatacctaggtcccaactttgtagactgattcaagagtgtttgggatttggtataggaacttaatagacctcacagggtgttctgatgcataatcagagctgagatcaactggagttgatgatagtgacttggattattagttttgtgattagtgcaaaacaaatgtttaatctgatcttgacttttcttgccacccagtatgtcagggtggtttttggtttttgaatgttacaaaataaatattttaatttatacctatgtctaaaccttagcctagttaaagatttcccaactattttttccacctatccctttttttaaaagaaaaattacttaaagaatgaataaatgagatcctaaaagtgttgtcatcgaagacagtgagccattgtgtgtggatctctgcttttgttttgtacctagtaattatattgcagtgtcattgaagaccacataatcttcactgaacataaatgtgttcatctaaagcaatctcttagtacatcaatttggtgcattttaattagagaaaatcattttctctattgaagagaatccatccactcatgtcctataaattatagtaaataaggaaaagcatatataacattctgaatttcctaggtgtctttggaaacaggtaagttactcaggtgaataaaggtgaaaaaagtcttgtcagaaaaggaatgattatattagccaaatttaattaccaggttttgatcttcattaagcaaagcaaagaacttctttactgattccttgtccttcagtaaggaaaaagacaaaactctccttagtttacacattatttatggtcagtttttaataaatcttgttttttttcttaaccagcaagagaattgatacaaagtataaatccagagtcatgtagaaaacttggaagtattaataaaacagattacagtttgtgcactg

SEQ ID NO: 616 - DNA, 2659 bp, Homo sapiens
gatacccattgcgcgccggcctcaagatggccgccttctggcgtctccggcgctgttgaatggcgaaagctttattgttcccttcgggcaggagtgttcgtgtcctctatggcgctgtcaataaagaacggcagtttgaatcggtgctgaacagggcctgtcctcccaaagccaactctaaggagaggagaggaagagcagttcttggggcagagttgacgcaatggagctccccaactacagccggcagctgctgcagcagctgtacactctgtgcaaggagcagcagttctgtgattgcaccatctccattggtaccatttacttcagggctcacaagcttgtcctggctgctgccagcctcctgttcaaaaccctgctggataacacagataccatctccatcgatgcatctgtggtgagccccgaggagtttgcgctcttgttggaaatgatgtacacgggcaaactacctgtgggcaagcacaacttctccaaaatcatctccttagcagacagtctacagatgtttgatgtagctgttagctgcaaaaatcttctgaccagccttgctgccactccagggggccctgtgaaagctgagactgaggaagcagcccattcagtttcacaagagatgagtgtgaattctcccacagcccaggagagccagaggaatgcagaaaccccagcggagactcctactacagctgaagcttgttccccctcccctgctgtgcaaacctttagtgaggcaaagaagacaagcacagaaccaggatgtgaaaggaaacactaccagctgaattttcttctagaaaatgaaggtgtcttctcagatgcactcatggttacccaggatgttttaaaaaaactagaaatgtgttcaaactgttgtgtccctgttgaggctgtaccaatattctaatcctgcagtaaaaacagcactattagacaggaagccagaagatgtagacacagtgcagccaaaaggtaggagaagatcctatgcattggaatggcagggttttattttgggatgatgctatgaagtttgttccaatgacatgtttctttggtggcttagttattaagtggttttcacataagtttcacatgtaaattccagaagctgcatgttaaatatacaccaactaaatttgagtctccatttctatcccacagttaactagtctgacaccttgaagttggagaatatcatcaatgttctcctgcccgtcaaaaagccacacatccaaatcaatgacttgagtacccaggttggactggttcgctgacagcactttaaggctgaagtttctctcatttgggttaggtacaaagcagtggccttgccaaccagaagttaacctctggctggctctgcagctttgtgtttcgacagataaatgaaacatttttcctttcatagagttcaaacagaataataaagtattttcctctgtaaaagcgattctgcattcaggtgctcagaataagctgaaaatcactttactattctgttagatctctcttgacaaaccatgctgtcattttcttcaaattgactagcttctcttgtgtgtctctaactctttctcccccagggagcacagaggagggaaagaccttgtctgttctgttactagaacacaaagaggacctgatacagtgtgtaacacagctgagacctattatggagtccctggaaacagccaaggaggaattcctgactggcactgaaaaaagggtgattctgaattgctgtgagggcagaacacccaaggagacaatagaaaatttgttgcacagaatgactgaagagaagacgctgactgctgagggtttggtaaaactcctccaggctgtgaagacgactttcccaaacctgggccttctgctagagaagttgcagaaatcagccactttgccaagcaccacagtccaaccaagccctgatgattatgggactgagctattgagacgctatcatgaaaacctctctgagattttcacagacaaccagattttattaaagatgatctcacacatgacaagtttagcccctggagaaagagaggtcatggagaagcttgtgaaacgtgactctggttcaggtggtttcaattctctgatatcagcagttctagaaaagcagactctctctgccacagccatttggcaactgctgctggtggttcaggagacaaagacctgtccattggacctgctcatggaggaaatacgaagggagcctggtgccgatgctttcttccgggcagtgaccaccccagaacatgccactttagaaacaatcctgaggcataaccagttgatcttggaggccatccaacagaagattgagtgcaagctctttacctcggaggaggagcacctggcagagactgtgaaagagattctgagcattccctctgagacagccagccctgaagcttccctgagagcagtgctgagcagagccatggaaaaatcagtcccggccattgaaatatgccacctcctgtgcagtgtccacaaatcttttccaggcctgcagcctgtcatgcaggagttggcatacattggtgtccttactaaggaagatggagagaaggaaacgtggaaggtgagtaataaatttcaccttgaagccaacaac

SEQ ID NO: 617 - DNA, 3135 bp, Homo sapiens
ataagctttctggaaccaaaaaaatccacttctgtttatccccatttttctactacaaacctcataggacccgatccaaccttccgcggtttatggagcgcttttcatgttgaaaatggtgactctttgccggctggctttgccttcttaaaaggtagcgcgagcacctcgagctcagcagagcagccgctggggattacccaaatgccaaaggctgaagtgaatctgggggggctgtctagtttagtagtgaacaccccaattacctctgtctccctcagccactcatcgtctgagtctagcaagatgtcagagagcaaagaccaagagaacaactgtgaaaggccaaaagaaagcaacgttttacacccaaacggggagtgccctgtcaaaagtgaacccactgaaccgggagatgaggatgaagaagatgcgtactccaatgaacttgatgacgaggaagtattaggtgaactcaccgatagtattggtaacaaagatttccctctcttaaaccaaagcatttctcctttatcatccagtgtgctaaaatttattgaaaagggtacctcgtcctcctcggcgactgtttctgatgacacagaaaagaaaaaacagactgctgctgttagggccagtggcagtgttgctagtaactatggcatcagtggcaaggactttgcagacgcaagtgccagtaaagacagtgccacagctgctcatccaagtgaaatagcccggggagacgaagacagttcagccactcctcaccagcatggctttaccccgagtactcctggcacaccagggcctggaggagacggctcaccgggcagtggcatcgagtgtccaaagtgcgacactgtgttggggtcttcgaggtctcttggtggtcatatgactatgatgcactcgaggaactcatgcaaaaccctcaaatgtcctaaatgtaactggcactacaaatatcagcagaccctggaggcccatatgaaggagaaacaccctgagccgggtggctcttgtgtttattgtaagactggacagcctcacccctggcttgcccggggtgagagttacacgtgtggctataaacccttccgttgtgaggtttgtaactactctaccactaccaaaggcaacctcagtattcatatgcagtcggacaagcacctgaacaatgttcagaatctccaaaatggcaatggtgagcaggtgtttggccactctgccccagcccccaacaccagcctcagtggctgcggaacaccctctccgtccaaacccaaacagaaacccacctggcggtgtgaagtttgtgattatgaaaccaatgtcgccaggaacctccgaattcatatgaccagcgaaaagcacatgcataatatgatgcttttgcagcagaacatgaagcagatccagcataatctgcacttgggcctcgccccggcggaagcagagctttatcagtactacctagcccagaacataggcctgaccggaatgaagctggaaaaccctgccgaccctcagctgatgatcaatccattccagctggatccagcgacagcagcggctttggcaccagggctcgtaaataatgagctgccgcctgaaatccggcttgccagtggtcagctaatgggtgatgacctgtccctccttactgcaggagagctgtcaccttatatcagtgacccagcgctgaagctattccagtgtgctgtttgcaacaaattcacctctgacagcctggaggccctaagtgtgcatgtgagcagtgagcgctctctccctgaagaggaatggagggcagtaattggagatatctaccagtgcaagctctgcaactacaacactcagctcaaagccaacttccagctacactgcaagactgataaacatatgcagaaatatcaactggtggctcacattaaagaagggggcaaaagcaatgagtggaggttgaagtgtattgccattggcaaccctgttcacctaaaatgtaacgcctgtgactattacaccaacagtgtggataaattacgcttgcataccaccaatcacaggcacgaggcggccctgaagctctacaagcacttgcagaagcaagagggtgcagtgaatcccgaatcctgctattactactgtgccgtgtgtgattacaccaccaaggtcaagttgaatctggtacaacatgtccgttcggtgaagcaccagcagactgagggcctacggaagctccagctccaccagcaaggcctggcaccagaggaggacaacctcagtgagatcttttttttgttaaagattgcccaccaaatgagcttgaaactgcctcattgggagccaggacttgtgatgatgatcttacagagcagcagttgagatcaacctcagaagaacaaagtgaggaggcagaaggagctattaagcctacagcagtggccgaggacgatgaaaaagacacaagtgagagagacaatagtgaaggcaaaaactctaataaagactctgggataatcacaccagagaaggaactaaaagttagtgtggcagggggtacccagccactcctgctggcaaaagaagaggatgttgcaacaaaaaggtcaaaacctacagaggacaataaattctgtcatgaacagttctatcaatgtccttattgtaactacaatagtagggaccaaagtcgtatccagatgcacgtcctatcacagcactcggtgcagccggtcatctgctgtcctctctgtcaggacgtcctcagcaacaaaatgcatctccaactgcatctgacgcatttgcacagtgtgtctccagactgtgtggagaagctgcttatgacagtgcctgtccctgatgtgatgatgccaaacagtatgctactgccagcagctgcctctgagaaatcagagcgggacacacctgcagccgtgacagctgaggggtctgggaaatattcaggtgaaagtccaatggatgacaaaagcatggcaggtctcgaggattcaaaggctaatgtggaagtaaagaatgaggagcagaaaccgactaaagaacccttggaagtctcagaatggaataaaaatagcagtaaggatgtgaaaatccccgacacactgcaagatc

SEQ ID NO: 618 - DNA, 2753 bp, Homo sapiens
gtttttcacaggtttctctcccttcctgagcaacggcagctgagtgccatgagaggacagtgacaaccttggggcctcatggtgaaggtggcagaaactttgttagcctgggtgctcagggtggacagctgctcttgccaaccgggaacatttgccttgagctcttttgtaagtgacagataagcttttattgtacttcagccaagatacaaacattggacgtatttgtacagcagctaaaggtgcaatccacaacctacctcctctgcatcccagttttgctccagagaagttcacgaggtggattggcctgatgggtcctggctccactgggaagacccctgggagaatctgaatcttcttggaggatgggtctctgctctgcttctagttctccacctccaggttgggagagggtcctgacaccaaaagttcatttcagaatctgcctttcagcccttccttctggtcaaaggtgtgagtatggctggcatgatgggatggagagaacatgggcttctcaatccccaatctaccactagtaagctatgggagctgcaatcctctcagacctccgtttcctattcataaaaatgggaacaataacactaccctcatgggactgcttctaggtgcagtgacagggcagcggcaccatctaacacattaaaatgtcagtttttcttgctaataccataaggagatttaaaatataaatgtatctataaattcccggaccccagtgttgccccgttgaatagaaactactggaggttgggttctgagaatgtgaatttttgaggcactcccagtgagactctgagaagccgcgatgtttgggaatgacagcttttccattcttcaattccagatgctattcataatgagatgtgctaccgataacaacttctcaggaaaaaatgtgtgaattaccaattacatttatacatttcaacctcagactcattaaaaattgcacccctggactgtgcattgtctcagctgtggtcacaggactgaaggagaagtctatgtggtgtgaggcaataaccatgactgtgattagacggcagcctcgatgatcacctggtatatgccatgctgggaggccactgagaatgctctgcatcatcccccaggcctgggatgcagagtgtcggggaatcagtcctgtgtctctcttctccagcatctctcagctggatgcaccgggctgtctttgtggttcagaccttcaggagccaagccaaattgagtcagagcatgctcctcagtgtctgccccaccactgagaggggtcagccttcacctggcatctggcacaccagtctgcaccggtggggcttcttcgttgctgttggagcgtctttgctcctcacagagttgggaagggtgggagggcctctttcagagctctctgcccctttccctgtgttggctgagtccctaggactgtacttgtgcgttgatttccctcttcggttcattgtatttgtcaggattcaggcaggaaaacacaaaccaggcttggtgtatctgatagaggaatttaacactggctatagaatgtgtagatgttggaaggctgggatggcaagagggagactgtgaggtggcccagggcttatgacctatagaaagctgctgccccagctaaggctgggggaacaaaaagaaggagggttatcattaggatttgggatgcagaggaggagccgtagcctcgggagcattgctgtggaggagggactgctgcagctagagctgagatgatggaaatagcacagctgcttgagagacatcacctggagaagaaggaacgagagaaagagtgagaggaatagaagatcaacactactctcccagcatctcttattgagagagcttgtgaagaagtcagctggcaaaggagccaagtgtgactgagcagtgtgcagagagtgtggtgggcctgggagacaataggcaaacaatgagtacattcaggcagtcagcacaaatttactaagtaccttttttttgagactgagtctcaccctgttgccaggctggaatgcagtggcgcgatcttggctcgctgcaacctccaccccccaggttcaagtgattctcctgcctcagcctcctgagcagctgggactacagacacaccccaccacacccagctaatttttgtatttctacaggagacggggtttcaccatgttggtcaggatggtcttgattgcttgacatcgtgatccgcctgccttggccttccaaagtgttgggattatgggcgtgagtcactgtacctggcctactaagtgccttttaaatgccagacactgttgtgatgctgggggggtgagcagggaacaaaacagaaaatctcctgccatctaggagccagcatcttagttggggagacagtcagcaaacataaaaaaagtaaaatatgtaatctcttaaatggcagtaagagctatagagaaaaatgaagacaggaaaggggcagagagtggtgggaatgagggggtgggcaggaaaggtctcactaagaacagtttaagcaaagacctggaagaagccaggcagcgagccccgaggctcttcggggaagagcatggcaggcagagatacagcaagggcaaaggccttgaggcctgccttggtcaaggaaaaataaagaggcctgagcagagtgtgcgaggggagaagaagtaggaaatgagggcagggggatacagctgagcagtttgggctccagaaat

SEQ ID NO: 619 - DNA, 2791 bp, Homo sapiens
ctttttgggaaagtgggggctgctacctcactactttgatgtgtaccttttgttcaagaactttctaaaacttggagctaatcatgggttatttcagaagatgtaagcattttaagttttttattgaattccatccttatttaaaaggcctggttatgtaatattttctgttttttttttttttttgtatggtttcccacattgattaggttgttttcttcattttcttaatagactaaaaatactttcttctctttctatttgtgtcttcttccatttagtatttatgggagggagcaagaagggaaaggatgtctatttttaaaattgactacaatcatgactgttcttcttgtcattctgtagcagctggatttattaccatctcttatttaaaggtccttcagaacacgttgaagcagttcatttcaggtcaatggctggtaagcaatgtcaggacctctggggaaggagaagctgacgggatcccagaggaaagaattgaggttgtttgctcccttgtagaaagcccacagatcccttcccagactagaaaaaaagtgccagagtgtcctgaaactttccttctaaggcacatacttcaaagagactggggattcctttgttttaaatataggtggggtctcacagtgttgcccaggctgggctcaagcgatcctgccacctgggcctcccaaagtgatgggattacaggcatgagccaccatgcacggccatggagattctaatgtggtgccagctgccaggtaagaaagctgtgagacaatgtgttgattttcctttactacgtcaggtttgaggacatcatctagcatcaacgggtaacgtcaccctttgttccatctttgggaaataatagtagtagcttgttactgttagctgacccctacattagcatcaataaagtaaatccctttaactttccttttggcctttcctttctctctctctgcctccccaccagccccgactctctcctgtgtgcgtacacatccacacacacctccatggtattccttctttctcccacctaagggaagctgtgcccgatcttgctgcagtccaggtcaccgtactgagatgagtcagccacagactctaaacactagcagcgattagccgtatgtagccaccaagtgcactgttttagacaggtttacacagctctttgctgtccactcatatcagctgtgtagtagcccaaggcagcctgtcaggcagaagaattaccaaccaaagtggatctattcataagataaaagatccggagtccgtgccctcttaaaaaacttttgtcttcagacatatgggtgcgtgttcatctctggccaaaactttgtttccagtttcaaagggctggttgcgaaggtggccttgtaacctttctgttgccggctctgttagttgcctgataagcagtagctaattcatcctcctcagaatttgagagtggcatctattagattcagaccaccaaggtgcctgcgcgggctctcctggttacgactgagtccccttttctcatctgtggggtgaacgcttctatttgcagaaatttgcttgcatctttttccttttatttattattactttttagagatgcggccttgctctgttgcccaggctggagtgcggtggactcttttcttttgttgatctttgccatcctctgcctggcttaatgaggttctttccctgcgtatttatgtcccaggagctcaccttccccctaggtttttaagaaggaagcagaaaatgttacaaagtataagggattctatgaagtccatagataggatttgctttgggagtagatgatttcttcttattttggtgtaaacatcaatttggatggcaattagaatgtctttagcctctttaaaaagcccttctggggcaaacctttgcaagtcactcagctggcatgtaatgagatttttatttgcatggctttttttttttctaagtctctctagaagaacataaggacattctgaacatgcaaggaatacagttattctcacatcaaggatcaattttattttgtatcttcattttatgtcattttcctttattttattcacattaatctagcattaattccccccagagggaatgatatttttgcttgctgccacctgtgttattaagtgacagcttttctttatctgcttttctgaatttcatatttatatactttattgtagttttttaaaatctattctagctgggctagaatcttccaagtattaattcataatgaacttccctcttctggaattgtttaggagggctaatgttccatgttcccttcgttgctatagatatgaagttatttcgatgttctttgagtgctttattatagcgataactggtactgcctttgattaaaggtgagctatatggagttaagcatttttatactagtaactatttattgagaattttcagaattctatagctacttgtctttaacagttataagaggcatgtattttttttttccttcatggtctggaagttagttttctctttgtttgggtagatcggaatgagttgttgagctgtgttgaaaacacacatgaatcaaaaaagcagatgtattgtagaaatgtgatgttttcatgtttcgggaatttgaccggaaagctttatgtatgggttttatttttaacaaagcagtaagggcttactttttaccaacttgtgtgtgtgtaaagatgtatttgttcaagctttaagaataaacctgtcaatgtacaaatgcctg

SEQ ID NO: 620 - DNA, 3070 bp, Homo sapiens
attaactcttttagtcagctgaggagctgcggtggctcggcgagttggagttcatcctggaagcgtctgcacgacaaggtcagggaggaggtgtggaataactttttcatgggacactttgagaagggccagcacgctctgctcaatgaaggagaagagaatgagatggagatatttggctatcggactcaaggctgccggaaaagtctctgccttgccggatccatcttctcatttggaatcctccccttggtgttttactggagaccagcatggcacgtatgggcacattgtgtcccatgttccttgcaagaagcagacactgtgttgctgaggacaacggatgaattccaaatttactcttggaaaaaggtaatatggatctacctgtcagcattaaacagcgcatttggtctcactcctgaccaccctctcatgacagatgaggagtatatcataaatagagccataagaaagccagacctaaaggtgagatgcatcaaagtgcagaaaataagatatgtttggaactacttagaaggacagttccagaaaattggttctttggaagactggcttagttctgccaagatacatcaaaaatttggatcaggcttgacaagagaagaacaggagattaggaggttaatatgtgggcctaatactatcgatgttgaagttacaccaatttggaaactgctcatcaaggaggttctaaatccattttatatatttcaactcttcagtgtctgtttgtggtttagtgaagactataaggaatatgcttttgccatcataatcatgtccataatttccatatctttgacagtatatgatctcagagagcaatctgtaaaactccaccatctcgtcgagtcacataatagcattacggtctctgtatgtgggagaaaagctggagttcaggagctggaatcacgcgtcctggtgcctggagatttattaattttgacagggaacaaagtgctaatgccatgtgatgccgttctgattgaaggcagctgtgtggtggatgaaggcatgctgacaggagaaagtattccagtcaccaaaactccgttacccaagatggatagctctgtgccctggaaaacacagagtgaagcggattacaagcggcatgtcctcttctgtggaacagaggttatccaggccaaggcagcttgctctgggaccgtgagagccgtggtactgcagactggattcaacactgcaaagggagaccttgtgagatccattctctaccctaagccagtgaattttcagttgtacagggatgccatcaggttcctcctgtgccttgtaggaacagccaccattgggatgatctatactctgtgtgtctatgtgcttagtggggaacctccagaggaggtggtgaggaaagcccttgacgtcatcacaattgcggttcctccggctctacctgctgctctgaccacaggcattatctatgcccagaggaggctgaagaagagaggcatcttctgcattagcccccagaggatcaacgtatgtggacagttaaaccttgtctgctttgacaagacaggcaccttaacaagggacggcttggacctctggggagtcgtgtcctgtgataggaatggctttcaggaagttcacagctttgcctcaggccaggctttgccatggggcccactgtgtgcagcgatggccagctgccactctctgatccttcttgatgggaccatccagggagaccctctggacctcaaaatgtttgaagccaccacctgggaaatggctttttctggggacgatttccacatcaagggagtgccggcacatgccatggtagttaagccctgcagaacagccagccaggtcccagtggaaggaattgcaatcctgcatcagttcccattctcatcggcactgcaaagaatgacagtcattgtccaagagatgggaggtgaccgactggcattcatgaaaggtgcaccagagagggtggccagcttttgccaacctgagacagtacccactagttttgttagcgaacttcagatttacacgacacagggcttccgagtcatagcactggcctacaagaagctggaaaatgaccatcacgctactaccttgacgagggagacggtagaatcagacctgatatttctggggctgctgatcttggagaatcgattgaaggaagagacaaaacctgtcttggaagagctcatctcagcccggataaggactgtaatgatcacaggtgacaatcttcagactgcaataacagtggccagaaaatctggaatggtttctgaaagccagaaagtcattctcattgaggcaaatgaaaccaccgggtcctcatcagcatctatatcttggacgttagtagaagagaagaaacacattatgtatgggaatcaggacaattacattaacatcagggatgaagtctctgataaaggcagagaaggaagttaccattttgccctaactggaaaatcctttcatgttataagtcaacatttcagcagcctactgccaaagatattgatcaatgggaccatctttgcaagaatgtctcctgggcagaagtccagtctggtggaagaatttcagaaactggagtaggttctttgccagtgcaggtggcatgaactgcatggaggcctaacagtcagggggagtggaagaggtaccaggagtcactcagtttgacaagggcagtggtccgtacttcggctgcatgagataatcacttgggagctttggagaaaatagcagtaccaagggatctcaccattcagagatcctgattcagttgtttatatggggcttaaaaaatcagtattttttttcacttaagtcaattttgcattcaatgctgagaaccactggactagaacctaagggtcctgaaagagtgtggggagaaataagaatggaaaggtggcttgagctcagctcctggagggacagtgagaatttatttgtatatgccgtcatcacaatgatgatatagggatattcatatgacaagagattcatgcaacattaaaaatactaaaat

SEQ ID NO: 621 - DNA, 3658 bp, Homo sapiens
cccacacaagcagcgggggtcctggccacccctccgggtgtccatctgtggcagtcttggttccctggagtggtcccccggtggggcgggcctgacaccatctctcctcctgcagatcagcattgtggagctagagaagagccagcggcagcaggagctcctgcagctcaagtcctgtgtgccgcctgacgacgccctgtccctgcacctgcgtgggaagggcgccctgggccgcgagctggagcctgacgccagccggctgcacctggagctggactgcaccaagttctcgctgcctcacttgagcagcatgagcccggagctctccatgaacggccaggctgctggctatgagctctgcggtgtgctgagccggccttcgtcgaagcagaacacgccccagtacctggcctcacccctggaccaggaggtggtgccctgtacccctagccacgtcggccggccgcgcctggagaagctgtctggcctagccgcacccgactacactaggctgtccccggccaagattgtgctgaggcggcacctgagccaggaccacacggtgcccggcaggccggctgccagtgagctgcattcgagagctgagcacaccaaggagaacggccttccctaccagagccccagcgtgcctggcagcatgaagctgagccctcaggacccgcggcccctgtcccctggggccttgcagcttgctggagagaagagcagtgagaagggcctgagagagcgcgcctacggcagcagcggggagctcatcaccagcctgcccatcagcatcccgctcagcaccgtgcagcccaacaagctcccggtcagcattcccctggccagcgtggtgctgcccagccgcgccgagagggcgaggagcacccccagtcccgtgctgcagccccgtgacccctcgtccacacttgaaaagcagattggtgctaatgcccacggtgctgggagcagaagccttgccctggcccccgcaggtaacgcccctcctgtgccctaccctcaggactctgctgctgctgctgctcttcaggcaggagggctgggttgctgggagtggaacagggcttcctggggtgatcatgggggctgctgccccaaaccgccacgcctcattactgacaccctttcctgcatcccacgagctgggatgcggatcgggctcagctgcagccatctcggcctcatacctgggtctcccgacactgacacctcctgcttgggtgtattaattcagcccgtgaggtcggccccagtgctctcgggggctcctgtactcacagctgggaggcccctgactcaggatcggctccacacacagcagtgcccaatggcacacgaccgtgggcctccgtgctggtagcggcatggtttctggttccttgagaaggtgccgcctgagcagtctctgctgttagcccagtttctgcagagagccagagaggatgccactttggcttttgttgacactgcaggcctgtctgttgtggaagccgcagagacagcatgtcagcgggcatggctgtgtgccagcaaaactgtacttaaaacagcagaggacatgagacccccaggctggtttgctggccccaggttgagatgcggtatgatgcggcagctacttttttaggagtaaaaagtaaaatgtggccgggcgtggtggctcatgcctgtaatcccagcaccttgggatgccgaggtgggcggatcacctgaggacaggagtttgagaccagcctggccaacatggtgaaaccaccgtctgtactaaaaatacaaaaattagccggatgtggtggcagacgcctgtaatcccagccactcgagaggctgaggcaggagaatcgtttgatcctgggaggtggaggttgcagtgagctgagatcgcaccactgcactcccgcctgggcaaaaagagtaaaactccatctcaaaaacaaaacaacaacaaaacaagtaaaatgtacatggccgctattgagacaggaggggctctagggaggctgggcaggcttcacggttggccacgtgagggccctggagaggccaccgaagcccgggcagttctgccctcgcagggctgggttgtgcccttggggtgaggtctgctctgcgagaggcagtgtcagtttcaggagattttcaactgggtggcaaacagccaactccagaagcgccttgctgcgcccctgcactgaggcctcattggcagaagcagggaggccgccctttgtccccgggtggtcatggaagtgcaccactcatcgtgggctgggaagcatggctgcggccttcaaggcggccatagcttggagtatccaagctgagttgtcttctgagaacaggagggagggaggccacgcagccatgggctttcctcatggtgtctctgagatcacggggccagagggcaacttactcagaggaagcctagctcagcggggagcccgcaccaggaggcttcttgggaggcagcgtctcagccgggacctgcagggcacaggcagcccagatgggcgggaggaggcacagggtcagccctgagccttgagcttgcccacagagccttctggttccaccccagaggggccgttttcagactcccaaccccttccccacttccccgcctctcctggagcccacagagctcctagggggtggtgctcccacagcaaggctttctctttggccatcctgtgtcccctgagacccccatgtccttcccggcaggcttctcctacgctggctcggtggccatcagcggggccttggcgggcagcccggcctctctcacacctggagccgagccggccaccttggatgagtcctccagctctgggagcctttttgccaccgtggggtcccgcagctccacgccacagcaccccctgctgctggcacagccccggaactcgcttcctgcctctcccgcccaccagctctcctccagtccccggcttggtggggccgcccagggcccgttgcccgaggccagcaagggagacctgccctccgattccggcttctcagatcctgagagtgaagccaagaggaggattgtgttcaccatcaccactggtgcgggcagtgccaagcagtcgccctccagcaagcacagccccctgaccgccagcgcccgtggggactgtgtgccgagccacgggcaggacagtcgcaggcgcggccggcggaagcgagcatctgcggggacgcccagcttgagcgcaggcgtgtcccccaagcgccgagccctgccgtccgtcgctggccttttcacacagccttcggggtctcccctcaacctcaactccatggtaaggatggggaccggcagggctggggagcgcggcctgtgaaagaaagaccagagggagaccgggcgcggtggctcacgcctgtaatcccagcattttgggaggccgaggcgggtggatcacaagatcaggacatcaagaccatcctggctaacacggtgaaaccccgtctctaccaaaaatacaaaagattagccgggcgtggtggcgggtgcctgggaggctgaggcaggagaatgatgtgaacccgggaggcggggcttgcagtgaactgagatcggccactgcctgggccacagagcgagaccccctctcggggggac

SEQ ID NO: 622 - DNA, 2895 bp, Homo sapiens
ctcttttgcaggggccgttcctcggggcatgacgctggctcctgcacagatcctgctcctctgtggccttcctgggctgccctcccctcctccgggactgctctggactgacactgctcaggttcggattccctcaaagactttgggagacaagacttggtcccccttttacaaacaagggaacggaggctctagaactgacttcctgaaaggcttggatccaaagctccctcagttcagcggccacgtctatttccctcagacacagggatccttgaacctgtgggctgtatctccccgcggacttggaagaatcccaagagagtggggctcccacaggctggagtgcaatggtgtgatctcggctcactgcaacctccacctcccaggttcaagctattctcctgcctcagcctcctgagtagctgggattacagatcctggtggctgtggtcggtaattccagcttcgtgctggctacaggtggatgatgcccacctggctgccgatgacctctgcaccaagtgaggctgggtctctggagctgccccaggggctggacaagctgaccctggccggggccaacctggagatgcagattgagaacctcaaggaggacctggtctacctgaagaagaaccacaagcaggaaatgaacgtcctttgaggtcaggtggatgaggatgtcagtgtgaagatggacactgtgcctggagtgaacctgagctgcatcctgaatgagatgcgtgaccaggacaagacattggtggagaagagctgcaaggatgccgagggctggttcttcagcatggtgggtggccgtgcgtaagcaggtgtgtacacgtgtgggcacatgtgctgcatgctggtgcagctggagcactggcagatccacaggctgtcccagttggaaggacttttggaaaccagttggaccagcccctcatgttttagatgtaaaacgtgaggctcagagaggactcaagctcacacagcccttcactgtggcctgcaaaatagatccaggtctctacaagtctggtcttgggtttccaccacagctgtttacaggatgtgcgtatttgaatacatatgtatacccttggcaagcacaggctgagtatctccggtatcctagggacagcaacaggcgcaaaagaataacacccagtgcctgtctttgaggtgctgcagttcagtaggaaaaagaaatgcaaatgaccgcagagcaggctgaattcctccaagttccaatgtgggtgcagaggctctctgtgtgcagaaagaggggctgaactgcgaggtggccaccaacacagaggccctgcagagtggctggatagagatatggagctctacgtctctgtgcagaacctgagccgtcccagctcagcaagaaagcatcgctggagggcagcctggtggagatggaggtgtgttacaggaccctgccggcccagctgcaggggcttaacagaagcatggagcagcagctgtgcgagctctgctgcgacacggagcaccaggaccacaagcacaggtccttctggacgtgaagacgtggctggagcaggagatcgccacctaccgccgcttgctggaggttgaggacgcccagaggtgatactgacgatgcaggctggagtctggctgaggagccttgaatgccaagttaaagcgtctggactagatcacgtaggcaatggggagccatggagggatttggagcaggagagtgaaatgaacatcaagagattttagaacattcactctggctgcagagggagaaatggatcagaggggtcagggcggggccagagagatgtgtcagggggctggagcagggagtctggccagagaagtcccgtgcggtggtgggtagtggggcaggggaaggaaggtggtgcacgcagaagagaggttatagctcaaaacagcgggactggatgcctggatctcggggtaagcatggctcacagtcaggactcagtaagtgtcgggagaacacatgaaggagcaggcattgatggccctgggtttctggttctgatgactgtgtgagtggtgaagagcaaggtgggtggtggttgggtttgcagttgggaagggtgatcaggccttcagctgagagtgtcccggagtctccatgcttagtcacacgttgcagctttttgctccccggaaatggtgaagtccatctatagtctaacaacagtctctcctgctttaattgggtctatttgttgggccctctgggttatggaaaaaccacttgctcagcttctccttgtaaattcctggtgagtagccacagagtgccgccagacctactgctgtgctgtttctttttcttcttcctgctgtgctgaacccctgccctttcattcttgggcctgcgctaatttctgtgcattcccaactgtgatttttcaccaatttaggggaacctcctctgccagggcctacttctccccagcagtgcttgcaggtgcctgggctggctggcatccctgggctgatgggtgcttctctccctgcaggctggccactcagtactccttgtccctggcctcgcagcccacccgggaagccacagtgaccagccaccaggtgtgccatcgtggaggaagtccaggttggagaggtggtcttcttctgtgagcaggtccacttctccacccactgagacccctttctgtctgcgacagccccacctcgagggccacggcacagccatcagctccagctcccagcatgctactgccacgccccgagtgtccgtctgggccccggtgcatggcctgttgtctttctgtatctactttctgcagcccctcactgaggaggcctcctgggtttgtccagtgcctactattaaagctttgctccaagttc

SEQ ID NO: 623 - DNA, 2442 bp, Homo sapiens
agcctcgcctagctctctgaaagaaagcctgcaacagaagggagagaagcggccccaagtgcagctgaaagcactccttgggagtcagccaagaccctccatccaagcagggctggatccttgcacttggccatgataaggagatgcttccaggtggcagcaagacttggccaccacagaggccttcttgaggccccccgtatcctgcccagactcaaccctgcctcagcatttggatcctccacagactccatgttctcaagattcttgccagagaagacagacttgaaggattatgctcttcccaatgccagctggtgttcggacatgctgagcctgtaccaagaatttctggagaagactaagtctagcggctggatcaagctgccctccttcaagtccaacagagaccacatccggggactcaagctcccatctggactggcagtttcctcagacaaaggtgactgtcgcatcttcaccaggtgcatccaagtggaaggacaaggctttgagtatgtcatctttttccagccaacccagaagaagtcggtctgtcttttccaaccaggctcctacctggaggggcccccagggtttgctcacggcgggtccctggcagccatgatggacgagaccttttctaaaactgccttcctggctggagaggggctgttcacactaagtctcaacatcaggttcaaaaacttgatccccgtggactctctggttgtaatggacgtagaagtggacaagattgaggaccagaagctttacatgtcctgcatcgcccacagcagagaccagcagacagtttatgccaagtcctcaggtgttttccttcagctgcagttggaagaagagtctccccagtaacagtcactgtgcctgcaggagagccactgcctcccctgcctgcctcctgcctcctgcctcccctgcctgcctcctgcctcctgcctcccctgcctgcctcctgcctcctgcctcccctgcctgcctgggacccatcaaagagcagggaggggtcctcaagcagcaattggtgaggcgagggaaaggacccttttctctgagtaaataaagtctcacagtcccattctcggcccagggcctttctgtggttggaaatcaaaatccttccagggcatctcacatacccaccttcccattcagcaccgactgaaaagatttactgagtacccgccaggtgtcaggcactgtgtgaggcaccaggcacccagaagtgaaggacagggccccggtctcaagatgcacaatgcgggagccaggtgccaagtcagagtgccctatcacgctcctcccacacccaccctggcttccatcatgagtgcagtgtcatctcagcgggaggaagggctaattttactctacaaaagcaatcagaaaacatcttctagaagaagctcttcctgaactgtctcaaaagttaagtggtgttcattaggcaggcaggggagaggaggatatcccaggcagaagggaagtaagaagtaagacaaaggtgcagaggtgtgaaagtgtacagggactttggagaagagcaaggtgttgaggagggcaggcgtttagggaaagagaaggtgggcaggagcaaaccacaggaaggcttcataatccctgctggagagctggaactttgtcttgcaggcaacagggagcctccaaagggcttgggctggggagtgacagagctttgttatttagaaagatgactcagtggcagtaaggcgtcagcaagactgaaggcaggagtactagttaggagatccccacaggctttacactagagacagtaagggcctgcaggggtcagagctgcgaagctgagagatatgagaaaatgttacaaatacaggaagtgcaggactgtgccactagttatacaatgtggatctgtgaagacgagctccaagtttctggcttatgagtttccaggtggttatcactggaaatacagaaagaggtgggggtaaacaatgagctcagttttacatgcatcgagcttgaagtgcccatggaacttgtaccatgtggcaagtgccagcaggaacgtggatattgtgatatggagcttggagagataagctactgactcaaatcgtgagccaatataaaatgtgacatgaggccggacacggtggctcatgcctgtaatcccagcactttgggaggccgatgcgggctgatcacttgagcgattcgagagtcgagaggctggtcgggagttcgagaccagcctgaccaacatggagaaaccctatctctactaaaaacacaaaaaattagccgggtgtggtggcgcatgcctgtaatcccagcatttggatcctccacttgaacccgagaggcggaggttgcagtgagccgagatcacaccattgcactccagcctgggcaacaagagcaaaactccgtccc

SEQ ID NO: 624 - DNA, 3222 bp, Homo sapiens
attattactagggcgacggccggacgcctccgcgttacgggatgaattaacggcgggttccgcacggaggttgtgacccctacggagccccagcttgcccacgcaccccactcggcgtcgcgcggcgtgccctgcttgtcacaggctgaaaaacagagtgggtactctcttctgggaagctggcaacaaatggatgatgtgatatatgcattccaggggaagggaaattgtggtgcttctgaacccatggtcaattaacgaggcagtttctagctactgcacgtacttcataaagcaggactctaaaagctttggaatcatggtgtcatggaaagggatttactttatactgactctgttttggggaagcttttttggaagcattttcatgctgagtccctttttacctttgatgtttgtaaacccatcttggtatcgctggatcaacaaccgccttgtggcaacatggctcaccctacctgtggcattattggagaccatgtttggtgtaaaagtgattataactggggatgcatttgttcctggagaaagaagtgtcattatcatgaaccatcggacaagaatggactggatgttcctgtggaattgcctgatgcgatatagctacctcagattggagaaaatttgcctcaaagcgagtctcaaaggtgttcctggatttggttgggccatgcaggctgctgcctatatcttcattcataggaaatggaaggatgacaagagccatttcgaagacatgattgattacttttgtgatattcacgaaccacttcaactcctcatattcccagaagggactgatctcacagaaaacagcaagtctcgaagtaatgcatttgctgaaaaaaatggacttcagaaatatgaatatgttttacatccaagaactacaggctttacttttgtggtagaccgtctaagagaaggcaggaggcagagcgagggaagtaaaggaccacttcaaggagaactacaaatcactgctcaaggaaatcagagaggacacaaacaaatggaaaaacactccatgctcatggattggaagaatcaatatcgtgaaattggccatactgcccaaagcaatttacagattcaatgctattcccattaaactgccgttgacattcttcatagaattagaaaaaactcttaaaattcatatggaaccaacaaaaagcccatatagccaagacaatcttaagcaaaaagaacacagctggaggcatcacattacctgacttcaaactatactacagggctacagtaaccaaaatagcatggtactgttacaagaacagacacatagaccaatggaacagaatagagaactcagaaataagtccgtgcaactacagccatctgatctttgacaaacctgacaaaaacaagcaatggggaaaggattccctatttaataaatggtgctgggagaactggctagccatatgcagaaaactgaaactggaccccttccttacaccttatgcaaaaattaactcaagatggattaaagacttaaatgaaaaacccaaaactataaaaaccctagaaaaaaatctaggcaataccattcaggacataagcatgggcaaagatttcatgatgaagatgacaaaagcaattgcaaccaaagcaaaaattgacaaatgggatctgattaaactaaagggcttctgcacaggaaaagaaactatcatcagagcaaacagacattctacagaaagggagaagatttttgcaatctatccatctgacaaaggtctaatattcagagtcaacaagaaactaaaacaaatttacaagaaaaaacaaccccattaaaaaagtgggcaagggacatgaacagacacttctcaaaagaagacatttatatggctaataaacttatgaaaaaaagctcaacatcactgatcatcagagaaatgcaaatcaaaaccacaatgagataccatctcacaccagtccaaatggcaattatttaaaagtcatgaaacaacagatgctggcaaggctgtggagcgagaggaatgcttttacattgttggtgggaatgtatattagttcaaccattgtgtagctgggactacaggcgtccactaccacgcccggctaatttttttgtatttttagtggagacagggtttcaccatgttggccgggatggtctcgatctcctgacctcatgatccacctgcctcggcttcccaaagtgctgggattacaggcatgagccaccgcacccagccaaggaaatatctttatagatgtcttcttgtgtacctgtgtaagaattcctttgggatatacagtcatgcaacacataatgacgttctagttagtggcaaaccacatatatgatggcagtctcataagatcataatggagctagaaaattcctatcacctggtgacatcatcacatgtttgtgatgatgctgatgtaaaccactatgctaccagttgtgtaaaacagtagcacataaaattatataccgtaatgataatgactatgttactgatttacatagttactgtactatactttttattgttacttgagtgtattccttctgcttatagtaaaagcagtaaaacagccccaggcaggtccttcaggaggtattccagaagaaggcattgctgtcataggacatgacagctccatgcttgttattacctctgaagaccttgcagtgagacaagatgtggaggtgaagacagtgatattgatgatcctgaccctgtgtaggcctaggctgtgtgtgtgtgtgtgtgtgtgtgtgtgtgtgtgtgtgtgtgtgtcttaatttttaacagttttttttaaaaaagtttttataattaaaggttatggaatcaggatagaaagaaagtctttttgtacaactttacaataggtttgtgttttaagcgaagtgttataaaagagtcaagttttaaacatttagaagtttactcacacctgtaatcccagcactttgggaacccgaggcaggtggatcacctgaggtcgggagttcgggactagcctggccgacaggttgaagccttgtctcttctgaaaatacaaaaattagctgggcgtggtggcaggtgcctctattcccatctacttgggaggctgaggcaggagaatagcttgaacctgggaggcggatgttgcttgcactccagcctgggtgacagagtgagactccatctc

SEQ ID NO: 625 - DNA, 3059 bp, Homo sapiens
cttttttttttttcttttttccggcgttcaagatgtcgaagcgaggtgaggttttgtttctggaggatcctccaccatctgtcgtgcagtggctggcggattcgtcaggagcggtggccctaggcagctggggcgctttgctctccttcaggccggagagagagagccaggccaccgcgagagcactgccagggccctcgaaagtggcagtggggtgctggagagttgagatggcaggatcccgacgtgaatgtagtctgggtaccgcgagatcgctccgcgaatagggctatcgtaatggggttgaagttagactggattaggccctggtttgcgcgacctctgcggttttatgccttgcaggagtaattgcgttttgcgaaagttagagcaagggttgagtcgtctaggtttcttaatttcgatgtcagagtgttaatagtaagaaataggctactttccgtgagaatcgggtggcacatggggacggcataagtaaaatccgagcgagctaatctatagcgtacagtctatcaaagcatgtgcggtgaattacagcttgagtatgagggggaactccgaaccatgtctagattgtgatctctttatcctgtttcccttccctttatatccacaggacgtggtgggtcctctggtgcgaaattccggatttccttgggtcttccggtaggagctgtaatcaattgtgctgacaacacaggtgaggtctttgcacgttgctatactcccccttttaaaagcactcaatgggcctgtggctaatgacctattgagccgtcaagaaaggggagagtgaaaacatcgcttttgggtgaagtggcaacatgtgttgtttgcttcaatcggtggtgtgacaaggcgttcttgcggactaactgcttgggcagtgagtggagggaggggctttggaagtgtttgggaaatgttatactgatggaacggcctgatggccctcaacattttttatttttatttacattcttttgtaggagccaaaaacctgtatatcatctccgtgaaggggatcaagggacggctgaacagacttcccgctgctggtgtgggtgacatggtgatggccacagtcaagaaaggcaaaccagagctcagaaaaaagggtgagtaaacactgagcccaccttaatactgatgagtagtggggggacgctttcctttattggaaaatggatcagttttcaaggcctcaagtttgttttccattgagaggcagtgtgagataagtatcttaagtttttgctcatattgtgttggaggggggaccatcatcttgtcacttccataccttagttgtttttttgttgttgtttttgttttgttttgttttgttttttgagatggagtctctctctgtcgcccagcccatactggagtgcaatggcacgatcttggctcactgcaacctctgcctcctgggctctcaaaaaaaaatatattacaaaacgaaaacaagctgcccgttgcttattttattatttgtttttgagatggagtctcacttgttgcccaggctggagtgcagtggcacatatctgttcactgcaacctccacctcccgggctcaagagattgtcctgcctcagcctcccgagtagctgggatcataggtgtgcaccaccacacccggctaattgctcattacttaatctcaggctccccactcaaaatttttcctgtcaggtgtatgatttaaagggggaggcctcaaaatacttgcagcttgtgtcctgtctggctttagaacttctggtgtttggtgcattttaacttcagcgcttgcacttttttcctgtgcctgcctaatctgtctctaccctgggatgtcttgctcttctaaagagttcctggccatcccttgatttacaaatgtgatgttgatttgtcagccctgtattacagttactcctattcctgtatccaccccacgatgctgtccagtagatttttagcctttgggttagaaattgttttttgttcaccattaatatccatttgagggctgggtagcactgtgattgtgattcagcaattgcatgggctttttcctcttctcagaacacttcctgggtctgattggtggcccagggagctgtcagagaagagcagagcaaatggccttcactttgtagatgagatggcaggagggtggattgttggtctcagtcagtggtgggacagaccagagctccgaacacttcagttttaaaactagttgtgagtttccaattctgttaatgtcttttttggtccttgtttctgctaaatgaatacatcccctccccttggaacttaatatcaataaataacaagcacagaaatatgcaaaaggaccaggtctacttgaagaatttgtgaggattaaatggtttatgagtagaggagggtcagtcagtaagtattggctacctcatgtgtgtcccattactaacttggttagacttatctattttttgtgtagtcttcctgtcataaaaattctgtgtaaggaccccatgctagtatcagtgaagattgtgaatccaggtgtgtctgactctacaatagttcttcacaagcattatatttcactgtgtagtgatacttcattttgaaagttgggaaaagcgtctttttcactttagtacagatgggtataaaagttacttaggacactagaaaacagttcattaaaagtaaaacaaagcctggtgcttgggcccaggaattcaaactgttttccagtgtaaatctgaatagcttggtctctgctcattgccaggactgggaggagttgggggtcccaggtcccatttctacatcccaattcagtgatactgggatcttaataacctacctgtgaggtgaagttggaaaaggcataggcaaggatagttgtcctgagagttttacacttgtgagaaaatactggcagctttgattttaagatgtgaatagatgatcgtggttcatgcctatactccctatactcccagcactttgggaggccaggcttgccaacatggcaaaaccctgtctctatg

SEQ ID NO: 626 - DNA, 2909 bp, Homo sapiens
aggaggaggggcgagattgggtcccgagggcagagaggcaggttctctggaggggacagtcacaggtggagaaatgggaggagcgggtgctctcgggggtgctggaggcgtccaaggcgctgccggaagagcagctggaggctgcccgagagcgctgcgcccggctgcacgagacccagcgcgagaacctgctgctgcgaacccggctgggcgaggcccatgcggtaaggagctggactctctgcggcatcaggtggaccagctggctgaggagaatgtggagctggagctggagcttcagcggagcttggagccacctccaggatcccctggggaggcacccctagcaggagcggccccctcgctgcaagatgaggtgagggaggcagaggctgggcggcttcggacccttgagagggagaaccgggagcttcgggggctgcttcaggtgcttcaggggcagccagggggccagcaccccctgctggaggcaccgagagaggaccctgttcttccagtgctggaggaggctccccagactcctgtggccttcgaccacagccctcagggcttggttcagaaggcaagggatggaggcccccaggccttggacttggctcccccggcattagactcagtgctcgaggcatcagctgagtgtccccaggcacctgattcagacccacaggaggcagagagtccccttcaggcagctgccatggacccccaggcctcagactggtccccgcaagagtcaggctctcctgtggagacacaggagtccccggagaaggctggccgtagatcctctctccagagccctgcctctgtggccccacctcagggtccagggaccaaaattcaggccccgcagttgctgggaggagagacagagggaagagaggctccccaaggcgagttggtgcctgaggcctgggggttgagacaggagggccctgagcacaagccagggccttcggagcccagctctgtgcagctggaggagcaggagggcccaaaccagggcctggacctggccacgggacaagcagaggccagagagcatgaccagaggctggaagggacggtcagggacccagcctggcaaaaaccacagcagaagtcagaaggggctcttgaggtccaggtctgggaaggcccaatcccaggggagagcctggccagtggtgtcgcagagcaggaggccctcagggaggaggtggcacagttgaggagaaaggctgaggcccttggagatgagctggaagcccaggcccgcaagctggaggcccaaaacacggaggctgcccgcctctccaaggagctggcccaagcgcgaagggcagaggccgaggcccaccgggaggcagaggcccaggcctgggagcaagcccggctgcgggaggcagtggaggctgctggccaggagctggagtctgcgtcccaggaacgggaggcgctggtggaggcgctggcagcagcgggccgggagcggaggcagtgggagcgtgaggggtccaggctgcgggcccagtcggaggccgccgaggaacggatgcaggtgctggagagcgagggccgccagcacttggaggaggctgagagggagcgccgggagaaggaggccctccaggcggagctggagaaagctgtggtgcggggcaaggagttgggggcccggctggagcatttgcagcgtgagctggagcaggcggctctcgagcgccaggaatttctgcgagaaaaggaaagccagcaccagaggtaccagggcttggagcagcggctggaagctgagctgcaggcggcggcgaccagcaaggaggaggcgctgatggagctcaagaccagggccctgcagctggaagaggagctgttccaggtgatgcctgcccgcctgggagctgggggccatgccaccctgccctccatcccatgagcagatgccagggtcatctgtcctcctagtcttgcctctggattcttggctagctacttgcctcactccccatgtggggcctgttgaagagagcactgtgctgggagtcaggtggccgtgttgacttatctggggtctcattttccccattctgcacatggacagaacttctgctgtggatgactgctccgcctgtctcacccgaggtcctccactgcctagggagctcagtgtttggcatcaaggaagccagcgatggtttctgatacccaggctgtgtgcgggctccacacggagggtggggtggtggtggggcccaatcccaggctgccatcctcagggagctcacaggacagtcaggatagaggcaagaaaacaggtgacaataactaggtgccaggggctgtgaggaggccatgcaggggcttgggagggtggtacccagcaagatacccagcaggtgcatgcgagtctatcagggaaggttttgtggagaaggtggggttgaaacagaggcttagagaaggccccacacagcagctcatgcctgtaatcccagcactttgggaggccaaggcaggtggatcacctgaggtcaggagttcgagaccagcatgaccaatatggtgaaaccccatctctactaaaaatacaaaaatcaggccgggcgtggtggctcacgcctgtaatcccagcactttgggaggccgaggcagatggatcatgaggtcaggagatcgagagcatcctgatgaacaccgtgaaaccccatctctactaaaaatacaacaacaacaacaaaaattagctgttagctgggcatggtagtgggcgcctgtagtcccagctactcaggaggccgaggcaggggaattgcttgaacctgggaggaggaggttgcagtgagccgagatcacaccactgcactccagcccgggtgacagagtgtgactccgtctcaaaaaaaccc

SEQ ID NO: 627 - DNA, 4015 bp, Homo sapiens
aaccgccaacggctgtggcgtttaaacccaagccgcagccgctgctgctcgccgagctcccggagctgggtgggggtgccccacgctgaaagagagtgatggagtgcccagtgatggaaactggctcactttttacctcaggaattaagagacatttgaaagacaaaagaatttcaaagactactaagttgaatgtttctcttgcttcaaaaataaaaacaaaaatactaaataattcttctattttcaaaatatctttaaagcacaacaacagggcattagctcaggctcttagtagagaaaaagagaattctcgaagaattacaactgaaaagatgctattgcaaaaagaagtagagaaactgaattttgagaacacatttcttcgcctaaagctaaataacttgaataagaagcttatagacatagaagctctcatgaacaataacttgataactgcaattgaaatgagcagtctttctgagttccatcagagttcctttctactgtcagctagcaagaagaaacgaattagtaaacagtgcaagttgatgcgtcttccatttgcaagggttccattaacttcaaatgatgatgaagatgaagataaagagaaaatgcagtgtgacaacaatattaaatcaaagacattacctgatattccctcttcaggatcaacaacacaacctttatcaactcaggataattcggaagtgttatttcttaaagaaaataatcaaaatgtatatggtttagatgattcagaacatatttcttctatagttgatgtacctcccagagaaagccattcccactcagaccaaagttctaagacttctctaatgagtgagatgagaaacgcccagtctattggccgcagatgggagaaaccatctcctagtaatgtgactgaaaggaagaagcgtgggtcatcttgggaatcaaataatctttctgcagacactccctgtgcaacagttttagataaacaacacatttcaagtccagaattaaattgcaataatgagataaatggtcatactaatgaaacaaatactgaaatgcaaagaaataaacaggatcttcctggcttatcttctgagtctgccagagaacctaatgcagagtgcatgaatcaaattgaggataatgatgactttcaattgcagaaaactgtgtatgatgctgacatggatttaactgctagtgaagtcagcaaaattgtcacagtctcaacaggcattaaaaagaaaagtaataaaaaaacaaatgaacatggaatgaaaactttcagaaaagtgaaagattccagctctgaaaaaaagagagaaagatcaaagagacagtttaaaaatagttcagatgtcgatattggggaaaagattgaaaacaggacagaaagatctgatgtcctggatggcaaaaggggtgcagaagatcccggttttattttcaataatgaacagctggctcagatgaatgaacagctggctcaggtgaatgaactaaagaaaatgacccttcaaactggctttgaacaaggtgacagagaaaatgtactgtgtaataaaaaggagaaaagaataacaaatgagcaagaggaaacatactctttatcccaaagttcaggtaaatttcaccaggagagtaaatttgataagggtcagaattccctaacttgtaataaaagtaaagcttctagacagacatttgtgattcacaaattagaaaaagataacttactcccaaaccaaaaggataaagtaaccatttatgaaaacctagacgtcacaaatgaatttcacacagccaatctttccaccaaagataatggaaatttatgtgattatgggacccacaatatattggatttgaaaaagtatgtcactgatattcaaccctcagagcaaaatgaatcaaacattaataagcttagaaagaaagtaaaccggaagacagaaataatttctggaatgaaccacatgtatgaggataatgataaagatgtggtgcatggcctaaaaaaaggtaattttttttttcaaaacccaagaggataaagaacctatctctgaaaacatagaagtttccaaagagcttcaaatcccagctctttctactagagataatgaaaatcaatgtgactataggacccagaatgtgttgggtttgcaaaagcagatcaccaatatgtaccccgttcagcaaaatgaatcaaaagttaataagaagcttaggcagaaagtaaatcggaagacagaaataatttctgaagtgaatcatttagataatgacaaaagtatagaatacacagttaaaagtcactcactctttttaacgcaaaaagataaggaaatcatccccggaaacctagaagacccaagtgagtttgaaacacctgctctttctaccaaagatagtggaaacctgtatgattctgagattcaaaatgttttgggggtgaaacatggccatgatatgcaacctgcttgtcaaaatgattcaaaaataggtaagaagcctagactaaatgtatgtcaaaagtcagaaataattcctgaaaccaaccaaatatatgagaatgataacaaaggtgtacatgacctagaaaaagataacttcttctctctaaccccaaagaataaagaaacaatttctgaaaatctacaagtcacaaatgaatttcaaacagttgatcttctcatcaaagataatggaaatttatgtgattatgacacccagaatatattggagttgaaaaagtatgttactgataggaaatctgctgagcaaaatgaatcaaaaataaataagctcaggaataaagtgaattggaagacagaaataatttctgaaatgaaccagatatatgaggataatgataaagatgcacatgtccaagaaagctatacaaaagatcttgattttaaagtaaataaatctaaacaaaaacttgaatgccaagacattatcaataaacactatatggaagtcaacagtaatgaaaaggaaagttgtgatcaaattttagattcctacaaagtagttaaaaaacgtaagaaagaatcatcatgcaaggcaaagaacattttgacaaaagctaagaacaaacttgcttcacagttaacagaatcttcacagacatctatctccttagaatctgatttaaaacatattactagtgaagcagattctgatccaggaaacccagttgaactatgtaagactcagaagcaaagcactaccactttgaataaaaaagatctcccttttgtggaagaaataaaagaaggagagtgtcaggttaaaaaggtaaataaaatgacatctaagtcaaagaaaaggaagacctccatagatccttctccagagagccatgaagtaatggaaagaatacttgacagcgttcagggaaagtctactgtatctgaacaagctgataaggaaaacaatttggagaatgagaaaatggtcaaaaataagccagacttttacacaaaggcatttagatctttgtctgagatacattcacctaacatacaagattcttcctttgacagtgttcgtgaaggtttagtacctttgagcgtttcttctggtaaaaatgtgataataaaagaaaattttgccttggagtgctccccagcctttcaagtaagtgatgatgagcatgagaagatgaacaagatgaaatttaaagtcaaccggagaacccaaaaatcaggaataggtgatagaccattacaggacttgtcaaataccagttttgtttcaaataacactgctgaatctgaaaataagtcagaagatctatcttcagaacggacaagcagaagaagaaggtgtactcctttctattttaaagagccaagcctcagagaataacagtgttttatggacaggcacagtggctcacacctgtaatcccaatactttgggtggctgaggtgagaggatcacttgagcccaagagtcggagaccagcctgggcaacacagggagacgctcactctac

SEQ ID NO: 628 - DNA, 2489 bp, Homo sapiens
cagaaatcgcttaagagaccgcggcaaagtaacttaactgagttgccttcttccatattttcacgcccctttcatccagaacattttttttcttgaactgcttccatggaggactcaacctccccgaagcaagaaaaagaaaaccaagaagaactaggggaaacaaggcggccatgggaaggaaagacagcagcttctccccaatattctgagcctgagtcgtctgagcccttggaggcgaagcaggggccagaaactggacgccagtcccgaagcagccgtccttggagcccgcagtctagagccaagacgcctctgggtggccccgcgggaccagaaacatcatcacctgctcctgtctctccgcgggagccctcttcctctccttctcccctggctccggccagacaagacctcgcggcatcacacaagccagtcagaaggaaacacctttcaacagtctcagcaacccaaaccccacctgtgtggacgaagggacgtgagctataacaacgctaaacagaaagagctgagatttgacgtttttcaggaggaagactcaaacagtgactatgatttacagcagccggcgcctgggggctctgaagtggcccccagcatgcttgagatcaccattcagaatgctaaggcttacctgctgaagactagcagcaattcgggctttaatctatatgatcatctttctaatatgttgaccaagatattaaatgagcgtcctgaaaatgctgttgacatctttgaaaatattagccaagatgtgaagatggcacattttagtaaaaaatttgatgcactacaaaatgagaatgagttgcttccaacatatgaaatagcagaaaagcaaaaggctctttttctccagggacatttggaaggagttgaccaagaattggaagatgaaatagcagaaaacgctcttccaaatgtaatggagtcagctttttattttgaacaagctggagttggtttgggcacagatgagacataccgcatatttcttgccctcaagcagcttactgatacccacccaatccaaagatgccgcttctggggaaagatcttgggtctggaaatgaattatattgtagctgaagtggaatttcgtgagggggaagatgaagaggaagtggaagaggaagatgtagctgaagagagggacaatggagaaagtgaagctcatgaagatgaggaagatgaattaccaaagtccttttacaaggccccacaggctataccaaaagaagaaagtagaacaggtgccaacaaatatgtctattttgtttgcaatgaaccaggaagaccatgggtgaagttaccaccagttatacctgcacaaattgttattgcaagaaaaatcaagaaatttttcactgggcgattgcatgctcccatcgtaagctacccacctttcccaggaaatgagagtaattatttacgagcacaaattgcccgaatttcagcaggaacccacgtcagtcctctaggattttatcagtttggtgaagaggaaggagaggaggaggaagaggcagaaggtgggcgaaatagctttgaggaaaaccctgattttgaaggcatccaagtgattgatctagtagaatccctatccaattgggttcatcatgtacagcatattctctctcagggtcgctgtaattggttcaactccatacaaaaaaatgaggaagaagaagaggaagaagatgaagaaaaagacgattctgactacatagaacaggaagtggggcttcctcttttgacaccaatctctgaagatttagagattcagaatatacccccctggacaacacggttatcctcaaatctcattccacaatatgctattgcagtccttcaatccaacctttggcctggagcatatgccttctccaatggcaaaaagtttgaaaatttctacataggctggggtcataagtatagtccagacaattatacacccccagttccaccaccagtttatcaagaataccccagtggaccagaaattacagaaatggatgatcctagtgtggaggaggagcaggctttcagggctgcacaagaagcagttctactcgcagctgagaatgaagaatctgaggaagatgaagatgaggaagatgattatgactaataaacataaaattagcctggttttatgtgacactgatacacacacaccccttatatgggactaattttacacttttctgtgttatgtgtgtatatacatacacatgtaagaaattattcaactgcaaaatctcaatcttgaaaatcaagcttgaaatttcataggtagaaatattagcatttttattgaaagatactcacaggattttccagaggctaaataacatgcaattgcataattgttctgagggttatggataatggaatatgtgtttgtacattcctgtttttaaaagggctcaggtttcacatggtccaggtgaggtaaaacaatt

SEQ ID NO: 629 - DNA, 1381 bp, Homo sapiens
aaccagcgcaaaatgtccctggaacaggaggaggaaacgcaacctgggcggctcgtaggacgcagagacgccgtccccgccttcattgagcccaacgtgcgcttctggatcaccgagcgccaagtacggcccgggcccggcgcgactaggggcagggagggggcgggccgggccgcgtggagtcgggctgacccgggtgaccttggccaggccacgtgggcgccccctgtctccgtttcctcctctcggagttgtgccgggaacgcgcaccaccggccttcaccccttagggcgcgggaggggacgcaggggaaatcgaagctgccagatgcccacgaccacaacgtcaccctccagattgccctctcggaggggcccagtccgcgcaggtggctgctccctactgcctgagctgtggctgagcagcagattggggagaaacaggctctcgcaccttggtaagctcagccactttcggtgagacccccgaggctttgggaagccacccttgggcaggacataagcaggacttatctccctgcagcgtctagggcagcaccgtccaatagaaatatgatgtgagccttacaggtaattaaacattttctagtagccacattaaacaagataaaaacaaacagctgaaatttttaacaatacagtacatttagcctagcaggtgcaaaatattaacatttcaacatgtaatcagtaaaaaacattgctgagatattttactcgcttttttggtacagagtgttccaaatccggcgtctgttaccttcgcagcacatctgggttcagccgcatgtggcgaattggagagcagggctttagggggttctctttgaggcctctcctaaagtggggtccagccctgtttttttttttaggtggggaaattgagaagggacggtgagctcaggttgctccagcagagccaaggcttaaagccagaaccactacaaagtttagagtttgctggagcaaacctctttttccccagtgtgaccccagctgcaccattgagcccttaatggggcgtccatcctttgtcactggagtgaagccttatagcaagcagagagtgaggccacagactcttgagatattctaggccattgcttcgaggtcgtatgtgagatgtgaacgtaagaccatttgaacccccaaagtctgggattttaaccctcaagggcaatttgatactgagaggttaagggcacagacttctgaatcatttcctggctgtgttgccttgagtacattcaggagtccctctaagcctcagcttcctcacctggagaacctggagaggttgggaggatcccaggagatgatgccagtaaaaggcagatcacagaccctggcaggttctcag

SEQ ID NO: 630 - DNA, 3284 bp, Homo sapiens
tagtgtgacatttcggaattaatggaacaatgaaggaagctgtacactggaggttccaggtggtcatggaaggtttccagtttatgcaaacttctgtgaaaatgagctttgttattggtgaagacattggaaattttaccagccaaaacagagtttctctcttattcagggtaagatgtaattgcagtgtgctagcgctggaagggacctgttttatatgttatgtatgttacacgtcagccctccatgtcctccagttctgcatccttggattcaaccaactgtgggttgaaaatactggaggtaaaaagacaaaaaataacaatgaagaacaacaacaaaaatacacagtataataattacatttacatagcatttattttgtattagacattataagtaatctagagatgatttaaagtatatgggagaatgtatgtagattatatggaaatatgagggtattttatttaaagggacctgggcctgtggataccaaggaataactaaggtaaaactgagcataagtggcctgtccatattttgttaaatatcagattattgattagtgatcatcaacattttcccgcattcatgcagtgcggcctctgaaaacatggttgaacatcctatggaattttttttttttttttgagatggagtctcactctgtcacctaggctagagtgcaatggcgcgatcttggcttactgcaacctccgcctgccccacctcgggttcaagtgattctcctgcctcagcctcctgagtacctgggactacaggcatgcaccaccacgcccggctaatttttgtatttttagacgagacagggtttcaccctgttggccaggctggtctcaaactcctaacctcaggtgatccaactgcctcggcctcccaaagtgctgggattacaggtatgagccaccgtgcccagcagaattttttaactatttggttacgactaatttggataatgtagtgcatgcagctttgatttgtgccactaagagtgggcaaactgtcttcctttttgtgaatcagtaaaaattttccctcaacatgtgtttgacagttgtcattcactgctaagttaaggcatttggtaaaccacacagcctctgcatccttcctagcgacagccacaagaaaaggtgggcatgggagggaaaatgctcttgtgaattgaactggaggcaagctccacttttctttagaaaaagatgtagatcaaaataactaatattttcttccttgctcgatttctgtgccttccatggtacatcaaaataataggaccagtaatggccacaatcctgttgactgctgttaccttcgccccaatatttctttaagcatttcttaagcatctagcttgtgttttgttatatttaacagattttcttaaagtattgtatgaattaaaaccagaaataacttcattttcctagaaagggataatttctcccggagaataaatcctgaggatttagttagatgctgtgggtattgtattttaaataatattttaatgggagcagctgattgactttcaaatggattgtttacattaatagtaattctgcagttgttttactattgcatcagtctgccagacaagttccatgtgcatattttaattcagaactaattatacttaaaaatttaaaccctgcatacttccccaaaaatgtttagggcagttaaaaacaactcttttggaagatgactcgcattttaagaaatgagagaacactgtcaaatgatgaatgcatttaaaaaataatttgcaaagtgataaaagcccttagttttaaatcttacaatgacattagctcttacaagaactcagtaagtatttgctgttttttaatgggatagtaataaggttgaggtttttgttaagggacgtttacttatcatcaaactctatacttactactacaaggaaactccaagtacattaaacactatgttttataattctttgccacactgccaataaattctgttcacattttaaggatgacaagtccactatatgtaacacgtaagaatgctatcctggcagtaggcacagggccagaataaactggcaagttttcattccacacaagtgtgggaaaaaaatgactacaacttaaactttatttacttgattgagagcttattgcacatgaaatgttttatgtggttgatcttaacttcgtttacattgacttctatgctcaagattgttcaattgctgctgctgccgttgtgttttctttcaggatcgaggtgggtaccttcatataatatcttctttttaatttcttctctggcaattctttcctggattctttgctttgcataattatacctacaatgaaaccttagaagaaaagaatatgaataaattgttaatataaagtcctacagaaattaatttatgaaatttctctaaatcacacaaaacttaaatacagatgactactaccctgagactgaaaaatatgttctaatttatagtgctatttttgggcagttttggtgtcagaatacctatcaacacattctttttttattaggaaaaaaaggatgtctacataacaatttgtaaagtgataaaatccattagtttttaagtcttctgatagcattggctattataagaaacaagtatttgctctcgtttttaacgggataataatgctatgtctacataaaatgatttctaccaccttaaatagctcactgtagaaattcatgtataaatggaaccatatagtacatacatatcatactcttaggtctggcaaatatttgaggttcatccatattttatattcactcatcagtagttgtaaacacattcttaaagtagcattttcagatatgaataagcagggatgaaataagtattagggtaagggaaatggttgaggctttcctaagtgaagtgtaaaaaccacagctttctttttaatgggatgtctaatatgcatttatctgttcaagcattttaagatttccatgaaaatgtcctgaaaaatcaagattcttcattgagggtgaggatctcccaatgggagactgctctgaaaagagcatgtgctttttgaattagataacctactataatcatggatgttcttgaatacttagcaaacataccagcatcccaaagtcaccaagataaaccctcctactccaacatcacatgatcttctaattctacctgtaaaaataagcataacaattaattagaatataattacgttatatacattactccacct

SEQ ID NO: 631 - DNA, 3019 bp, Homo sapiens
gcgttccggaagcccgctcccggggccatgggggcacaggtgaggctgccgcccggagagccctgccgagaaggatatgtgctgtctctggtctgtccaaactcctcccaggcttggtgtgagatcacaaatgtgtcacagctgctggcttctcctgtgctctacacggacctgaattacagcataaacaacttgagcatttcagcaaatgtagaaaacaaatacagtctttatgtgggcttggtactggcagtaagctcaagtatttttattggctccagcttcatactgaaaaagaagggcctcttgcaactggccagcaagggctttactagagctggacaaggtggacattcttacctgaaggaatggctctggtgggtaggattgctgtcaatgggagcaggagaggctgcaaattttgctgcttatgcttttgcacctgccaccttggtcacccctctgggtgctttgagtgttctcataagtgcaatattatcttcctactttttaaacgagcacttgaacattcatgggaaaataggctgcatattaagtatattggggtcaactgtgatggttatccatgccccacaagaagaggaagtcacatctttgcatgaaatggaaatgaaattgagagacccagggtttatttcctttgctgtgatcataactgtgatctccttggtgctgattttgattgtggctcccaagaaaggacagaccaatatattggtttatatttcaatctgttccttgattggagcgttttcagtttcttctgtgaaaggcctgggaattgccattaaggagctgatagaatggaagccagtttacaaacatccgctggtctttgttttgctggctgtacttgtgctttcagtaactacacagattaactatctcaacaaggcactggacacctttaatacctctcttgtgacacccatttattatgtattcttcacatccatggtagtgacttgctctgccatcttattccaagagtggtatggcatgacagctggagatatcattgggaccctgagtggattcttcactattatcattggcatcttccttctacatgcttttaaaaatactgacattacttggagtgagcttacatccactgctaagaaagaagccgtctctctgaatgtcaatgaaaacaattatgttttactagagaacttggagtgttcagccccaggatacaatgatgacgttaccttgtttagtagaactgatgactgaagtctctagaaacactgagttttaaccaatatgagacacacgaagaggaaaatgaatgcttgcttcttggaagaactgctaggaaagttagcatttttgcagttctaactaatttagatgtgaggccaagtaaaaatgccatttttttggccattgaatttgaaaatcaaattgattatcctccagaatctctacaaactttgaaatactctctaaggatcaaagaagtcaaagagctatgtgtgtctcagaataatctccttcttctggtcacagtatctttgtctctgccaggtggctcttcatttctttggtagctatttttagacttacagtcattcaccaatatacagttagcagtgttctgatagacacagtatcagtcatattctccgttgagtcataatttcaaactcaacaagatttcagaaaggtataatcatgtaatttctcatattaaaactgagaagagaggccaggcatggtggttcacacctgtaatcctagcagtttgggaggccaaggcggacagatcacttgagctcaggagttcgagaccaccttgggccacaaggcgagaccctgtctctacaaaaaatacaaaaattagccaggcgtggtggcacatgcctgtagttccagccacccgggagcctgaggtgggaggattgcttgagtctgcgaggttggggctgccgtgagcccagattgcgccattgtgctccagcctgggtgacaaagcaaggccctgtctcaaaaaagaagaagagaaagggccaggggcttttgctttaaaaaactttttttaaaacagaagtgaaaccacgggtgctttgttcttccttctgcacctccttcttaaactagatagctaattagttattttaagaaaaaagaaatttaaaaaaaagcctgctttatttgttagtgggctagaatacacaagacatacccacccatgaagagtttatgaattgtaacttattgacattatcataggaatttactaccagttaaagagggagaacggaggaagagaaaaatacttcagataaaggaaaaagttttcttctcacaaaaacacagacacgtgattgttttcacaggttccattaattaactcaggtctggaagacataggacaaaatggagtttctgaagaagtccaggtgaattcagctttggagtcacttatgttcattttttttccttttcttttactattatcctaaaggttatttttcttgttgatatagagatttttgtaaaagattgctacattatttcaggattatatcctacatttcgattgctctcaaatgttttatccctaaagagtgagttttccacagactgtttggaagcaactagaaaaatctttgtgaaaaatctgaacaaattatcataatggctctcttgaaattttgcactttcacccttattaaggaaattataattagttactaacctttaaaaatagatatattctaataggatagaaagttaacttcctggcaaacaaaatactaagatctcaggggctactgcaggaaaatacctttttcgcacattaaaatgtttataaaattttcccctctcatttcaaatgcatggcaggaataacatttttggtggtctttaatgtgatggacagattatactgtcacttattgattttatggaaaataaattggctatcttatttttataacaatcttatttttctcaaaacaaaaatcctaaccaaaaagttgtcatt

SEQ ID NO: 632 - DNA, 3382 bp, Homo sapiens
cgttttcttttccttatggctctgtagtcccacaggaatctcaggcctctgcccagcctctggtggcccctcctatgtgtgagcttccagggtctgctcggtccagcccagacaggtactccatggaggcagtagatatgaacacagaagacggttttgcatttgaggaggaaagtgacttcaatgggaacgcacacccctcagacacctcggagctatttgaggtgaaggcgcaggccagccggatgcagcgcctgctgggtccttctgagaccagctcactgagaaacagccagtctgaaaacagctccctcaataacatgccactacgtggtgggctgtctgtgcacacatgcagctcagccagtcaatctgaggccagctccatggtcaacttcccagcctactcagtccgctctgagtccagctcggccttccagttctctgacatcatcgaccagttagagcagctcagctacccacccacgacggccgaggactccagcagcacagagtcagactcatgggactctgaaaccgaggcccccctagacataagccttttcttcagcaacccttttgcacacacaagtggagaaagagtcccttttgatttacagaacaatttaaagaatttgactccaggagagcaaatagataaaaacccatcttgaccactctgggttcctttacaaggcaacccactcacccacgctgtgtggtttagagctcagaattgtttggtttaaacacagaaagtgactttcatttcatggatagatattcaatttttttttaatttcctgatttattatacttttttgaatgtcaaaaaatttgacctttcacttggaatgacgtaaaagctatgcctccggtcttagacctgagtactccagccagtcctcctagaggaccgataaattagtctttgtagtttatgttttttgccatatgctttgattcaagtaagaactggtgctatacattctgaatgttacacaattctgttcatgttgatcttcaatagaatatgtgtattacactattgatgctgcttttcaagatgagccctgttgcctataattaactaggacacaggttttgtctcacttgtccagccactgcgctacacaaaaccttgagtatgcctctacagccctaaccctgggaaagatggccataggccatggcctcctgtgtgctgtggtcaaactcgtgggactctgagaccctaaggcccccgtagacattagccttttcttcagcaacccttttgcacagacaagtggagaaagagtcccactgggactctggggggacagtcatcctttgcactggggttgggggtgaggggatgcctggaactgtcccagtgccaaaggcaccatgtcatttttttttttaaaggtgtcaaagggccactgcctcattattgacttgagacccagaaatagtgctgtgtgtagatagtggtcttggagaggcgttggtttaaaatgcacttatgtaagtttgagctgttttcttttcttcagcttaattgggaactagaagacacgtggttgcaaaaaaagcagaaccagacacaccatgggcatcattctgtcccaggacaatgggaagggtcccaggggcaggtgtgccaaggtggccctgcccacccatccagcgtacccgtaaacacataccaggtgccatgggccctgctgggtaccacatggagagcttctcagtctaaaccaccataaaagtcaaggctgatgtttgtggcacagagtgggtaggtccatccagggacgtcatggggaaaccactgccatgcagctcagcacccacaagtgccggtctcaggccagccctagatgacactgttcaatttgtcaagtccacagatagggttggggtttttgttgtttttcttttctgatcttacctagtagtgcaataccacatttaaagtttaattctcttcccagaatgtcttgtggaaactttacatttcattcctgttcacattgtaagatctctgatgttttgcctggatggatttactgtgattgcacagggaccacgtggctcaggtgtctgagccattgagggcatcttgcaaggactggttttccttttctcatcagtgttggctggatgccagcaggggttttgtggctaaccacatcaggcagtttcccatttttgtagctttgttatacctaaaccgcagtctcatcattttgcttatgcagctagaagtttcagtctgtatagttgttattcattctgtccctggtaatttagacctgccttcttgctttaggggccattgggcacagctttctacattggctaacaaatacctgtgaaaatgttaacagacagaagcgcagcagtgaacctgaggtcaggacaggactgtttgggaggttcttcttttcttactgtcactccaaaaataaaccttggatttgtgtgctggggagaaatgagtatagataacatttaaaacgttttcctaaaccttagtattcatatggtagctgatggttcctctccccttcattactgttgcctgacgacggtccttgctgatgctgtgaactaacaaagttgtctttttgtttttaagggaacccaccctggcgtctggacagcaggttaggtttgggtggttttgagctagcactgctgtggggcaggggtggccgctccctggtgaagctaatgctgtggaagctggaatgttccttcctaaggagtgggatcatgcccctaccccagcagaggtatctcatcactcgctcatgtgcgagattctaaataaattttgttcttgggcatcttctactaggcctcctataaaatagatcttgctgtttttggtttgtgttaatggaacctcactttctagagataattctttagttttttatttaggaagttttcaaaatatacaaagcaggaatgtaaggaacccgcatcacctcaaattcagtgttacccacacttgaccatgcttgccccagctgtgccttttttctttccttgggtattttgttgctaaagtattttattattactgttttagagacagggcctcactcctgtcacccaggctggagtatggtggcacagtcacatctcactgcagcctcaacctcctgggctcaagccatccccccaccccagcctcctgagtagctgggactacaggcacacatcactgcgcccagctaatttttaaaaaatttttgtggagacaggttctcttcatgttgcccaggatggtcttgaattcctgggctcaagcagtcctcctgtctcagcctcccaaagtgccagaattgcaggcatgagcctgggtgctagagcgaggccctgtctc

SEQ ID NO: 633 - DNA, 3067 bp, Homo sapiens
gatgacttggagaacagtcacttcctctttctgggctacagttttctcatcagtaactgaagagcttgcagtaccttcaacgttccttcaggtgaggacttctctttgatcactgctatggtttgaatgtgtctcctaaagttcatgtgttggaagcttgatccccagtgcaaaagtgttgggaggtggggcctaatgagaagtaattaggccatgagtattctgccctcatgtattcatgagattaatgtcattatcatgggagcgggtttgttaaaatgagttcggccccttccttctctctctttcttctgccatacagtatgggatgcacagtgcagaaggtcttaccagatactggcaccatgcttttggacttctcagcccccagaaccatgagccaaataaatttctgttcattataaatcacccagtctgtggcatcctgttagagcagcataaatggactaagataatccctataaagagtggcaacagaacagttcccagctcactggcagaatcctatgatcaactagtaatgtctgccagggaaggaggatgagtggcactaacatgtacggtgtgtttgctcactgttctacaggattcaactagaatctctgggtctgtgtgaagaccaagagctgggaacagaagcagggctctagagggaaaagtttctttcggattccttttttttgttttgttttaaagagctgctctgtgagaagacaaggagaaaatggtccctacaggatactcacctctgtctcagggagtcactcaagcatttattcaaccaagaaagagaattagttccaggtgagaggagaaccccagaatacccacctacttttaaaattctcccctatgcatattcaggaaccaatcagaggatctgtaatgcgctgtgagtagaaagggaaggggaatgggaaagaaaaaagtgaagcttggaatggtggaaagtacatgggctctgccatttaccagctaagtgatcttgggcaagtaactcgacctttctgagcctcggtttcctctttggtgaaatgaggactaataatccatttctccctcagtacagacagccagcatgcagtgagcactcagcgatggccaagtatgggagaagccatgctggaatgaacatgtgggaccattttgtgcagtttctcagcgccaacactgactggtcccctgggctcgtgggccgccggcagcctcggctcgttctccagacagtgttccaagaagccacttccagcgaggaagcgttggcctgagaactggaacctctgcggtctctgcaaacacgacaatgacaaacacttgagagggcatgggagaaaggagctccttcatagggcagggaggggtgggcacttgggtgtgaccaaggagaggaggcgcgcctggtcaacagctctccctggcccgtgtccagctccctcctcacacagagaggggggcgcatctcagggatggcatctttcccccccacagggaaattcttatctttgaaacagcatgggaatcgaggcacccaggaggggagcagaggcaggctggcctccttcaggcccatcctccagctgggctggtggtgccagggaggctccctgcttggtaacaaaggcctgagggagagttgcgaaacccagcaggaaagccggctcaccttcgcctccccctgcggctgggaggagaggaaatatcccatggctgactgtgccaaggaggtgtctgagccagccctcccggcccgagggcagggcaggtggccctgagagataagccaatcccgcagctgcagatgaggagttctgagaagcattgctcaggacagcggtaaatcacttcttggaggtgccctgcacgccggtcctgggagcaggcggcctcccgggggtgcgggagccccactcctccgtggtgtgttccatttgcttcccacatctggaggagctgacgtgccagcctcccccagcaccacccagggacgggaggcatgagccggtcaaggcacctgggcaaaatccggaagcgtctggaagatgtcaagagccagtgggtccggccagccagggctgactttagtgacaacgagagtgcccggctggccacggacgccctcttggatgggggttctgaagcctactggcgggtgctcagccaggaaggcgaggtggacttcttgtcctcggtggaggcccagtacatccaggcccaggccagggagcccccgtgtcccccagacaccctgggaggggcggaagcaggccctaagggactggactccagctccctacagtccggcacctacttccctgtggcctcagagggcagcgagccggccctactgcacagctgggcctcagctgagaagccctacctgaaggaaaaatccagcgccactgtgtacttccagaccgtcaagcacaacaacatcagagacctcgtccgccgctgcatcacccggactagccaggtcctggtcatcctgatggatgtgttcacggatgtggagatcttctgtgacattctagaggcagccaacaagcgtggggtgttcgtttgtgtgctcctggaccagggaggtgtgaagctcttccaggagatgtgtgacaaagtccagatctctgacagtcacctcaagaacatttccatccggagtgtggaaggagagatatactgtgccaagtcaggcaggaaattcgctggccaaatccgggagaagttcatcatctcggactggagatttgtcctgtctggatcttacagcttcacctggctctgcggacacgtgcaccggaacatcctctccaagttcacaggccaggcggtggagctgtttgacgaggagttccgccacctctacgcctcctccaagcctgtgatgggcctgaagtccccgcggctggtcgcccccgtcccgcccggagcagccccggccaatggccgccttagcagcagcagtggctccgccagtgaccgcacgtcctccaaccccttcagcggccgctcggcaggcagccaccccgttcctgaaagtaaacaaaac

SEQ ID NO: 634 - DNA, 3651 bp, Homo sapiens
gattttctttcgctgtaccttactgccttgctcgctcctgccctcactcctgcgatggtttctttggcagctcagtcgtagcgtttaagtctggtcctatgaaggcctttctgttactccacggtcttgggcagtttgcgttggctctaactcttaccacagaattgcagaaattcctctctttattgagggcaccgctagcacctgccccccgaccctggttctgttttgtgaaatactgcctgctttgcttatccactgcagttaacttttggagttacccatatttcatctctttgacatggactcccatacggagtgaccttgtatcctaggttgccagagagagagttctggcttataccattgtcccagcataatcactttcaaaagattcatggtttgtatgatcaagtttgtctctgtctctaagtgagatacacttaatatttgtagttaagagagtggcacgtggcggcccacgtgagacttgcacgggggcccacagatgtcagagccacagactaggaaatgagaattcctccaggtcagtgctcatatgcctcatgtaggtagagagctttgggtggctttgcccttagagggcaggggatcccctcccaccctggcacagaaagtccaagctaatactgagagctatgtctagtcaaattcatccccatagttactgtggggcgtcaaagccagggcccctaaattcactgtcatgatccagaagaaggtgttcagagttcaagcccagctccttgacatggcatctggctcctgggaaagtaactgatgtggaagtgtgaccaatgttaggcctaaggggtcctgggcttccccaggaaccagagaactcagtccatgcagggccagttagttttaaagactgcatatcagcacttataacggtcctaggattaggctaagaggtagaacactggttatccactaggatgaccaaccatcttagtttgcctgggattgaggggtttcctaggacatgggacttgcagttttaagaccagaaaactcctgggcgaactgggatgagttggtcaccctcttctcaaccctggctgcacgttagactctcttgaggagcctctcatttagagtctaatttaattgattcaggtagttgtattttttttaacgctctgaggttgattccaacaagctaccacagttgagaactactaggctgtagacagtgtttccaataaccattgaagatgtttggtttttgagcagaagtggaccgagacgtccctgaaaggggtgtatgactctgtgtgttggtctttcgccttagcaagagggatatcaagctggcagttgcctactattgctattatctgtccccaccgccaggccttctttctcattggtgaggaccaagctttctcttttcccggcatgctccgataccctctccctgaagacaggaggtcagtggaattgcctcattttgattggtggaatcatgatttacacagttgtagatgaagctggcatgagacttgatacaggactgccatctctaggtctgggacatgtgccccggagactggtggtctagaggctaactgtgagactgtgtgtgctttggctttgcccggtggggtgtgggagcttggagaccaggtgcttctgggactgtcctctctgcaggcctccaggatcatgtggtatgtcagcaccaggggcgtagccccacgggtcaactttgagggggccctcttctctggctatgcacctgacgggggcctctttatgcctgaagagctcccacagttggacagagagaccctgtgccagtggagcacactctcctatcctggcctggtgaaggagctgtgtgccctcttcattggctctgagctccttccaaaagatgaattaaatgatctgatcgaccgagccttcagcagattccgtcacagagaagtggtccatctgtccaggttgaggaatgggctgaacgtgttggagctgtggcatggcgtcacatatgcatttaaggacctgtccctgtcctgcacaacacagttcctgcagtacttcctggagaagagggagaagcacgtcactgtggttgtaggaacatctggggacacaggaagtgctgccattgagagtgttcaaggggcaaagaacatggacattatcgttctgctgcccaaaggtcactgcacaaagattcaggagctccagatgacaacggtgctgaagcagaacgtacatgtgtttggagtggagggaaacagcgatgagctcgatgagccgatcaagactgtgtttgccgatgtggcttttgtcaagaagcacaatctgatgagcctgaattcgatcaactggtcccgggtcctggtgcagatggcccatcacttctttgcttacttccagtgtacgccatccttggacacacatcccctacccctggtggaggtggttgtgccaacaggggctgccggtaaccttgcagctgggtacattgctcaaaagataggcctgcccatccgtctggtcgtggcagtgaaccgcaatgacatcatccacaggactgtccagcagggagacttctctctctctgaggctgttaaatcaaccttggcatcagctatggacattcaggtgccctacaacatggagagggtgttctggctgctctctggctctgacagccaggtgacaagagccctcatggagcagtttgaaaggacccaaagtgtgaatctgcccaaggaactgcacagcaagctttcagaggcagtgacatccgtgtcagtgtcggatgaagccatcacccagaccatgggccgctgctgggatgagaaccagtacttgctgtgcccccactcagcggtggccgtgaactaccattaccagcagatagacaggcagcagcccagcactccccggtgctgcctcgcccctgcctctgcagccaagttcccggaagctgtcctggctgctggcctgacccctgagactcccgcggagatcgtagccctggagcacaaggagacacgctgcaccctgatgcggagaggtgacaactggatgctgatgcttcgggacaccattgaggaccttagccgacagtggaggagtcatgccctcaacacctcccagtagcctggctggaggtggctttctttaggcttcagatcccaggaagatgcaccttctgagctgccttgtgcaccctccccattaagcgtaggttaggaggtttccgggaggctgctcagctggatctggagccagctggctttgctccgttccctggctagtctgtgcctggtcaccagggaggctgagtgaggggctgtgaacagttgccggaagcaccccctccctccccggcccgtgcagcagtgtctgagctgtagtgaaagtttcagggcctgcaaaagaagaggcttgggcacaggactgaccatggctccaggggtttaggacccccagacctgtgaaggtgggagcagctcaccaccttcacgcaggctttgtatgttctctgagccttagttgattttggcccccaaaccaaatccaaaggttctggcccaccttgtcagaggcttccaccctgctcacatgttgggaatccctggaataaaatgcttgttcagtgtg

SEQ ID NO: 635 - DNA, 3243 bp, Homo sapiens
gtgttgcagaaatccggcaatcgacctgaggacttgcgagccgctcagctcccgggacgtttggagctgctgctaaataatttctgctcagccatgtcgccggctccagatgcagccccggctcctgcgtcgatctccctgtttgacctcagcgcggatgctccggtctttcagggcctgagcctggctcaggggagagagaaagcccagaaagaaagctactccagggtcctatggatatttcagagaagttattttgttcaacttgtgaccagaccttccagaaccaccaagaacagagggaacattataagcttgactggcatcggtttaacctaaagcaacgtctcaaggacaagcctctcctgtctgccctggactttgaaaagcagagctccacaggagatctttccagcatctcgggatcagaagactcagactcagccagtgaggaggacttgcagacactggatcgggagagggctacatttgagaagttgagccgacccccaggcttttaccctcatcgagtccttttccagaatgcccagggccagtttctttatgcctaccgctgtgtcctaggccctcatcaggatcccccagaagaggcagaactgctgctacagaacctgcaaagtagaggtcccagagactgcgtggtgctcatggctgcagctgggcactttgctggtgctatatttcaaggaagagaagtggtgacacacaaaacttttcaccgctatacggttcgggccaagcggggcacagcccaggggcttcgggatgcccgaggtgggccatcacactctgctggagccaacctgaggcgctacaatgaagccacactatataaggatgttcgtgacctgctggcagggccaagctgggctaaggcgctggaggaggctggtacaatactgttgcgtgctccccgctctggccggtctttgttctttggaggcaagggagcacccctgcaaaggggggatccccgactttgggatatccccctcgccacccgcagacccaccttccaagagctacagcgtgtgctccataagctgaccactttgcatgtctatgaagaagaccctcgggaagcagtcagactgcactcacctcagacacactggaaaacagtaagagaggagagaaagaagcctactgaggaagaaataagaaagatctgcagggatgaaaaggaagcgctggggcagaatgaggaatctcccaaacagggtttgattactatctggcaactgtcagatctgagtttctgtcctaaaaatgcactggcaaattccctactctcataactgacccatttccttatttaaacacacacccacagtgtctatcttagcaattactgagacatgtttagtgacctttccaaatctattatctcttttgttatggatgtttccccagagctaagaaaatctttgtgtggagcagatgcgtggatgtgttgcatggatctcacatagtttatctttgattggatgctgtggtttgaggctgagggctgcttccatgctttcctctattgtgcggcaccctaaggctactcatacggagagtccagggacttgttcttgtctgggctgagagcctcatttctgcatgtgatataatggactcagctcttgatgtgctacttttatctgggtgacaaaataaaaacaatttcatttcaggctttcattcttatgcatctgcttctaccctctgagtactccctagatggatttcacatgtcaggtttttccctaggttcagggtcggagggagaagatggctttcaggtagagttggagctagtggagttgactgtggggactctggatctttgtgagtctgaagtattgcccaagcggaggaggagaaaaaggaataagaaggagaaaagccgagaccaggaggctggggcacatcggactcttctccagcaaactcaagaagaggagccttccacacagtcatcccaggcagttgctgcccccttgggccctttgctggatgaggccaaagcccctggtcagccagagctctggaatgcactgcttgctgcttgccgagctggagatgttggagtgctaaagctgcagctagctcccagccctgcagaccctagagttctgtctctgctcagtgcccccttgggctccggtggctttactctcctgcatgcagcagctgcagctggaagaggctcagtggttcgtctgctgctggaagcaggtgctgaccccactgtgcagtgagtaaaggtccccatcctgagtcattttgggtatagagaggataatttggaggttaaagttggcattggctacttggcaatattcccttggtctggttgggtgatgttgggaaaggcaggaggcaagttaaacccatttttggagtttttgcacctagggactctcgggcccggccaccttatactgttgcggctgacaaatcaacacgtaatgagttccgaaggttcatggagaagaatccagatgcctacgattacaacaaggctcaggtcatctggaataggaaggacaagcagagtgggaaggcatcacagatcctggctagatcctttctacttcttgcagttttaccaaagataacttatagggtcttatatttgaaatcctccaggtgccaggaccattgacaccagaaatggaggcacggcaggctacacggaaaagggagcagaaggcagcccggcggcaacgggaggaacagcagcagaggcagcaggagcaggaggagcgtgaacgagaagagcagcggcgatttgccgccctcagtgaccgagagaagagagctctggctgcagagcgccgactcgctgcccagttgggagcccctacctctccaatccctgactctgcaatcgtcaatactcgacgctgctggagttgtggggcatccctccaaggcctgactccctttcactacctcgacttctctttctgctccacacgttgcctccaggatcatcgccgtcaggcagggaggccctcttcctgatctcttacagctctacctggggccaactcagggacctgagagggcacattcacagcagccctaggttttttcttccccgtgaaaccagagatgatttggaagatgggggtgaaggacactcgggaactagggcaaagacagggctagaggtatgtggagctggtactgtctctggaattttaatcacaataaagtttggcaagg

SEQ ID NO: 636 - DNA, 3441 bp, Homo sapiens
ttttcggcccagtagcggcggctcagttgctgccatggagtcagccgggctagagcagctcctacgggagctgctgctaccggacaccgagcgcatccgtcgggccacggaacagctccagatcgttcttcgggcccccgccagtttgcggccgtgctgacccgcagacgactgaacacccgctggcgacggctggcggcggagcaacgggagagcctcaagtccctgatcctgacggccctgcagagagaaacagagcactgtgtgagcctcagcctggcccagctctcagccaccatttttcgaaaggaaggcttggaggcctggccacagcttttgcagctgcttcagcacagtacccacagcccccacagcccagagagagagatgggacttttgctgctaagtgtggtggtgacctcccggcccgaggccttccaaccccaccaccgggagcttcttcggcttctgaatgagactcttggtgaggtgggctctcctgggctgctcttctactccctgcgcactctgaccaccatggctccctacctcagcactgaagatgtgcctctcgctcggatgttggtgcccaagctgatcatggccatgcagactctgatccccatagatgaggcaaaggcctgtgaggcccttgaggctttggatgaactgttggagtcagaggtgccggtcatcaccccctacctctctgaagtcctcacattctgcctggaggtagctagaaatgtggccctgggcaatgcgatacgcatacgtattctctgctgcctcactttcttggtcaaagtcaagagcaaggtcttactgaagaatcgtctcctgccacccttgctgcacacccttttccccattgtggctgctgagcccccaccaggccagttggatcccgaggaccaggattcagaagaggaagagttggagattgagctgatgggggagactcccaagcatttcgctgtacaagttgtggacatgctggcactacacctgccccccgagaagctctgtccccagctgatgcccatgttggaagaggctttgcggagcgagagcccataccagcgcaaagctggactcctggtgctggccgtgctgtctgacggagctggcgaccacatcaggcagagactgctgcccccactgctgcagattgtgtgcaagggcctggaggacccctcgcaagttgtacgcaatgctgcgctgtttgccctgggccagttctcagaaaacctacagccccatatcagcagctattcaagggaggtgatgccactgctcctcgcctacttgaagtcggtgcctcttggacacacacaccacctagccaaggcctgctatgccctggagaattttgtggagaacctagggcccaaggtgcagccctaccttccggagcttatggaatgcatgctgcagcttctgaggaaccccagcagtccccgggccaaggagctggctgtgagcgccctgggagccattgctacggctgcccaggtctcgctgctgccctacttccctgccatcatggagcacctgcgggaattcctgttaacaggccgtgaggaccttcagcctgtgcagatccagagcctggagacactgggggtgctggcacgagcagtgggggagcccatgaggccgctggctgaggaatgctgccagctgggtctgggcctctgcgaccaggtagacgacgctgacttgcggcgctgcacgtacagcctatttgcagccttatcgggtctgatgggtgagggcctggcgccccacttggaacagatcaccacgctcatgctgctgtcactgcgttccaccgagggcattgtgcctcagtatgacgggagcagctccttccttctgtttgacgatgagagtgatggggaagaagaggaggagctcatggatgaggatgtggaagaagaggatgactcagagatctcagggtacagcgtggagaatgccttcttcgatgagaaggaagacacctgtgctgccgtgggggagatctctgtgaacaccagtgtggccttccttccatacatggaaagtgtctttgaagaagtatttaaactgctggagtgccctcacctgaatgtgcggaaggcagcccatgaggctctgggtcagttttgctgtgcactgcacaaggcctgtcaaagctgcccctcggaacccaacactgctgctttgcaggctgccctggcccgagtcgtgccatcctacatgcaggcagtgaacagggagcgggaacgccaggtggtgatggccgtgctggaggccctgacaggggtgctccgcagctgtgggaccctcacactgaagccccctgggcgcctcgctgagctctgtggcgtgctcaaggctgtgctgcagaggaagacagcctgtcaggatactgacgaggaggaggaagaggaagatgatgatcaggctgaacacgacgccatgttgctggagcacgctggagaggccatccctgccctggcagccgcggctgggggagactcctttgccccattctttgccggtttcctgccattattggtgtgcaagacaaaacagggctgcacagtggcagagaagtcctttgcagtggggaccttggcagagactattcagggcctgggtgctgcctcagcccagtttgtgtctcggctgctccctgtgctgttgagcaccgcccaagaggcagaccccgaggtgcgaagcaatgccatcttcgggatgggcgtgctggcagagcatgggggccaccctgcccaggaacacttccccaagctgctggggctcctttttcccctcctggcgcgggagcgacatgatcgtgtccgtgacaacatctgtggggcacttgcccgcctgttgatggccagtcccaccaggaaaccagagccccaggtgctggctgccctactgcatgccctgccactgaaggaggacttggaggagtgggtcaccattgggcgcctcttcagcttcctgtaccagagcagccctgaccaggttatagatgtggctcccgagcttctgcgtatctgcagcctcattctggctgacaacaagatcccaccagacaccaaggccgcactgttgctgctcctgacgttcctggccaaacagcacaccgacagctttcaagcagctctgggctcactgcctgttgacaaggctcaggagctccaggctgtactgggcctctcctagactgcaggctgcagccagtccagagagaatagagcctgcccaggccttaagaccacctctcagcccagttcagttctgccttaccaaagattctgagactcatacccatttggagccagccccacttgctgccttacagggctgtccctgaggctggatctgttacaaatgagtcatgacatcatactgtaataaaagcagcttgttttctgcttg

SEQ ID NO: 637 - DNA, 2559 bp, Homo sapiens
tttttttaagagacagggtcttgctatattgcccaggctagtttttacatctttaaagctgaatacttagctgggtgtggtggtgcacatgcctgtggtcctagctgttcaaaaggttaaggcaggaagattatttgagcctaggagttctgggctctagtgcactatgctgactgggtgtccacattaagttcagcatcagtgtagtaaactccaaggagctgggagccaccaggttacccagggaggggtgaactagcccaggttagaaatggagcaggtcaaaactcccatgctgatcagtagtgggatcatacctgtgaatagtctctgcactccagcgtggacaacatagtgagacctcatcactttaagaaaaacaaaccctgaatattttaagttagagatggagttagaaatacttttagttatagcagaatcatgtcaatttttagtacatcttttacttagctttttgcacacttttttttttttgagacggagtctcgccctgtcccctaggctggagtgcagtggcacagtcttggctcgccgcaacctccgtctcccaggttcaagcaattctcctgcctcggcctcctgagtagctgggactataggcacccaccaccatgcacagctaatttttgtatttttagtagagacagggtttcactatgttggccaggctggtctcgacctcctgacctcgtgatctgcctgccttggcctcccaaagtgctgggattacaggcgtgagccaccatgcccagcccctgcactaattttttaaacaaagtcctgttggtgctcccttcaaaatttatctccagtctgaccattttaccacttctgcaacaacccttctgactcagccactgttctgtttggtttgggttacatagtggcatcctacctggtcttcctgtttccactcttataccactagaccatattctccataaaccaccagagtgatcttttaaaataaaagcataaattatgttcaaaaccctccagtggcatccatctcatgtaaataaccactccttcctacaagatgccacctcacctgccccgactgcctcatcatagttccctctgcacaatgcccactttgccacagctgtgtgctcctgctggctcttggatgagcccaccagtcacacttctgcctgagggccttgcacatgctctggttgctgcctgagatacttatccccatcactatgatcaccttcccagagaggcatttcctggcctccctatttcctcaccaccatcatttctgtctgctgactctactttgtctgttggttgatttttgcactaagcgtactaccagaagctttcctctcaatttgctttcccacagtaaaagagcagggcctttgccttgtccattagtttctcctcagaacagtgcctcccaggtgttcaacaaatacttgctaaataaaagatggctgatagcaaaaatatttatgtctatgtatagggacttagtttttattgacattgtgcttttattccctagagaccctgaaatatggcgtctggcctgcttgaaagtttggggcagaagctgtattaaacttgttccgtacacgtcctggagagagatgtttttagaacggcctcgtgttcggtttgatggcgtgtatatcagtaaaaccacatatattcgtcaaggggaacagtctcttgatggtttctatagagcctggcaccaagtggaatattacaggtacaactgtagtacactgagtgagtggaaaattctctctctccatgtattagttaaatggacatctgttctttgttgcttttgattgacccgcaaaatggccctcagtatttttatctagtactcaatgtaggaattgcactaaaaaaaaaaataggctaatataaattacagaatttcttctggcctcttttagatttcttcttgtcttttgccctgggtgtatttacttgccttttcaaatagcttgtgcttttattccaccttattgcttgccaaatattattgtcatttagaaaaaaatagacatgttaaccgttgtgtgtggctctcactttgtttgaaattgttgctttgggaaaaacacagaactttaataaaacaatatttgacttttattcagtgagtaaaacttaaaagttcaacagtttcccctgaggaagataaaatatctttggttctttgttgctggactaacaggtagtcagtaatatttgttttaatgttttagcagttctttagcccgtggtatttcagtgttggtttcatagctatgaataggcataggtactaatagataaggacatattttatactttgtgtggggggtgtgttttggtcttccttttcttattacataggtacataagattctttcctgatggccatgtgatgatgttgacaacccctgaagagcctcagtccattgttccacgtttaagaactaggaataccaggactgatgcaattctactgggtcactatcgcttgtcacaagacacagacaatcagaccaaagtatttgctgtaat

SEQ ID NO: 638 - DNA, 3143 bp, Homo sapiens
ggaaacgcgattcgcagcgggcgccggaagcggtgttgtgtctgcagctctggcagaggactgttccactagacacgctgaagggactgggtacgtgttttccttcaggaccagagctgagaggagctgggatcgcggcggcaatggaacgggcctcagaaaggcgcacggccagcgcgctttttgcggggttccgggccttgggacttttcagcaacgacattccacacgtggtgcggttcagcgcgctcaagcgccggttctatgtaacaacctgcgtgggcaagagtttccacacctatgacgttcagaaacttagtctggttgcagtaagtaattctgttccacaggatatctgctgtatggcagctgatggcagattagtctttgctgcttatggaaatgttttctctgcatttgcccgtaataaagagatagtacatacctttaagggtcataaggcagaaatccatttcttgcaaccctttggagaccacattatctctgttgatactgatggcattcttattatttggcacatatattcagaagaagaatacctgcagttgacttttgataaatcagtatttaaaatttctgcaattttgcatccaagtacctacttgaataaaatacttctgggcagtgaacaaggaagcctgcagttgtggaatgtaaaatccaataaacttctatatacatttccaggatggaaagttggagtgacagctcttcagcaggcaccagccgtggatgttgttgctgttggtcttatgtcaggtcaagttatcattcacaacattaaatttaatgaaacattaatgaagtttcgtcaagactggggacccattacttcaatttcatttcgcacagatggtcatccagtaatggcagctggaagcccatgtggccatattggactctgggatctagaagacaaaaaattaatcaaccaaatgagaaatgcacactctacagcaattgccggactgacatttctccatagagagccacttcttgtcacaaatggcgctgacaatgctcttaggatatggatatttgatggtcctacaggtgaaggccgacttttgagattcagaatgggtcatagtgctcctcttaccaatatcagatattatggacagaatggacagcagattctaagtgcaagtcaagatggaactcttcagtcattttccacggtacatgaaaaattcaataagagcttgggacatggattaataaataaaaagagagttaaacgtaaaggacttcagaataccatgtcagtgagacttccacccatcacaaagtttgcagcagaggaagctcgtgaaagtgactgggatggtatcattgcttgccatcaaggtaagctatcttgctcaacctggaattatcagaaatctacaataggcgcttactttctcaagccaaaagagttgaagaaagatgacataactgcaacagcagtggatataacttcttgtggaaactttgctgtaattggcctctcatcaggaactgtagatgtatataacatgcagtctggcatacatcgaggaagttttggcaaggatcaagctcacaagggatctgttagaggtgtcgcagtggatggattaaaccagttgacagttacaactggtagtgaaggattactcaaattctggaactttaaaaacaaaattttaatccattctgtgagcctcagttcatctccaaatatcatgttgctacatagggacagtggcattctgggactcgccttggatgacttctccattagtgttctggacatagaaactaggaagattgtcagagagttttctggacaccaaggccaaataaatgacatggcttttagtcctgatggtcgttggttaataagtgctgcgatggattgctctattaggacttgggaccttccttctgggtgccttatagactgctttttgttggactcggctcctctcaatgtttctatgtctcctactggagactttctggcaacttcccatgtggaccaccttggaatttatctatggtccaatatttccctgtattcagttgtttcattacggccacttcctgcagattatgtcccttcaatagtcatgcttcctggtacttgtcaaacccaagatgtagaagtttcagaagaaacagtagaaccaagtgatgaattgatagaatatgattcgccagaacagttgaatgagcaattggtgactctttcacttcttcctgaatcacgatggaaaaaccttcttaaccttgatgttattaagaaaaagaataaaccaaaggaaccacccaaagtacccaaatcagcaccatttttcattccaacaattcctggccttgtacccagatatgctgcacctgaacaaaataatgatccccagcagtctaaagtggtaaatcttggagttttggctcaaaaatcagatttctgcttgaaacttgaagaaggactggtaaataataagtatgacactgctctcaaccttctgaaagaatcaggcccatcaggaattgaaacagagctgcgaagcttgtctcctgattgtggtgggtccatagaagttatgcagagcttcttgaaaatgattgggatgatgctggacagaaagcgtgattttgagttagcccaggcataccttgcattgtttctaaagttacaccttaaaatgcttccttcagagccagtactcctagaagaaataacaaatttgtcatcccaggtggaagaaaactggacccatttgcaatcactcttcaatcaaagcatgtgtattttaaattatctcaaaagtgctttgttgtaaaaataaatttgtgactaaacaaagactttcatattaaatgggttcaattgaactcatttcttattttccaagtgtcaatgtgaaaagaaaataaatgctagcactactgactagtcagtatatctccactttaaatgctaaatactttcttgaaataaaatcgcacctcccggccaggcatgatggataatgcctgtaattccagcactttcagaggccaaagcgggaggattgcttgaagccaggaatttgagcccagcctgggcaacatagcaagcaagatcccatctctacaaaaaaaaaaaaaaaaag

SEQ ID NO: 639 - DNA, 3564 bp, Homo sapiens
tctttctcgctgctcagtcacatctttctcttccttccaccccgagggaccatgtcgaggctcagctggggataccgcgagcacaacggtcctattcactggaaggaatttttccctattgctgatggtgatcagcaatctccaattgagattaaaaccaaagaagtgaaatatgactcttccctccgaccacttagtatcaagtatgacccaagctcagctaaaatcatcagcaacagcggccattccttcaatgttgactttgatgacacagagaacaaatcagttctgcgtggtggtcctctcactggaagctacaggttacggcaggttcaccttcactgggggtccgctgatgaccacggctccgagcacatagtagatggagtgagctatgctgcagagctccatgttgttcactggaattcagacaaataccccagctttgttgaggcagctcatgaaccagatggactggctgtcttgggagtgtttttacagattggtgaacctaattcccaactgcaaaagattactgacactttggattccattaaagaaaagggtaaacaaactcgattcacaaattttgacctattgtctctgcttccaccatcctgggactactggacatatcctggttctcttacagttccacctcttcttgagagtgtcacatggattgttttaaagcaacctataaacatcagctctcaacagctggccaaatttcgcagtctcctgtgcacagcggagggtgaagcagcagcttttctggtgagcaatcaccgcccaccacagcctctaaagggccgcaaagtgagagcctctttccattaaaaattgtcaccaatgaactcccccaaacatggctgtggagagacaacaaaacaaaacaaagcacaaaagtctctgccaacaactcttttgtggaattctaatttataggaaacattttagtatgagcttcagtgtcacaaagaaaaccagatctctctctcttttttttttattttttttagtgatagagtctcactctgtcacccaggctggagggcagtggtacagtcttggctaattgcagcctccaactcctggactcaagtgatcctcccacctcagcctccagagtaagtaggaccacaggcatgcacaagcatgcctggctaatttttaaattttttttttttaagaaatagggtcttgctatgttgcccaggctggtctcaagctcctgccctaaagtaggcctcctgcctttgcctctcaaagtgctgggatttcaggcatgggtcatcaagcccagctgacccagagctctttactaacttatctgtctcttatttgcactcatggatattcacagtaagcattgtttgacatatattaaaacccatgaaatatgtctacttcaacctgtgtgaaaatatagttaacattgcaaactttagaatgtattaaaaattttaccttgccatagagactgaattagtcacagctctcagtgatgttagatggaaacttatatctcaaatgataggattgtgatgctttttttgtaacaagtgattctgcttaatattttgttattccagttcataaaaagtagattacgttttcctataaggataatttttgcagtgattatattgctaactctcattgcatgatacctttaataaaatgaacaatataagagttaagggcaatgggataaagctacttaatgtgtctcctccactgatcaaaaatattccatatagtcttggtgaggaattccccaggatataaatggctatttacactgtaatgaattataccatatatgatattcactcagtaatgttaataatgaactggctaataattgacaagatgcagtgcctgccagtttatgacattaacttggtttgaaactaacatatgacatagtaccagtgcagtcagagctgcccttaggcatgatgaacatgtggcccgtttttgcctggtgttttggcagcaaagcaggaagcaattttgtgtgggtcattgttctgtcaatttgtggaaaaaattacttcagtctcatataaatatagaatgggtccataaacccttcaactcatttccatggcaaaactcacttttctttttatacatgtccttcagtctcttaattttgtcaggtggagcttgatcttaattttaacctattatcttttatttttgtttgtttttggtgaaggataagagtggtgtttcttttgccctttctggtacaaacagagggacactaagcattaacttaataatcacatttaagacttgaacacatgctacccttttgtcatcttctgacataagtttacctgagtttccttgatttggaagatttgtttcttttatctctcttcctctggatgtagtttttttttgttttttttttgtttttggacggagtcttagtctgtcactgaggctggagtacagtggcacgatcttggctcactgcaacctccatctcccgggttcaaatgattctcctgcctcagcctcttgagtggctgggattacaggcacatgccaccacacccggctaatttttgtatttttagtagagatgggttttgcaatgttggccaggctggtctcaaactcctgacctcaagtgatctgcctgcctcggcctctcaaattgctggaattacagttgtgagccaccacacctggcttgaatgtagattttaataattgaatttattctgccgtgttgatagaataactgaatatcagtaaattgtgtaacagtggtggatactgttgcataagatgagctcctgaagagtgaagctaattctttggtcaatgttcttttcccctcagtgtctagtttaaggcttttagaagattgatctgtagcaattatttaatgaattgaatatttaaaaaattttttatttgctgtctttggtaattatctctctgcttgaaattaaatgcactataagttaatataacaagtaaaatacattgtcttttgaaaatagtttctttttaaaggaatactaattaattgtaacttgtaaaaccaaaagttctaatggtttttaaaaaccagtgttgagtggaaaagtgtttctttagtttggaaagacctgtgaagtatcctagtcagggaaagaacctgttttctggaagaatgtaagttgctatatgtggaggggcatgtaggacaggggttctaattactgtctgtgagagttactactttgtaacttatggtttctgcttcagtattgtgttggttctgtattataaattgcaccttaatagaccaaaaatatctatacagcactgatttccttgaatattgtgtgttaattgatatatcttctagaggcaaaaggtttaaatgtgttaaaatggttatattgcctcctttttaaacaaattaaagagttgtaaatactagtgtagatctcttttgtttaccacagcaaatactgattttatgattgttaagcatttcatattttaatttaaattggattcaaccacaataaagaaaatgagaaaagcttt

SEQ ID NO: 640 - DNA, 3024 bp, Homo sapiens
atgcccaaaagttatttgggattagagcatcacaatgggaatacacatgccatagtaaaccatgtgcttattcagggaggtaaaggcaggcaggtttttaaaggaaaaaatgaggattacataattgttttggaaataattacccttggctacaaagatcattaacaagggtaatgccagttcaagtttgcacaggcagtttgctgggcagatgtccttgtagaagtattttttgtataaggtttaatggcctttgtgcagggttgtgttttttgtagtcttttttgttatcaggcatacaagcatgagaaccttattttcatggcctttcccagctctgtcaggattttcttcacattcatgatttaattttgattttgacaactttcgtagttattccattaacttgtaattgtatgtgagaaaatactataaagaaggaattgggctggtctgagtgcagtggtcgtttacatctaattgatcacaaccagttacagatttctttgttccttccccactcccactgcttaatttgcctagcttaaaaacaaaaacaaagaaagaaagaattggttaagcaaatattcaggaataaaacttcatgtgtcatcataaaagtaactttaaaagcaaacattttaaatatacattttaacataagtttgaggggacttatctttttcaatctgacaccgatctaaatagtttttgcttcatttacttatttatgaatgaatgaacaagacaaggtcttgttctgtcgcccaggctggagtgcactgacaccatcatggctcactgcagcctcaaactcctggcctcaagccaccctcttgcctcagcctcctgagtaactggaactacaggcatgtgtcaccatgcctggttaattttttttttcattttgtatttttgcctagttaattaaaaaaaatttttttaagagacagggtcttgctatattgcccaggctagtttttacatctttaaaactgaatacttagctgggtgtggtggtgcacatgcctgtggtcctagctgttcaaaaggttaaggcaggaagattatttgagcctaggagttctgggctctagtgcactatgctgactgggtgtccacattaagttcagcatcagtgtagtaaactccaaggagctgggagccaccaggttacccagggaggggtgaactagcccaggttagaaatggagcaggtcaaaactcccatgctgatcagtagtgggatcatacctgtgaatagtctctgcactccagcgtggacaacatagtgagacctcatcactttaagaaaaacaaaccctgaatattttaagttagagatggagttagaaatacttttagttatagcagaatcatgtcaatttttagtacatcttttacttagctttttgcacacttttttttttttgagacggagtctcgccctgtcccctaggctggagtgcagtggcacagtcttggctcgccgcaacctccgtctcccaggttcaagcaattctcctgcctcggcctcctgagtagctgggactataggcacccaccaccatgcacagctaatttttgtatttttagtagagacagggtttcactatgttggccaggctggtctcgacctcctgacctcgtgatctgcctgccttggcctcccaaagtgctgggattacaggcgtgagccaccatgcccagcccctgcactaattttttaaacaaagtcctgttggtgctcccttcaaaatttatctccagtctgaccattttaccacttctgcaacaacccttctgactcagccactgttctgtttggtttgggttacatagtggcatcctacctggtcttcctgtttccactcttataccactagaccatattctccataaaccaccagagtgatcttttaaaataaaagcataaattatgttcaaaaccctccagtggcatccatctcatgtaaataaccactccttcctacaagatgccacctcacctgccccgactgcctcatgatagttccctctgcacaatgcccactttgccacagctgtgtgctcctgctggctcttggatgagcccaccagtcacacttctgcctgagggccttgcacatgctctggttgctgcctgagatacttatccccatcactatgatcaccttcccagagaggcatttcctggcctccctatttcctcaccaccatcatttctgtctgctgactctactttgtctgttggttgatttttgcactaagcgtactaccagaagctttcctctcaatttgctttcccacagtaaaagagcagggcctttgccttgtccattagtttctcctcagaacagtgcctcccaggtgttcaacaaatacttgctaaataaaagatggctgatagcaaaaatatttatgtctatgtatagggacttagtttttattgacattgtgcttttattccctagagaccctgaaatatggcgtctggcctgcttgaaagtttggggcagaagctgtattaaacttgttccgtacacgtcctggagagagatgtttttagaacggcctcgtgttcggtttgatggtaagttggattctgtagaactcagcagaaatactgatctataatgctgatttttataaatacgccgtttaaattttctgtgatgaatgtgagtactgtaagcatgtttaaaggaaaccacagtaaatataatgccgggaatatctgaatattataatttttaactttttaaaattattttcataggcgtgtatatcagtaaaaccacatatattcgtcaaggggaacagtctcttgatggtttctatagagcctggcaccaagtggaatattacaggtacaactgtagtacactgagtgagtggaaaattctctctctccatgtattagttaaatggacatctgttctttgttgcttttgattgacccgcaaaatggccctcagtatttttatctagtactcaatgtaggaattgcactaaaaaaaaaag

SEQ ID NO: 641 - DNA, 3453 bp, Homo sapiens
tttcaatttcctggcatgcttttaaaatgcgctgcacacaagcaaatggctcctcaggcaagcgaggcccagcaggcagcgtggctggactttctgctcctcttaggcttggtcagtgagtcacttgatgggactggtgtcttgggcaggctgctgtcatgttttgtaaacctaaaaatgtttttctgtgtttctccagtttgaagaaggtgaagaaggagaagaggaggtaagagacaggtttatgcagtgccacttacctccctgaagttgtttctttggctttctctgcttgaaggttatggactcacagggctgtgttaaacccattttttgtgacgctgtctttgattctaagaatgttcttaaaacactaagcagaaatgcatagcaaatgctgtgacagtttccatcgtttttgaccctgcagttggttcatgaaaatgtatcttagaaaataatcatttaacaaaatctactttttcagaattttgtttctttcagggctctctgtgagaacaaaaagatacctagaaataattctaagtgtccaaaggaagtgatgagtcacttgtgggtagcagtaattgatttccatctaaggcagtgttttgctccttgtgtttgtggattgtgaatgccacaagagtttaaatcttgtcattccagctaattctcactttttaaatacaggaattagaaggtgacgaggagggagaagacgaggatgatgcggaaattaaccccaaggttggtaactttggggccacccagacctacttattatgctgcactcttagacttttaaaaatgttccccactttgaggcagtagtgttaacaatattcattattccctaattagaaagtttaaaatgtgtcagaaaaatagtggaatgattattcagacactgtgtctataatttgagtgttgagtgtacatactcagtagaagcttttccagctgtctcaagctgtgtcttatttacatagactcctcagtagagcaacttgactttccaagtgtttcattcttttaaggtaaggtaatgatttaactgacaacataaataaacttttctttgtgcgtgtttggaaaaggtgcaaagaagggactttggggctctttttgttaaggaacagaataatgggattgtgggcatcatttgacccagttgcacttgagctgagcatgcccagatgatgtgtctagatatctcatatgtctcagataatttaaaataaattggaaaggtttactaaagaaaactgagttgaaaatgagtgggcaaccccattaattttacctgcaaatttagatttttatttgtggtctcagagtaacttaaatcaaggtactttgaccatttggcacattttaaaatcagaagtgcttaaatgtcatcctacagcatcataagagtttcttcttgtaaaacatgaaatgtgtagttcacttgcctcttaaaattaagtatattatgggctgtcagaatactaacgttacctggtgtttttgtaatgtgtctctgtccgactagacgttttttgcttgtttttacccttgttttttggagtgtgcactaaaagctgtcagtgtgatattctggctctgtcatcagttggtttaaactggctgtttccatgaatgcatgttcacagttgtggttccttcaaggaagggatgggagaagagcttttaaaacttttttgagaatgtgtcttataaagactactctgggaataatctgctcatggaaatgttcatcttctaaagtttggcctgttgatgtgggaggactctgctgaaagcgtacctgtgcgcagcaccgtggtggtgggcggtgagggctgtaggagaccaaggcctgggtctgccttgcgtgcatcacagtgtgcggacagggaaggtgagggctgtcagtcagccagtgaacaacgttgggtgaataaatgctgcccatcactgctgtgcggggtgtctgatggacccaagggccacgtgtgtttattgggctgtgtttccgccttgtgggcgctgaatggacacttttaaggttgcagttgtaaagcaaggactggggtcaattggcagggccacctcctcagactccgcgcacagctgcctctgtccttgttgcacttgtatctccccctccctgtattctgtgcctcagcttctcttttcctcccctctgttgtttgttctgctttctctgtcaccttggagaaccttgagtctcctttcacgtcccaggtttctaaaagagcattctcaccagccattacagagaacatgatgtggtggattacacatgctaacaccccatgaaacctttgataaacggttatgttggttgggggagaagggactaaaaacatgttccggctaatggtgtgaatgaagttcagagacggcccggcatgtgtggccaggataaggccaagcctgctgtccctgtcacatgcaccttccagagagatgggcagtgttagagtctgtgcaagcaaaagaaaacaaggaaggaagggaggttttagtattgggagcagtctgatagaagtgaaaatcatgcttctgcccattttgaaagtatgatctagtgttgaagttgttcaccccgagttcagtatcttgcagcccttttgtatcatgagaaattgtggccgtttcctcctgtataattttgtgcatttcattttctttcatgctgacagttcctttcaatttttttccccatttaggtgtaatttttgtctgttaatcattcatacgtttctagaaggaacccagccagccggcggaatgcaagcagcagtaggaagcggaggcgggtgcctggcagaccggctgtcgggactccaggcctgtgggcggggcctcggtccttgccgcagcacaatcccgtggacagagcttactccatctaactcgttttcaagtgcatgattttcactttcacttttcctttttccttattattttgcttaacttgtacagtggcaactgaaatgcatttcagaaataggaggtttcgtccagcaccctctgcagccttggtgcctgtagctctggacttccctgggcctttccctgtgggagggccctgtagaccacatcagggtggggtgggggtcacttggcaaaaagggccgaggtctggtgatgtggttcccaggatctggaacctctcccacccctcctgcagttggactgaattcttccctttcatcctgtctgaaggtcctgggtttggtgtgaccgcttggcggctggtgggtggggttttcaagtgggtgacggcgctctccggcagccggggatggccgtgtccgcactgaccaggcctgtggagagtgctcggcctaaccttagaacacatttgtaactgaatacagtgttttcaatttgtacagaatagttagaatattctattaaagtggtgaaacattg

SEQ ID NO: 642 - DNA, 3260 bp, Homo sapiens
gggtttgagagtttgggaccctgggttggtggggtcagagggagagggggtaccttcctcccggaccgctgggggtgcagggcgccttgggtgtagcacccagaacaggtttctgatctctaacttggctgtgatcattgtgatggagcaagaaaaaaaactgttggtctcagattctaacagctttatggagagggagagtttgaaaagccctttcacaggagatacaagtatgaataatttggaaactgttcaccacaataattctaaggcagataaacttaaagagaaaccttcagaatggtctaaaagacatagaccacaacattataagcatgaggatgcaaaagaaatgccactgacatgggttcaagatgagatttggtgtcatgattcctatgagagtgatggcaagtcagagaattggggaaattttatagctaaagaggaggaaaaacccaatcaccaggaatgggactcaggagaacataccaatgcctgtgtccagcagaattcatcctttgtagacagaccctataaatgttccgaatgttggaaaagcttcagtaatagttctcatttgcgtactcaccagaggacccactcaggagaaaagccttataaatgctctgagtgtgcaaaatgtttttgtaacagttctcacctgattcagcatctaagaatgcacacaggagagaagccctaccagtgtggtgaatgtgggaaaagcttcagcaatacctcccatcttattatccatgagagaactcacacgggagagaaaccctacaaatgtcccgagtgtgggaagagattcagcagcagctctcaccttattcagcatcacagatcacatacaggtgaaaaaccatatgaatgttctgtctgcggaaaaggcttcagtcacagctatgtcctaatagaacatcagaggactcacactggagaaaaaccttataagtgccctgattgtgggaagagttttagtcagagttccagcctcattcgccaccagcggacacacacaggtgagaagccctacaaatgtcttgagtgtgaaaaaagctttggttgtaattctactctaataaaacatcagagaatacatacaggagaaaagccttatcaatgtccagaatgtgggaagaattttagtcgtagttcaaaccttattacacaccagaaaatgcacacaggagagaaatcctatgaaagttctgaatatgaggaaagtttgggtcagaactgcaatgtgatagaagaatgcagaatccagttaggagagaaaccatatagatgttgtgaatgtgggaagagttttggccttagctcccatctcattagacatcagagaacacatacaggagaaaaaccttacagatgttctgagtgctggaaaactttcagtcagagttccaccctggtgattcaccaaaggacacatacaggagagaaaccttataaatgtcctgattgtggtgaaagcttcagtcagagctttaaccttatcaggcaccggaggacccacataggggaaaaaccttacaaatgtaccagctgtgagaaatgcttcagcagaattgcctacctcagtcagcatcggaaaattcacgtagaaaagccttttgagtctcccgacgttggggattttcctcatgaatggacttggaaaaactgttcaggggaaatgcccttcatctcttcattttccgtctcaaattcatcttcctgagtcccaaagcctggttggtgatggttttttcttccttgttggaccatgacaatttaggtattctgtgattgttgtgctataaagtttctttgatgtgtttgtcaaaacatttggaaaaagtcaacctcccagtttaaaggatgggaagaccccaatcaccaggttattggatctgtccagtgagagattcatccaccaaggatgaagaaaggaggacttttaaaaatttaaggtaagatagtaatagcttcaaaagaacacatacagagtaatcctgagagtaagcaaaggaaccatgagaaccgaagctagaattgctattgaattactttattttctcttcccttattgggtagagatacatcattactggcctcaggggtttacccaaagaaagggtatttttgagcaaataatgtgatttcctggctattttgttgggggcttaagatttttttttttcaaatgcatttttagtcactaaaaattaactgtcgtaccatctagaactatactgtccagtaccatagcctctagccgtatgtagctatttgtattaagattaattgaaattttaaatccagttcctcagtcacactagccactttctaagtgctcagtagctctgtgtgaccagcggctactgtattggatattatagaaggttctttcattcaagatcatcattcttgacagacccataaatatttcctataaagactgtagaagtgtgttctggagggtttgctctccaaaaagaattgtaatatagagtagaattgggatagagtattgaagacactgggtttagacattggatattttaatgattgtgtgttctaattcatgtgctgccaactgagttatctagtgatatgacctcactgtcttgaccaaagccagaatagaaggcaggattcctgaattctatcttaaaatttgcaatgaagagccttttccctaaattatcccattatgtaattcttggtcagctcaagaactgggttctttttctaataattaactcactaaatctgagccagtgtccaaggacagtttgtcattaaggagtactgagacttcttagctttggtactgacagttttcttttgcctcttgacataataggtatatggatctgataactgaggtcccatcttccctactcattcctatgggaatgatgctttggaaattattagatatatcctattcccttcctcccatttttttcctgctagtgcaaaaggtagatgagtaggaagattaggactcctgagttgcccatgatttcatctaatttttggattcagaatgtattttatgaataatatgcagagatgcatattaggaatgtgaagccagaatgggtcagttgtagctgctgcaaagttctgtagctgatggtcatttaattgcatgggggttattttatctttcatgattgtggtgcacctgatgctggcggggtatttgtgtgtttttgtattgttatttgattacaaaaataaagcaaaaactaacaaat

SEQ ID NO: 643 - DNA, 2930 bp, Homo sapiens
tagtgggcgggagccgcgatctgagtagccagcgtcgccggcgaccgcggagttctgggctagtgggaccccgcgcgggctggttcgggatgagcgatggcatcggtcaaggtggccgtgagggtccggcccatgaatcgcagggaagaggacttggaggccaagttcattattcagatggagaaaagcaaaacgacaatcacaaacttaaagataccagaaggaggcactggggactcaggaagagaacggaccaagaccttcacctatgacttttctttttattctgctgatacaaaaagcccagattacgtttcacaagaaatggttttcaaaaccctcggcacagatgtcgtgaagtctgcatttgaaggttataatgcttgtgtctttgcatatgggcaaactggatctggaaagtcatacactatgatgggaaattctggagattctggcttaatacctcggatctgtgaagggctcttcagtcggataaatgaaaccaccagatgggatgaagcttcttttcgaactgaagtcagctacttagaaatttataacgaacgtgtgagagatctacttcggcggaagtcatctaaaaccttcaatttgagagtccgtgagcatcccaaagaaggcccttatgttgaggatttatccaaacatttagtacagaattatggtgacgtagaagaacttatggatgcgggcaatatcaaccggaccaccgcagcgactgggatgaacgacgtcagtagcaggtctcatgccatcttcaccatcaagttcactcaggctaaatttgattctgaaatgccatgtgaaaccgtcagtaagatccacttggttgatcttgccggaagtgagcgtgcagatgccaccggagccaccggggttaggctaaaggaagggggaaatattaacaagtcccttgtgactctggggaacgtcatttctgccttagctgatttatctcaggatgctgcaaatactcttgcaaagaagaagcaagttttcgtgccttacagggattctgtgttgacttggttgttaaaagatagccttggaggaaactctaaaactatcatgattgccaccatttcacctgctgatgtcaattatggagaaaccctaagtactcttcgctatgcaaatagagccaaaaacatcatcaacaagcctaccattaatgaggatgccaacgtcaaacttatccgtgagctgcgagctgaaatagccagactgaaaacgctgcttgctcaagggaatcagattgccctcttagactcccccacagctttaagtatggaggaaaaacttcagcagaatgaagcaagagttcaagaattgaccaaggaatggacaaataagtggaatgaaacccaaaatattttgaaagaacaaactctagccctcaggaaagaagggattggagttgttttggattctgaactgcctcatttgattggcatcgatgatgaccttttgagtactggaatcatcttatatcatttaaaggaaggtcagacatacgttggtagagacgatgcttccacggagcaagatattgttcttcatggccttgacttggagagtgagcattgcatctttgaaaatatcggggggacagtgactctgatacccctgagtgggtcccagtgctctgtgaatggtgttcagatcgtggaggccacacatctaaatcaaggtgctgtgattctcttgggaagaaccaatatgtttcgctttaaccatccaaaggaagccgccaagctcagggagaagaggaagagtggccttctgtcctccttcagcttgtccatgaccgacctctcgaagtcccgtgagaacctgtctgcagtcatgttgtataaccccggacttgaatttgagaggcaacagcgtgaagaacttgaaaaattagaaagtaaaaggaaactcatagaagaaatggaggaaaagcagaaatcagacaaggctgaactggagcggatgcagcaggaggtggagacccagcgcaaggagacagaaatcgtgcagctccagattcgcaagcaggaggagagccttaaacgccgcagcttccacatcgagaacaagctaaaggatttacttgcggagaaggaaaaatttgaagaggagaggctgagggaacagcaggaaatcgagctgcagaagaagagacaagaagaagagacctttctccgcgtccaagaagaactccaacgactcaaagaactcaacaacaacgagaaggctgagaagtttcagatatttcaagaactggaccagctccaaaaggaaaaagatgaacagtatgccaagcttgaactggaaaaaaagagactagaggagcaggagaaggagcaggtcatgctcgtggcccatctggaagagcagctccgagagaagcaggagatgatccagctcctgcggcgtggggaggtacagtgggtggaagaggagaagagggacctggaaggcattcgggaatccctcctgcgggtgaaggaggctcgtgccggaggggatgaagatggcgaggagttagaaaaggctcaactgcgtttcttcgaattcaagagaaggcagcttgtcaagctagtgaacttggagaaggacctggttcagcagaaagacatcctgaaaaaagaagtccaagaagaacaggagatcctagagtgtttaaaatgtgaacatgacaaagaatctagattgttggaaaaacatgatgagagtgtcacagatgtcacggaagtgcctcaagatttcgagaaaataaagccagtggagtacaggctgcaatataaagaacgccagctacagtacctcctgcagaatcacttgccaactctgttggaagaaaagcagagagcatttgaaattcttgacagaggccctctcagcttagacaacactctttatcaagt

SEQ ID NO: 644 - DNA, 2686 bp, Homo sapiens
gttccacttgaccgctctaagccgccgcgcagcctgcgttttctccggtacaggttgaggctactaaggtatttggctattataaataaaatagtgatgaacacgtgtacaggtgtttgtacggacataagttgtcatttctcttgagtaaatacctaaaagtgggcttgctggagttttactacccttggatgctgctgttgacatggaaaagattgaggaacaatttgctaatctgcacattgttaaatgttccttaggaaccaaagagcccacttaccttcttggtatagacacatcaaagactgtccaagcaggaaaggaaaacttggttgctgttttatgttctaatggatcaatcagaatatatgataaagaaaggttaaatgtactacgagaatttagcggatatcctggacttcttaatggagtcagatttgcaaattcctgtgacagtgtatattcagcatgtactgatggcactgtgaaatgctgggatgctcgagtagccagagaaaaacctgttcagctcttcaagggttacccttccaatatttttatcagttttgatattaattgtaatgatcatattatttgtgctggtacagaaaaagttgatgatgatgcattgttggtgttttgggatgcaaggatgaattctcagaatttatctacaactaaagactcacttggtgcatattcagagacacatagtgatgatgtcactcaagtacgtttccatcccagcaatcccaacatggtagtctcaggttcatctgatggcctggtaaatgtatttgatattaatattgataatgaggaggatgcactggttacaacctgtaactcaatttcatcagtaagctgtattggttggtctgggaaaggttataaacagatttactgcatgacacatgatgaaggattttattggtgggatcttaatcatctggacactgatgaaccagttacacgtttgaacatccaggatgtcagagaagtagttaacatgaaagaagatgctttggactatttgattggtggcctatatcatgaaaagacagacacattgcatgttattggaggaacaaacaaaggaaggattcatttgatgaactgcagcatgtcaggactgacccatgtgactagccttcagggagggcatgctgctacagtccgttctttctgttggaatgtgcaagatgattctttgttgactggaggagaagatgcacagttgttactttggaaacctggagctatagagaagacctttacaaagaaagagagtatgaaaatagcatcctctgtgcaccaacgagtacgagttcatagtaatgattcttataaaagaaggaaaaagcagtgataatgcatttggcactttgtttggtaggttttatagtttcaaatagtccttcttgtttactacccatggtagacatgtttaaagctttatgtaaaaacaagccagttagcaaacagtcctggaaaaatatggtgagaatggtttaattccggtcttcacatattctaaaaaattttaaagcctctaagtataaaatcagtgagttgaaagtaaaatttcttatttaaagaacccatctgttaatgtagtaaatgttggctttaaagaaatagctccgataaggactttttagaaggaaatacttggtgaaacttaataaaacaggtggttggctgcattttttaagcccagttttttacattttaaattgtctttattgtgtataaaaccagattagactatattcttcatctgaggagcatctatatgtttaatacacctaatgtattatgctggagtatttaaatgtaagtattttaatgagtaaatagaattaaccttttttacaaatgaaatgataggcatctatgtaaagtgagaaaaatatgtttcgtaaatatttgcatctttaatattgttagtaagtagtaaacaggtgttttgctgattgaaaggaagttatcttggtaaattgagactcaaagtgaaatacaaaaatgaaaatatttataataggactcgacttggagaaattgctattcttcctgttgtccaaaccataaatctgaggataacctgggcttttctctttcctcttctcctaacgtctgtcagctatccttttgcctttacctcaccactattaccctagagaagactttcattatttctcatctggattaccagctcgatctctaatctgcttcagttcatccttcttgctacttctaggctaaacatcaaaaacagatctggtaggggcggggaaatgagggggaagaaacaaaaacgtgatggtgcctcatgctgcttaaaatcttcagtacattgatgttttgatggcggactacataagcgttaaaaattgtgtttttcagaatctttaaaatataagacagtgctatctagtgaataaaaaaattagtttgaaagatatctggagaaatcgcattcataaaacaattggaagtgaaactattaaaacaatagggctttttaaaattaaaaatatttaaaattcaaaagtaattaatagtgttggaagatgtaggtgagaaaatattcctgaaagtagaactgaaagagacaaagagaaaagatgaaagccacagaagataaatacaggggtcaaaaccagactaacagttttagaaagtg

SEQ ID NO: 645 - DNA, 3020 bp, Homo sapiens
tctgcaacacagcaaccagaaactcaagcaggagaacctaagtctgcgcactgctgtccacaaaagcaaatctctgaaggatctggtgtcggcctgtggcagtggagggaacacagacgtgctcatggagggcgtgaagactgaggtggaggacacactgaccccacccccctcggatgctggctcacctttccagagcagccccttgtcccttggcagcaggggcagtggcagcggtggcagtggcagtgactcggagcctgacagcccagtctttgaggacagcaaggttgggccctgccacggtgcccccttccccactcccagccatatcctctgagcctcatgacagggccgggaagaccctaacagatcctacctcccatttcatagacagaataactgaggcctggagccacgtggggtcccacagtaaggcaaagccagagcagcggccgtctctgcacagccggggcatgctggaccgctcccgcctggccctgtgcacgctcgtcttcctctgcctgtcctgcaaccccttggcctccttgctgggggcccgggggcttcccagcccctcagataccaccagcgtctaccatagccctgggcgcaacgtgctgggcaccgagagcagagatggccctggctgggcccagtggctgctgcccccagtggtctggctgctcaatgggctgttggtgctcgtctccttggtgcttctctttgtctacggtgagccagtcacacggccccactcaggccccgccgtgtacttctggaggcatcgcaagcaggctgacctggacctggcccggggagactttgcccaggctgcccagcagctgtggctggccctgcgggcactgggccggcccctgcccacctcccacctggacctggcttgtagcctcctctggaacctcatccgtcacctgctgcagcgtctctgggtgggccgctggctggcaggccgggcagggggcctgcagcaggactgtgctctgcgagtggatgctagcgccagcgcccgagacgcagccctggtctaccataagctgcaccagctgcacaccatggggaagcacacaggcgggcacctcactgccaccaacctggcgctgagtgccctgaacctggcagagtgtgcaggggatgccgtgtctgtggcgacgctggccgagatctatgtggcggctgcattgagagtgaagaccagtctcccacgggccttgcattttctgacacgcttcttcctgagcagtgcccgccaggcctgcctggcacagagtggctcagtgcctcctgccatgcagtggctctgccaccccgtgggccaccgtttcttcgtggatggggactggtccgtgctcagtaccccatgggagagcctgtacagcttggccgggaacccagtggaccccctggcccaggtgactcagctattccgggaacatctcttagagcgagcactgaactgtgtgacccagcccaaccccagccctgggtcagctgatggggacaaggaattctcggatgccctcgggtacctgcagctgctgaacagctgttctgatgctgcgggggctcctgcctacagcttctccatcagttccagcatggccaccaccaccggcgtagacccggtggccaagtggtgggcctctctgacagctgtggtgatccactggctgcggcgggatgaggaggcggctgagcggctgtgcccgctggtggagcacctgccccgggtgctgcaggagtctgagagacccctgcccagggcagctctgcactccttcaaggctgcccgggccctgctgggctgtgccaaggcagagtctggtccagccagcctgaccatctgtgagaaggccagtgggtacctgcaggacagcctggctaccacaccagccagcagctccattgacaaggccgtgcagctgttcctgtgtgacctgcttcttgtggtgcgcaccagcctgtggcggcagcagcagcccccggccccggccccagcagcccagggcaccagcagcaggccccaggcttccgcccttgagctgcgtggcttccaacgggacctgagcagcctgaggcggctggcacagagcttccggcccgccatgcggagggtgttcctacatgaggccacggcccggctgatggcgggggccagccccacacggacacaccagctcctcgaccgcagtctgaggcggcgggcaggccccggtggcaaaggaggcgcggtggcggagctggagccgcggcccacgcggcgggagcacgcggaggccttgctgctggcctcctgctacctgccccccggcttcctgtcggcgcccgggcagcgcgtgggcatgctggctgaggcggcgcgcacactcgagaagcttggcgatcgccggctgctgcacgactgtcagcagatgctcatgcgcctgggcggtgggaccactgtcacttccagctagaccccgtgtccccggcctcagcacccctgtctctagccactttggtcccgtgcagcttctgtcctgcgtcgaagctttgaaggccgaaggcagtgcaagagactctggcctccacagttcgacctgcggctgctgtgtgccttcgcggtggaaggcccgaggggcgcgatcttgaccctaagaccggcggccatgatggtgctgacctctggtggccgatcggggcactgcaggggccgagccattttggggggcccccctccttgctctgcaggcaccttagtggcttttttcctcctgtgtacagggaagagaggggtacatttccctgtgctgacggaagccaacttggctttcccggactgcaagcagggctctgccccagaggcctctctctccgtcgtgggagagagacgtgtacatagtgtaggtcagcgtgcttagcctcctgacctgaggctcctgtgctactttgccttttgcaaactttattttcatagattgagaagttttgtacagagaattaaaaatgaaattatttat

SEQ ID NO: 646 - DNA, 3576 bp, Homo sapiens
aagcgcccgctgcctgcctgtcccaacccgctcttcgttcgctggctgaccgagtggcgggacgaggcgacccgcagcaggcaccgcacgcgcttcgtatttcagaaggtgggtcctggcgtggcccgatgggaaaagctgctggccaggtcaggcctgccccggactcaccatctggagagaacagtccagccccgcaggggcgacttgcggaagtccaggactcttccatgccagtgaggaaggggcaaggggagtggaaggcagtgggagtgcgggagtatgattttctggcttgggggatttggcaagcctgagtccaaatctcaccagtgatgcctggccttgagcaaatgacttatcctcttttcgacttagtattttaacctgtgaatagaaatattggtaacagccaatgagagaattccatgatcaagctacttaaggatcccagctcagttagttacggggtcaccattattgagttttcctgtctaattacacctgtcctgcagcgcatggtagaagtgaggccaggctgggcagacacccccacccactgccccgaaactgcctgctgttttatcccagatttgcagcggatcatcccatcacctggcccattttacagagaaggaaactgagagacaactgagtgacttacccagggccacaaagcctgctggggacttattcaaagatgactggctggctttcatgttcagaactcctctgtacctttcaggttcctgcccagcccaaagcgggaggctctggcagctactggccagctcggcactcaggagcccgagtgatactgctggtgctctaccgggagcacctgaatcctaatggtcaccacttcttaaccaaggaggagctgctgcagaggtgtgctcagaagtcccccagggtagcccctgggagtgccccaccctggccagccctccgctccctccttcacaggaacctggtcctcaggacacaccagccagccaggtactcattgaccccagagggcctggagctggcccagaagttggccgagtcagaaggcctgagcttgctgaatgtgggcatcgggcccaaggagccccctggggaggagacagcagtgccaggagcagcttcagcagagcttgccagtgaagcaggggtccagcagcagccactggagctgaggcctggagagtacagggtgctgttgtgtgtggacattggcgagacccgggggtgagtgaggtggggagaaacgagggagatgatcagaggaggctggggggtaggcactgccctgctctgatctaggcttccctccttgccactccaggggcgggcacaggccggagctgctccgagagctacagcggctgcacgtgacccacacggtgcgcaagctgcacgttggagattttgtgtgggtggctcaggagaccaatcctagagacccaggtgaagggccgtggacaggctggcaccaggggcagggcctggtgggtaggggatcgcaagctaacggctggcttgtcagcagcaaaccctggggagttggtactggatcacattgtggagcgcaagcgactggatgacctttgcagcagcatcatcgacggccgcttccgggagcagaaggtaattttgctggctttgccaggcttccctgcctgctccgaagccccgttttcagcccagagcaatccaggggcacttctggcagcctccttgaggcagagccctttggaatccagccacacccaccctgtggctgctccaggatcagacccccacaggcccatccaggcgcacagtaggaagccaggtacctgcattcttgggctgaggtcaggagcattttaaagacctcttgggtacccagcccctgcagtcttggataaacaaggcataaacctccaggagtggaaatacagaggctgtaccttggtacttgctgctgggtggacccctagtcacagaggccatgtgccggcccaggggaggcttgaaggatgggcagtgttgagagatggagaaaaggctttctagacaagagtgtcagcatgagcaaagctgcggaggcccctgtgaggcaggtggagaggctagggaggatgcagagtctaactggtgggaacagggtcacagcaccattttgagtgtgacatcatggatgcccaggcatgtggtcatccagcctgaccctccctgtccactctgtacacttccctagttccgactgaagcgctgtggtctggagcgccgggtatacctggtggaagagcatggttccgtccacaacctcagccttcctgagagcacactgctgcaggctgtcaccaacactcaggtcattgatggcttttttgtgaagcgcacagcagacattaaggagtcagccgcctacctggccctcttgactcggggcctgcagagactctaccaggtgagcagaggcccctttcccagtgtcgggacagagcccacaaggaattcaccttgcctgggccctgtgcatccccaaaagaagcaaggtgggtgagatccccatttctcaggctggccccccaaggctgaggactgggcaggggctggctggagttgttccttcgagctccagcctggcctcagtcccttcttccctcagggccacaccctacgcagccgcccctggggaacccctgggaaccctgaatcaggggccatgacctctccaaaccctctctgctcactcctcaccttcagtgacttcaacgcaggagccatcaagaataaggtactgtctctgcctagcttctcagacatggcctggcccagacccccactgatccagccctttcccgaacccaggcccagtcggtgcgagaagtgtttgcccggcagctgatgcaggtgcgcggagtgagtggggagaaggcagcagccctggtggatcgatacagcacccctgccagcctcctggccgcctatgatgcctgtgccacccccaaggaacaagagacactgctgagcaccattaagtgtgggcgtctacagaggtgagggcaagagacggaacctggagggagtggcagggactggggctgccctaggcccagggcgtgaccctcgctgcctctcttcctgcaggaatctggggcctgctctgagcaggaccttatcccagctctactgcagctacggccccttgacctgagcttatgccgtgaaacagcccccagcccccgtctgtcccccaacccaggctagccagccttttaacaacatcttttggggtacaattagaatctaagtgtttgcagccatatgtgtcatgtagaagatgcctagccctggggaccttgtgaaatacgcaggaaccagggataccatctggtccagtggtttttaaacaaagctgcttagcacctggaattccctggtcagggagatggagtcagtggggcattgcagcttggaatctattttatgtcaccagttggtcctcatcaaataaaatttccttaggattgcagagggctcattgggaaaataaaaataataaaaataaataaaacttcctaaaagaaaagattgaaaacc

SEQ ID NO: 647 - DNA, 3766 bp, Homo sapiens
tacaaaaattgctgggcttaatgctgattggaatagagttcactaacagttggaaaagaagaaaatgcaagtatctttggtattttaaaataacagaagtaaaaaggaaacagggactgagtttttgagaatcctgtactgttgatgatgtcactttttcagaagtaatctctaagtttcagtacacaggctgtaggtatttgcagagggtgtgtgttctaagattcccttaagcagggaactccctaggctgttgaatgggtcagggtgggggttgacagtggggagtggaagggggaggcttgactcatgtccaccctcctcatccctctgcctttccacaagtgggagctgcttgtagaaacagagcattgcttaagaagctcaagttttatttcacctgttgggtgtatttgtctgtttatactctgcctcattccactttcttctagaaaggatttaaggtagccaggacccttcagtgtcaaaaatcccagatcctagaagaagcaatgcctaggggctgtgtttgaggggagtacgcagagtgaggtgtcactgatgatttcaaagaggtgaccctggagctgaactgtttttcaacgaagggaacattcttttcttgcctttatctctctgtcccctgtcaccccgatctctgctcccactcccaactcctcaaagggcaaattgtgttgccttgggtctcatggaggagagaaggcagggacagagaagagtccgcccgaagcaaatgccaatccttgcagagtgccgagcgagctgggagcagcggtgagctgggttgaggggcagccataggaacaagcgcagggagaaggctgagtaatggacgggaggcacagtgggtgacagggctgagagcacaatttatgagtcaccccgagcagctgctctttgccccaggggagcaactcacacattcccaagggagccagtgcctgggagacgtgacgtcgttgtcactgggagaggagtttcaaccatgtgtggcttcggaggagcttgttcccatgggtaacacccaagattctcaggatgcaaaatcccagccaaaaggagatggggctctaagacttcttgtgcatgcttgtatgtatgtgtgtatgtgtgtgcaggtgtgcatatgtgtgtgtgtgcatgtgtgtgaaagaatgtgtctcctccatgctgagacctcattattaactgctgatctgtgcatccagggtggtaagaactttcatcgttcatggaggaggtggtggctctgtgactaatagcccgccagtccgtagccatcccaacatttttctcaaggatgctccctccacaaaatcctgctgcaaacccatgatttgcatgaaacattccctgttcaaccacgacggctcctcatctggcatgtacatttggatcatggttagagggggctggccacctctgattgaattcagaaagccagcccggtgccgcccactgactctctcccaggcatcagccttaaagttctggcagctattcccagctaaatgggtgcatcaggccttcttactgcatagatagttaataggggaaggaagagagctcactcacagcctctcactgctgcagtttgttttataaacctgataggcacacagcaaacccaatgaccagatacaatggaagcagcctttccttttgcactgtcaccagccgtggctttataaaaccgttgtttttccttacctgggaagcccttgggctgtcccttacttccttgataagccaggcaaggacatgacaacctttaaaatattgtatctctgtggataactgagcccaagaagaggaaggatctagtgtatgcctccttaacaatgaaatgaaaaacacagggagccaaaaccaagtttaaatgagggtcagtggataacgcatgaactgggaacacgatttggttggggaagcttgtctatccgtggtgttttctggatagctgttttccagcacacacaagtatacaacacttatttaaaacaggccaagtgcggtggcttacacctataaccccagcgcttcgggaggccgaggcgggaggatcacttgagcccagaagttcaagaccagcctgggcaatgtagtgagacctcatctctacaacaaatttgaaaattagctggatgtggtggcacacacctgtggtcccaggcacttgggaggctgaggcaggaggattgcttgagccctgaaggtcaaggctgcagtgagccatgactgtgccactgcactccagcctgggaaacagaggaaaaccctgtctcaaagaaataataaaagaaaagaaataaaacagacttccccaagaatagtaaaccacagttacaagttcatatttgtaagtttattgttttattgaatctattttttggggtggatacttgttgatagtccctgtgggtacctgggatgttcctcctagcatagacggcaaaaatttccagtgaattcctcatttcctcctgtttctttgtgaatgcccgtagctttaagggcctctcacctcctcagaggcagaggaggtttgtggactgggtgctaagctaatacccaggaactgaattttgttttgtttgctccacccactcttgggtagaggtgccgataggatggccacactgtggccacagcaaacagaaatgaccagcactacccagataggaagcacacgtgcccagctgatccttcggtcctggggagctacctgaatctcatgggaaacctactttcctttttccccaccacagacttggctttctgcttcctttctgctctgctctttctgaaaatgcaaatgtgtgttgggcagatctcctatgcagggagattggcagagcccctagggacacttgactgaccaaggcttcttcgtggagagctgttttctggtttattctgtcttgtgatcgataggaaacactggccaggcttcttattttccaaggctgctgctttctgacaggctttaagggattaagggttgaatacaggtgggtttcttccccctcctgactctgtcacctggacattgccatggcaataatcctccctgaaacaaaaataaagggcagaaccggttggacagaaagtgtagccgaaaagtcttccagggacactgagagttgagggactttgaggccgcatggggctccatagagcagcaatccccaacctttttggcaccagggactggttttctggaagataatttttccgtggatgtggtggggtggggtggggtgggggtagtttctggatgattcaagcacattacacttattgtgtactttatttctattattattacattgtaatatgaaataattatacaattcaccataacatagaatctgtgggagccctgagcttgttttcctacaactagacagtcccatctgggggcgatgggagacagtgacagatcatcaggcattagattctcataaggaatgcacaacctacattcctcacatgtgcagttcacaatagggttctcgctcctataagaatttgatgccatcactgatcttacaggaggtggagctcaggtggtaatgtgagcaatggggagcggctgtcaatacaaatgacactttgctcactcacccaccactcacctcctgctgtgcagcctggttcttaacaggccatggagcagtaatgcgtccatggcctgggggttaggaacccctgctatagatcatgtccacaagagcaaggaggt

SEQ ID NO: 648 - DNA, 2689 bp, Homo sapiens
acacaacgctcctcagatagggcactcccccagcaggggtacagcttggctccgggacctcggtcccgccgaggctggcttcagtttctgaatttgcccaccagtggcttcgagggccaagcccccaggccctgctggtccaggaggagagacagctgcctgcgagcctcctggcccagtatggcgagcgctcgtccaacaggaggtcaaagccggcgctcaccaacgctgcgcagcgctgctcatgggtcaggatgttctctgcgccagggcgagagactgcaggtagaagggggcccacgcctctcccctcgacactacaagcctgggtccgggaatgctcacctacctacgctcaggggggccagtggaggccggctggaggtctggggggactctgaaagaggcaaggagggcgggctggtgtgggtgccaaggcccaccctccgtccctcaggaagccaaggaggcggggagaggaagttttcatcttccagacacaggacattacacgagctgctcttctagcggtccctacccccggtgtccccagaggacgtgaaagcagggaccggcacatgtaccccgccccagctccctgcaggtgacgtcctgatgctcagatggtttgtacagcaacccacctcctgctcacacgcacagccacttccgcctccccacgggactgccagcctcagtcctcttgtccccagctgcggctcagctgcctggccctccctccattacctgggttctccagctgactccggatgtagcagagggcagagagcgctgcctgctgtttggcctccgtcttgctattcgcagtgcccgcagggcagaccaccccatccagttccgcgctcaccgagaaggggaagcagggacctggggaaggagccaggtgaggaagcagccccctggccttcgccctgtgacagcaggctccatcgccaccccatgccgcgcacacccttgagtgcctctgcaggctgtgacccatcgctgattcaaccaagtcctcacccaactcctccacagcagggatgcgtgactccatttcacagatgagcagaaacggcaggcggtttgcccaacttgagtcaggacccaaatccaggtcccctctccagagcccacgccaccctgttctcaggaggaaggctctgagcacttccacctgccacagacacattgctttcaattcctctcctccaggggctctatatttgaacacttttcctatgaaacagtatcattttgggtgttacttataacacaaaagagagatgaaaaatctggaactgggatcacatggtcaaaggtgcagggttaatttcacagtacttgctgctaaattgtttctcccaaggactgcccctctgggggtttcccttttggaagggaacccatttcagcactccccactgcgctgagatctgtctgctctaaacaggcatcaaaaccagcaaccacagacagacgtggaagggatgttggccttagaaagccagcatgtggctgccatcctaacagcgactgaatctggggagaaccatcaaagcatgattttctaaaaccacaagtgacaatgttatagggacaggatatctacatgatctccaaatgcctcccctggatgacttattcagcacaaaggagaaagtgaagacacctggtagatgccaccctagtcaaatccccacagctcgcatcgccaggggacaaagcaagatcgcacacttcctggtgagatgcgtgccaaagactcgacatcacttcaataacacatcacctgaactcagttctgaggaaacagacaaacccaagctgaaggacattcgcaaaactactggcccttactcttcaaagacatcaatgttgtgaaagacaaagacaggaactgtttcaggtaagagattaaagaggcatgacagctaactgtaatgtcatactgggatgggaaacaatggccatgaggtcattactgggacaactggcaaaatttgaatgtgaatagaaattagaagatggtattatatcaatgttaaatttccaggatttgataattgtattgtagttacataagagatgcccttgtttttaagaaatatagatgaggccgggcacagtggctcactcctgtaatcccagcactttgtggggctgaggacaggaactcaagaccagcatggccaacacggtgaaaccccatctctattaaaacacaaaaaaattagctgggcacgggggcacaagtctgtcattccagctactcgggaggctgaggcgcaagaatcgtttgaattcgaaaggcaaaggttgcagtgagttgagatctcaccactgcactccagcctgggccacagagcgagactctgtctcaaaggaaaaaaaaaagagggctgggcagggtggctctaacctataatcccagcactttgggaggccaaggcgggcggatcactagaggtcaggagtttgagaccagcctggccaacatggtgaaaccccatctgtactaaaaatacaaaaataaattagccgggcttggtgtggacacctgtaatcccagctactcaggaggctgaggtaggagaatcacttgaacttgggaggcagaggttgcagtgggctgagatagtgccactgaactccagcctgggccacaagagtgaaactccatctc

SEQ ID NO: 649 - DNA, 3528 bp, Homo sapiens
ctcattctctctctcttgtcttgtctaccgccatgtaagacgtgtctttcaccttctgccatgattgtgaggcctccccagccacatggaactgagtgtcagccgtgacccttatgatggatgagaagaggtatcatgccttttccacccctacacctggaaggaaggttctgcagcgagttcatgagagacgatatgtggaatgtaatcagagcatacctcttaatacttaaaagcctttgcagggagatctctcttcccatctccttcctggaagacagaagccttgtgcgagccccttgtgtgatgtcaccccagctagggccaccggacgttggtcctcagcagggagactttgggtcctccaccaggacccagggctgacctgcatggccaggccccatggcctgggtagaaccttgtttctgctccaggaaaaaacgatcaacgaaccttcatttaagaaaaagcacagcgttctcatgggaaccaagaagacaagcccttaatgcaaagtgtattcagagagaagaaaacaagaaaagcagagacgattggattacagcaattgctcttataactcctctccgcccaccccctcgatgagaagctggtttgaaggactgagtatcaaatccctactgagctctgaggttccaggcagcgtagaaaacaatgcctgccttttgccaggcatcctcatggaagtgacatcgtctttaaacctgtgtggcaatccctgacgcaccaccgtgatgcccaggaaagacagggtgacctggaaacccaactacttccttaagatcatccagctattggatgattatctgaaatgtttcatcgtgggagcagacaatgtgaactccaagcagatgcagcagatccgcatgtccctctgcggcaaggccgtggtgctgatgggcaggaacgccatgacgcgcaaggccatccgagggcacctggaaaacagcccagctctggagaaactgctgcctcgcatctgggataatgtgggctttgtgttcaccaaggaggacctcactgagatcagggacctgctgctggccaataaggtgccagctgccacccgtgctggtgccattaccccatgtgaagtcactgtgccagcccagaatactggtctggaccccgagaagacctcctttttccaggctttaggtatcatcactaaaatctccaggggcgccattgaaatcctgagtgatgcgcagctgatcaagacgggagacaaagtgggagccagtgaagccacgctgctgaccatgctcaacatctcccccttctcctctgggctggtcatccagcaggtgttcgacaacggcagcatctacaaccctgaagtgcttgacatcacagaggaaactctgtattctcgcttcctggagggtgtccgcaatgttgccggtgtctgtccgcagatccactacccaactgttgcatcagtgccccattctatcatcgacgggtacaaacgagtcctggccttgtctgtggagactgatgacaacttcctgcttgctgaaaaggtcaaggccttcttggctgatccatctgcctttgtggctgcagcccctgtggctgctgccaccacagctgctcctgctgctgctgctgcagccccagctaaggatgaagccaaggaagagtcggagggaggagtcagatgaggatatgggattgggtctctttgactaatcaccaaaaagcaaccaacttagccagctttatttgcaaaacaaggaaataaaggcttacttctttaaaaaaaaaaaaaaaagaaaagaaaaaaagaagaaagaaagaaacaaagaaagaaagaaagagaaagaaagaaaagaaaaaaaaaataaaacaacacttgctcccacggttgtgacagtggggtttaaagaaaaccagcaggcgccgggcacggtggctcacgcctgtaatcccagcactttgggaggctgaggcgggcggaccacgaggtcaggagatcgagaccatcctggctagcactgtgaaaccccatctgtactgaaaatacaaaaaattagccgggcgtggtggcgggcatctgtagtcccagctgctcgggaggctcaggcaggagaatggcatgaacccaggaggcagagcttgtagtgagccgagatcgcgccactgcactccagcctgggtgactgagccagactccgtctcaaaaaaaaaaaaaaaaaagaaaaaagaaaaagaaaaagaaaaggagtaggcagaaagagcacacagtaggtgttcaaccagcgtgaagctcccagcccctgacagtccacgacagcctcagagcaggcagaaggagcacacagtaggtgttcagccagcgtgaagcccccagcccctgacaggctacgacagcctcagagcaggcagaaggagcacacagtaggcatccagcccacatgaagcaggcccccagcccctgacaggccatgacagcctgaggcaggaccacatggtgatctctaacctgaccccaggggaggacaggagggaggacggatagcaccctgggaggccagggcctggcgtcccaccctgtcaccctcgtgcccagtgtccaggggctccgagttagccatggcctggcgcgtagccttaggagagaccctccagccattcggtggagcgtggagacccctcgtggccacacggaggactgcagctctcagcgtgtgacctctcgccagcatcggggctgctctgcatgtagccctgggagagctctgcaaacattgcttgagctcctttttattttatttttatttcttgagacgggatctcactctcacccaggctggagtgcagtggcacaatctcagctcaccgcagcctccgcctccggggttcgggcgattctcctgcctcagcctcctgagtagctgggattacagatgtgcgccgccacgcccggctaacttttgtatttttagtagagacgggtttttgccgtgttggccaggctggtctcaaactcctggcctcaagtgatccgctcgcctcggcctcccaaggtgctgggattacaggcgtgagccaccgcacccggctgcttgagctcctttaaaggtgccacgatttatgcttggtgttatggacaaagaaaggaggtgattcccatcccagagaatctaccaccgggagagttacagaggctgggccgccctatatctacctcccacccctgtatacatccatatagaagagaactcagggttcaatcaggggacctagagcaagacacccattttcccatgccttgctccccatattggccttatgggcgtggtaccctgtaaagtacctggaatagtccagagctcaaaaattcttatgattattaaaggtataaaaggacaggtaaattgaggccaagtgcggtggcttatacctgcagtcccagcactttgggaggccaaggtaggaagatggattgatcccaggagttcaagaccagcctgggcaacatggtgagacccccatctctat

SEQ ID NO: 650 - DNA, 3393 bp, Homo sapiens
ttttgcagtttgtagttaccttgggtatctgcccctatctcatgcctggtgttggagtccctttgagatatagaactgaatttggtgccgtcgttcaagacgtggtgtgttttgatgctgcccccgatgcaactcgaagactgtacaccagctgcaaggcccttctgaatgttgctcagcacacatctctggggagcttgatcttctgccaccactttggggatatcgcagcaggtctgtgccaactgggattctgcccaaccaaaagaaaactgctaacacctgcagaagaggttctaactgaagaggagagaaccctatccaggggggccttgagagacatgctggatcaagtctatcagcccttagcagtccgggaactgcttatcctccagggaggaccaccccagtcctgcacagatgtgaagacacagatgaggtgtcgggccccagcttggcttcggcgtctatgtggacagctgctctctgaaaggttaatgagacctaatggtgttcaggcagtagtccggggcattttggaaggagcaggtgcgggagcagctggtggaagtgatgctgaggtgacggctgctgactggaagaagtgtgacctgatcgcaaagattttggcctcttgtccccagcagtctctttcaccagagaattactacagggacatctgcccccaggttctggatttatttcactttcaagataaattgacagcacgacaatttcagagagttgccaccactacctttataactttgtcaagagaacgcccacatttggcagcaaagtatttgctccagccagtgttagctcctcttcatcgatgtttgaatacagcagagctttcagagagtgacatggtaccaggaactattttggtgacagaagaagaacttagtagatgcattgaggatgtgtttaaggtgtacgtggttgggaatgaacctttaacagttttgatggattccctgcttccagtcctgggagtgctttttcttctctactgttttactaagcagagtgtgtctcacataaggtcactttgccaagaaatcttattatggattctggggaagctggaaaggaagaaggcaattgccagcctaaaaggatttgcagggttggacaaagctgtgccctctctccattctctgtgtcagtttagagttgccactcaaggtggcattatgattaccatcaaagaggccattagtgatgaagatgaagatgaagccctgtaccagaaggtatcctctgagcagggccgggtggagcatctcggggacttgctgtcccactgccaggaatgcggtttggcaggagacttcttcatcttctgtttgaaagagttgactcatgtggcctcggaaaatgaaacagagttaaaaactgagcccttctccagcaagagcctcttggaattggagcaacatcagactcttcttgtggaaggccaagagcggaagctgcttgtcctgcagctgatggctgttctgtgcgagagaatgtctgagcagatattcacaaacgtcactcaggtggtggactttgtagcagcaacattgcagagagcctgtgcaagcctggcccatcaggcagagagcaccgtggaatcacagacgctgagcatgtccatggggctggtggctgtcatgctaggaggagctgttcagttgaagtcaagtgattttgctgttctgaagcagttgttgcctctgttggagaaggtatccaacacataccctgatccggtcatccaagaactcgctgttgatctccgcatcaccatctctacccatggagcctttgccactgaggccgtcagcatggctgcccaaagtacactgaacagaaaagatctggaagggaaaatagaagagcagcaacaaaccagtcatgaaagacccactgatgtagctcatagccaccttgaacaacagcagagccatgagacagccccccagacaggcctgcagtcaaatgctccaatcattcctcaaggagtcaatgagcccagcactactacaagtcagaaatctggaagcgtaaccacagaacagctccaagaggttcttttgtcagcttatgaccctcaaattccaacacgggctgctgccctgcgtactctttcccactggatagagcagagagaagcaaaagcccttgagatgcaagagaagcttctcaagatattcttggaaaacttggaacatgaagacacttttgtatatctatctgcaattcagggggttgccctgctgtcagacgtctatcctgagaaaatcttgccggacttgttggctcaatatgacagcagcaaagacaagcacacaccagagaccagaatgaaagttggggaagtccttatgcgaatcgtcagggcattaggagacatggtctcaaagtaccgagaacctttgatccataccttcctgaggggagtgagagatcctgatggtgctcacagggccagcagcttggccaaccttggggagctgtgccagaggctggactttctgctgggctccgtggtccatgaggtaacagcttgcctgattgctgtggccaaaacagatggtgaagttcaagtacgcagagctgccatacatgtggttgtgctgctgcttcggggactcagccagaaagctactgaggtgctgagcgccgtcctcaaggatctctaccacctgctgaagcacgtagtgtgtctggagcccgatgacgtggccaagctccatgcccagttggccctagaagagctggatgacatcatgaaaaacttcctgttccctccacagaagctggagaagaagatcatggtcctgccgtagacctggctccaaggacgtggaggaggcaggcagggccaggcacccagagccgtgcccaggtcttccagcaggtggccctgctgcctcttgagtgctggcagcatggctgaccctcggggtggttttatggtgcaggtcacttgggtcttcagggtcccttccgagggcatgtgttcagcactcccgcgttcagcctgaggggtgtacagttaagagaagacagttacagatctcattaatctacatttttcactgtcctctagcattgaaagaaggatgtctacctggtgaaagtatattttaacatgactgatggaatttcactaattgcccactctcttggaacttgaggagaagcggttggccacccatatgtcacctagctctatattctttcaggctgagattcttcttcaggaaaatgaggagcagaactggccacccttggctgctcaagaggcatttcagagtaggagatgcagttggaggtggggaggggaaggaaatagttatcaaataatgcaaaatggaataaagttatcttggatgg

SEQ ID NO: 651 - DNA, 3107 bp, Homo sapiens
ttatgtttttctttctcttataccttcatcttctccatctagaagctcttttagtcactagcatttattaaatatccgttgtatgcagagcacttcaactgggcattgcctcactttcctaatttgccgcccccttcctctgtcaaagccttcaaatcatgggaccctctggcctctctccctcttattgtattggtgtgtctctgtatttatgggacgcatctgtgggggtggtcatatgccagtgagcactagattaagtatatccttggtggttccgggtgagtctatctggctgctttggcttcaggaacatgggaacgatgcctgtggaggtgggcgtacaccgtctggagggaagatggggtgatagggtgtgtgcgtgtttgtcttcttgcctgtagttctcaaaaagaggcatggtggtcatttttaaaatctatgcttttttcttattcaagttatttggtactttacccatataagggtatttctggaatgatattgtttcatcctttcatttcttctttgggcatggtgattcccacacctgcaactctatttatgtcctcctttcttttcccagctctacctattagctgacttcctagtggtaccagaggcatgatttcactttgggtctgggagtttgggggaaaatgaaaaataggtttaggtattttctgggataagtggaaatcctgtctgtgtcatggagggatggccatacagagtaatccagtagtcattaaagacatacagaatcaggccgggcacagtggcttatgcctgtaatcccagcactttgggaggtcgaggtggtagtatctcttaagcccaggagttcaaaataagcctgatcaacatagcaagactctgtctttacaaaagaaaaataaaaaatcagctgggtgtggtggtgctcttctgtagtcccacctactgggaaggctgaggcaggaagatcacttgagcccaggaattcaaggctgcagtgaaccatgattgtgccactgcaccccagcctaggtaacagagtgagaccctgtctcaaaaaaaaaaaaaaagaaaaaagaaaaaaaaagacatagaattttattaaggagagtaatctcggtcagattcaaagttctggagtgtaaaagctccgaagttcctttttttattacaggctacccacctttctgttctgagacccctcaagagacatataagaaggtgatgaactggaaagaaactttgacttttcctccagaagttcccatctctgagaaagccaaggatctaattttgaggttctgctgtgaatgggaacatagaattggagctcctggagttgaggaaataaaaagtaactctttttttgaaggcgttgactgggaacatatcaggtatatccatataaacactttcagaattatttcagaaagtctctagtttacttaataataatttggaaggaccatcattggcaagccaagtaagggaagagagcttcttagagatttagggtcttttcctgattttcattcatggtgaagattgggcattagattttttgtcagccgtgtgtcatggaatatattgaatctagcagttatttacaaagtgaagtgaactttgttttttgaggtggagggagcatctaggaagcgtattaccctttacctagaactcagcaacctcttaggtcccgccagcgggactgttcctgcccacagggtggaaggtatcactggaacatagagaagggagaaaggagtggaggaaagattggaggggtggaagtggagagggaaagggagagtgaaaattgttatggtgggggtagtagactacggccaatagccgtgagagcctagaccacctgctgtagtccagaccttctcattcagcattcattggttattaaatagaaggtgaagttttcatttattttataattgtgtactgatttgctgcttgtgattttttacctttgccacttttctagccatcctacttggcacctccagtggaagaagggcagagccctacacaaggggacatttagaggttcagtttccctttttagtagacaggccaggccatggggggagttgcactaacttcacgttttagttattcttatctttctttctagctatgaatgattgagttatttttttaaaatcataatttactttgggtacagtcagttggcttggttggtcagtgtttataagtttttcagagaaaataaatgctgcctgccagtgaagagtcttctcatgtcagaccaggggtcttttttggagaaagacttgattggtatgatccatttgattactaacttagtaatttttggcatgtgtattcttggcagagagagacctgctgcaatatctattgaaatcaaaagcattgatgatacctcaaacttcgatgagtttccagaatctgatattcttaagccaacaggtaacaccaccagcattgtctcctgctgccttataagcacattatttacccccaattttgggatgatgtttacaaatcagggtagtgaacatggagaggaatttcatttcttcaggttctttgtaagtacttttctaattctaatgctgggtagtggtgaaaccttggtgaatggaaaatgagtatcagctcccatgtttagactgctcaactgggtgagtaagtcacaaaaatctgttcttttgttatttactaagtgttaggtaatctgaaatgacaggaatgggaaaataaaacattaaaaaatttgtgaagaaatatgagatttaaagaacatgagcaagaaaatgtggaaaattcatagagtgaggccaggcgcggtggctcatgcctgaaaccccagcactttgggaggccgaggtgggcagatcacaaggtcaagagatcgagaccatcctggccaacatggtgaaactccatctctactaaaaatacaaaaatcagctgggtatggtggcacacgcctgtagtcccagctactggggaggctgaggcagaaggattgtttgaacccgggaggcaaggttgcagtgagctgagatgacgccactgcactccagcctggcgacagagcaagactctgtctc

SEQ ID NO: 652 - DNA, 2289 bp, Homo sapiens
atggggcaccggggctcaggaaggtgccaggacagttgcccctgctttgcagtgaaagatcatccccaacggagaagcttgcctgttccctgcccctggaggggtggagcccagccttaaagacccagggcaagctgaacaccaggcctggaaaggtgatcttcttctcagagtctggctgccaaggcagtggcagggaggtctggggagacatcgttgatgcctcaggctgggcccccgtagcctccataagggtagttcgaggctgctgggtgctgtacgaagagccagagttccggggtcagaagctggtcctgcctgaaggagacatggaactcagaaccccagggacaaagtggagtccccaaggcatcggctccctaaggagggttgtctgggactacagcaccccggaaatcagcctcttctctgaggagggcctcaagggggagcaagtgaagctaacagaggccttgaagaattcccagggtctggagaagcccctgcaggtggcatctgccaccgtctctgcaggactgtggctactgtaccccaaaccattattcgaagacactccctacatcctggaacctggagagtaccccacctcagaggcctggggcacatcggaccccagcgtgggctccctgaagcccatgagattgggctgcccaagtgtggagaagccaggggagcccagggctgtggtgtatgaggccccaggctttcagggccgcagctgggaagtgagccgagacatctacaaccttcagcagccagaggacagccagagcccccacctggcctctgtggggtccctgagagttctcggaggctgctgggtgggctacgagaaggagggcttccggggccaccagtatctgctggaggagggggaatacccagactggtcacactggggaggctatgacgagttgctgacctccctccgggtcatccggacggacttcggggacccggccgtcgtgctatttgaggccatggacttcgaggggcacggcgtggaggtgagcaaggcattgccggatgtggagctggtgcaacacggccccagcacacaggccatccacgtgctcagcggcgtgtgggtggcctaccaggaggtgggcttctccggggaacagtacgtgctggagaagggcgtgtatcgtaactgcgaggactggggcgctggcaacagcaccctcgcctcgctgcagccggtcctacaggtcggggagcacgatctgcacttcgtctcaaagattcagcttttctcccgccccgactttctgggcgaccacttctctttcgaagatgaccaggccgctctgcccgcctccttccgacctcagtcctgccgggtccacggcggcagctggatcctgtttgatgagacgaacttcgagggtgaccagcacattctctctgagggcgagttccccactctcacggccatgggctgcctcgcctccacagtcctgggctctctccagaaggtatccctgcacttttcagagccttccattttcctgtatggactcgagtgcttcgaggggaaggagatcgagctcagcagggaggtgcggagcctgcaagccgagggcttcaacaaccatgtgctgtctgtgcggatcaaggggggcatttgggtgctatgtgaacacagtgacttccggggccgccagtggctggtgggaagctgcgagatcaccaactggctgacctacagcggcacccagagggtgggctccctctaccccatcaagcagcgccgggtttatttccgcctctggaatgcagcactggggggattcctggcagtgccggaccatgtggaggacatgaaagcaggccgtgtggtggtcgccgacccccaagctggaggtagctgcatctggtactacgaggatgggctgctgaagaaccagatggcccccaccatgagcctacaggtgattggaccccctagcccaggctccaaggtggtgctgtgggccgagagccgcctgccgcgccagacgtggagcatcagtgaatcgggccacatctgcagccagatgttcgaaggccagatcctggacgtgaagggaggccggggctacgaccgggaccacgtggtgctatgggagccggatgaggacagggcatcccagatctggactatccacgtgctttgaaacttttcccctcaccctccagccctggaggcttttgctgggatgaatgtttttatagggtttttgttgtaacataagctattttctaatatgctgccaggtacccttg

SEQ ID NO: 653 - DNA, 2787 bp, Homo sapiens
aagtactggccccgccatttaaaggcccctccctccgcgtgtgggaatgggattcccgcaggttgcaccgcaggaagcaagacaaaaccagggagctcagaagagtcactgccctgatcccttccgtgccggcagctgcgaggacacaggcccctttgtatcctgcggtgcggaggtggagcagaggagagggtgccccggctggccccctccctcgccccgcagcactgcccctcctttcacagcaacccacggcctcccccgcgcttgacccagctggcgagctgccccttatacctggatccgcccctcgggtcgcagctccccaggcccgatcaccgagcggtgcctaggaactgggagcgtaacttggctcggctcagaactttgcccgtgagccaaagaacactgaactcatctacctgctgcttgacatctcatctgcataccaagctatttggtggacgtccacaagcgcccccgcccccacgtagacccagttgggtccccgttccgtcggtcccctcctctgcacacgcctctagccttataccccgtcttgatccgaaagtttttccacccatgaacccccagttggcgctccccgaccagcaaaagccccttccctggtccacgatcccgaccacccggttctccaggagacaatactccaattctctggaaagtggaagaaaccaagctgaagctaggggggcgctgggacccctattggggctttgagagcttccggttgtcatctcctaagtattcggagacccttctccaaaactcttggggtgaccctcaagactcttacctgctatatagttgggggtctctggtcctggactagagcagtaggcaacctgggtccccccacacacacgggaaagaattggaggggcctgccttgtgatgtcacccctcctccccccaccgcgcgcacgcgcgcgcgcacacacacaaacacaaacacacaccccaacacacacgccctgtcccctttctccaccctgcaagctagttgcatttagctcacagagcctgggctgcgacttgaaagagtttaggcagcaacagagtgaccctgggggtgctcttgaccgacagccgcacccccggcgtctaggacctccgagcagggatgcatctggaggtctagggaagcacttccaccccctcctctcctcaatcctggcaggatgtgcccgaaatgccagctcctccttggtgttctcctttcaggatttgaattcaaatcccattggcagccctgataccgctgggggaagggtgagctgggtcttactggggatctggccagccttgggggcccttggagccctggcccagtggaagctcgtgcctgaggaacatggaggccacgctaatgagttacttccagagtcttcaagagtgccaactgggaccaggaccccagaccacagccccccacaccgtcctggacctggattctgactgtggttccactgtacccctcaccttaatctctggttctaaccagacctgagcctagacttccactttttcccttacccctgtgagggcctgggaacactaggtgggcagggtttgagcccacaggacctgcacacaaacttccccacctcttggacttggggacaggatctgtgcctcaacccagaccagctttgtagggatatgttccaagaacagagaagagtcttatggggaagggggaggaagggaagtatgaatatttacctctgaccaataatagaggtgccctggtccccaaagaagttgactcccgaattccctccaagccttacccatatagcttttgtttgtttgtttgttttcagacaaggtcttgttctgtccagtgccgtggcgtgaccacagctcatgacaactttgatttccccggcccaagcgagcctctcattcagcctcctgagtggctgggaccacagacgccacacacagctaatttttatgtattcgtttttatttttttgcagagacagggtctccctatgttgcccaagctggtcttgaactcctgggctcaagtgatcctcctgcttcagcctcccaaagtgctaggattatagccaccgcacctcgtcttgaaatagccttttaaatgttcacctcagcttgcctcacagtggtaaaaataagcatttttttgttttgtaggatcagggagcttccaaggcatttgatacctttttgatgggaagaagggctctgaggagctccaagataccccaacctccaggcccttcattagggggtagttgggtttctgtttggcctttccccctgggccccataggcttaaactacccccacccccacctccgcctcctacctcagctgggagcactgtcttccatggggcttccacttctctcctcaacctggggaagaccacagggcagtgcctgcctcaggacctgccttccccaaaagctggcttcttgctccaaggagagagcattgacccacctgccagagtcttgccttttgcccaaaggagcctggtcttcagggctgcataggatgcaagtgccttctctgcttctcaccgtgggtggcactaatttcctccttaaccagaactttgttccagccactgacccattctaactcttccccctctgactctcctgcgcagggtctgttcctggtttcccagatgcataaaggaagacatatccctcccctgggcagcaaggctacaatgggagggagggagaacatgggagcatgtgaataaaatggcattaaatactg

SEQ ID NO: 654 - DNA, 3560 bp, Homo sapiens
cactcgggctccaggtcccggccagaggaggagctcgctgccgggggacgctgggctgagcggccggcggcgcgggcccggcggcggcggcagcggggtccgggtccggagcgccacatgagacggtttaagcggaagcatcttactgccattgactgccagcatttggctcggagtcacttggctgtgacccagcccttcggtcaaagatggacaaacagagatccgaaccatggtctctatcctaaaccgagaacaaaaagagggagtaggggtcagggaagtcaaagatgcatccctgagttcttcctagcaggcaagcagccgtgcaccaatgacatggccaaaagcaattctgttggccaggacagctgtcaggactctgagggtgacatgatctttcctgcagagagcagctgtgcactgcctcaggagggcagtgcagggccgggctcaccagggtctgccccgccctccaggaagcggtcttggtcctctgaggaagagagtaaccaggctaccgggaccagccggtgggatggagtttctaagaaagctccacggcaccatttgtctgtgccatgcacaaggcctagggaggccaggcaagaagcagaggacagtacgtctcggctctctgcggagtctggtgaaaccgaccaagatgctggggacgtgggtcctgatcccattcctgactcatactatgggcttcttgggaccttgccctgccaggaagcactgagccacatttgcagcctgcctagtgaggtcctgaggcacgtgtttgccttcctcccggtggaagacctctatcggaacctgagcttggtgtgccacttgtggagggagatcatcagtgacccgctgttcattccttggaagaagctgtaccatcgatacctgatgaatgaagagcaagctgtcagcaaagtggacggcatcctgtctaactgtggcatagaaaaggagtcagacctgtgtgtgctgaacctcatacgatacacagccaccactaagtgctctccgagtgtggatcccgagagggtgctgtggagtctgagggaccaccccctcctccccgaggctgaggcgtgtgtgcggcaacacctccccgacctctacgctgctgccgggggtgtcaacatctgggccctggtggcggctgtggtgctcctctccagcagtgtgaatgacatccagcgactgctcttctgcctccggagacccagctccacggtgaccatgccagatgtcaccgagaccctgtactgcatagccgtgcttctctacgccatgagggagaaggggattaacatcagcaataggattcactacaacattttctattgcctatatcttcaggagaattcctgcactcaggccacaaaagttaaagaggagccatctgtctggccaggcaagaaaaccatccaacttacacatgaacaacagctgattctgaatcacaagatggaacctctccaggtggtgaaaattatggcctttgccggcactgggaagacctcaacgctggtcaagtatgcagagaagtggtctcagagcaggtttctgtatgtgacattcaacaagagcatcgcaaagcaggccgaacgcgtcttccccagcaacgtcatctgcaaaaccttccactccatggcctacgggcacatagggcggaagtaccagtcaaagaagaagttgaatctcttcaagttaacacccttcatggtcaactccgtccttgctgaagggaagggtggattcataagagccaagcttgtgtgtaagactctagaaaacttctttgcctcggctgacgaagagctgaccattgatcacgtgcctatttggtgtaagaacagccaaggacagagagtcatggttgagcagagtgaaaaactgaatggtgtccttgaagcgagccgcctctgggataacatgcggaagctgggggagtgcacagaagaggcgcaccagatgactcatgacggctacttgaaactctggcagctgagcaagccttcgctggcctcttttgacgccatctttgtggatgaggcccaggactgcacaccagctatcatgaacatagttctgtctcagccatgtgggaaaatctttgtaggggacccgcaccagcagatctataccttccggggtgcggtcaacgccctgttcacagtgccccacacccacgtcttctatctcacgcagagttttcggtttggtgtggaaatagcttatgtgggagctactatcttggatgtttgcaagagagtcaggaaaaagactttggttggaggaaaccatcagagtggcattagaggtgacgcaaaggggcaagtggccttgttgtcccggaccaacgccaacgtgtttgatgaggccgtacgggtgacggaaggggaattcccttcaaggatacatttgattggggggattaaatcatttggattggacagaatcattgatatttggatccttcttcagccagaggaagaacggaggaaacaaaacctcgtcattaaagacaaatttatcagaagatgggtgcacaaagaaggctttagtggcttcaagaggtatgtgaccgctgccgaggacaaggagcttgaagccaagatcgcagttgttgaaaagtatagcatcaggattccagagctggtgcaaaggatagaaaaatgccatatagaagatttggactttgcagagtacattctgggcactgtgcacaaagccaaaggcctggagtttgacactgtgcatgttttggatgattttgtgaaagtgccttgtgcccggcataacctgccccagcttccgcacttcagagttgagtcattttctgaggatgaatggaatttactgtatgttgcagtaactcgagccaagaagcgtctcatcatgactaaatcattggaaaacattttgactttggctggggagtacttcttgcaagcagagctgacaagcaacgtcttaaaaacaggcgtggtgcgctgctgcgtgggacagtgcaacaatgccatccctgttgacaccgtccttaccatgaagaagctgcccatcacctatagcaacaggaaggaaaacaaggggggctacctctgccactcctgtgcggagcagcgcatcgggcccctggcgttcctgacagcctccccggagcaggtgcgcgccatggagcgcactgtggagaacatcgtactgccccggcatgaggccctgctcttcctcgtcttctgaggacaaggcgcacgttctccgcagtgcagagcagcttgccgaggaccccgcgtgaagaaagccagcgaggggggcttctgctccctgagactctgggttcacccacagcactttctgaggaagaggacaccagcccaagctggacctgccatttctccactccctacagacagccagtctccacttgcctcccctctggatgtatctggtcagggaagtgggggatgttcttttgataaaaaaaaaaaaaaattttatgtatttaaacttttattacaagatttcaattaaacaggcaccatagcactggc

SEQ ID NO: 655 - DNA, 3193 bp, Homo sapiens
atgagtgtttccaaagctcagagtatttatgggattccccacagtacactggagtacaaagtaaaggagaggctgggcactttgaaaaaccctccaaagaaaaagatgaaattaatgaggtcggaggggccagatgtttctgtaaagattgaattagatccccagggagaggcagcacaaagtgcaaatgaatcaaaaaacgagtaggaatactgtagagtgccaattactgtacaaactgggtgagcactactgcatcattgttcagctatcattgcttgcacgtaatttcatttactgtgacacttgcttctttgcagattttgcattgacttgtgtgtacagagatgaaatgtgcattctgaatgttgcatattttaaatttttcatgtgcagtatggctcggaatatgtttggccttttgcatgtttctctacaaaagagaattgagttacctcacagagaacagatacatggaagtggactccttgcctgtagagcctgcatgctttttttgtttttttttgttgttgttgttttttcttaagttatatttgtttttactttttaaaaaagaagaggaaacaaagcccccttttagaaactacgtctgtcatactgggagctttatcactgcaaattggaaagccatcttatacaaaattattcacatttttcatctacgattcaactaatcgaaggattaaactaaagaaaaaactaagaagaacaatgaacctttgactttgagaaatttggttattcactgacataattattgggtcatttatagttacattttataattttcttctcactattaaatttatttaaattagcaagctattagtgctcacccagaggggaaggtggtggaaaatgtgcacacactaccttcagaaatgcttcagttaattactttgaacactacctttgctgtaatttcatttgagattttctaagggtagaatttggtctcaccaacaagtgaggatatagccttatctcatggaggacgagctccgtatttactcaggagcagtcagggtacattacataaaacaatggaggatgcctcattttagcaaactaggtttctttgtattcttcagtccttttacagaattgatgtgctaactgaatatcattgcagcaactagactaagatattcaagatctctttattggggatgggagaaatagggaaagaaatgtgtataagtaattatgatattgcaaaagtgatacttagattttacagcctcagtagtctgcccagtgtccacattaatgaaggatccatgtttgtagtgagagaaaaaaaccccaaggtaacccgatatgatttaggatgcatatcagttctaacaattcaatcagaagtcaagctcattggaattccttttttaactgatccaaatactagtagaagggggagggagaggtgttgggttttttttttaagtttttatttaattttgttggttagaattttttttctgtttttggcatcctacataataccccccttcttgactttttctgataattagctgatattcatggttgtttagcacacagttcaggacctttgagatcatgtttgtataagcactccttgaagaatatctaagctttttctgagatgggcttttaaaattataataagggaagtttattttctgcggtttttgcaagaataagcaaagcccatggaatttaatttttcattgtgatcagattaaaattactatttgtgcaaaacaaattccacaccacatgtactgtatattctaatctgctgagaaaggtggtcaggcccttctaaatgcttaaccaaaaacaaacattattggagtttcagtgtaaaataaaattaaaattggagggttggttagattgatttcagatggatactaacagtttgaggggaggtccagatatttccaaggcataaattcttgcctggaaactttggagcaattaattaaattaggttaagttttccctcagcaacctgtgtgttcaaaggttaggcacaccattgctgttactaaaatacatgcactgctcattcttgacatagcttgggtgtgggttcctcttgttttggttattttgtgtagcagtttaatcagtggataactgagcctgtttcctcttagctttctagacttcttaacagaaaaaacagtttgggttcaatagcattttatgattctacaatattttgtcacctagctggaagttgcaataaaaattccttatgaaatatatggttttcatctgtaattgaaggaaatcatagaaagtttgctgaaagcaaagggctaagcttatgaaggaatgcctcctttgttacacactcaagaatttgtcagcacacaattaattgcagccatagtacctttttgcgtaatgtttgggatattcagtagcccaggattgctacaaaaaggtcctttgagaaaattaatttgtgcttgcttttatcccctctcagaaagacatcactaaaggcccattaaaaatctggccctaaaagttcaacttttgtagagtttattgttcagagaggtttaatcctatgtggtagtctatataagtgatgtatgagttgagttatgtaaattttgtcattgtagtgtacatggagtgatcattttactaacataaatattttctatgtgtgtttcagtggatgacaatcgagcagcagaagaatggtgtgcctaccctttaatgctgcagtttaagagaacttgtattgtgtcatttcagattgtaggctgagagttgtaaatagtgaaaatttgagtacttctattatttgttttggttagaaagtgaatttaaaaaacaaaccaaactctaaactttctcagattaaaagtcctgagacctgaagattgtaatattcatgtctgtgaagcttttaaacattacacttgagatcagtcatgacttgatattcaggtaaattttcttttccaagaagcttttgaataagcatatttcctccaaaggtctctctctttctctctctttttttgagtgtagattattttaaagcactaattgcattacattggtaactgcaatataaaatagccattattgttttgtgaagcatggttgaaattagctagtggtcccttttgaatttcatgagcctctcaaaaaagaaaaactt

SEQ ID NO: 656 - DNA, 2879 bp, Homo sapiens
actcggagctgctctgccgcggggactgcaccgcccgccctgccagacccgcccggaacggggctcgtcgccgccagtagccgcagcaccgcagccttgggcctcgcgccggctatggccgtgccctggggctgagccctcaggttgtgaccgagattcccgagagagagactgaggggaagagaggaaggaggggcgggctcctggcaaggcattcgctcctgagcggaatcctgcaaagatggagaaggaggagacaacccgggagctgctgctgcccaactggcagggtagtggctcccacgggctgaccatcgcccagagggacgacggcgtctttgtgcaggaggtgacgcagaactcccctgcggcccgcactggggtggtcaaggagggggaccagattgtgggtgccaccatctactttgacaacctgcagtcgggtgaggtgacccagctgctgaacaccatggggcaccacacggtgggcctgaagctgcaccgcaagggggaccgctctcccgagcctggccagacctggacccgtgaagtcttcagctcctgcagctctgaagtggttctgagcggggatgatgaggagtaccagcgcatctacaccacgaagatcaagccacggctgaagtcggaagatggagtggaaggagacctcggggagacccagagctgtaccatcacagtgaccagaagggtcacggcctacactgtggatgtgactggccgggaaggagccaaggacatagacatcagtagccctgaattcaagatcaagattccaagacatgaactgactgaaatctccaatgtggatgtggagacccagtctgggaagaccgtgatcagactgccctcgggctcgggggcagcctctccgacaggctctgctgtggatatccgagcaggggccatttctgcttcaggaccagagctccaaggtgctggccactcgaagctccaggtcaccatgcctgggataaaggtgggaggctcaggtgtcaatgtcaatgcaaagggcttggacttgggtggcagaggaggggtccaagttccagcagtggacatttcatcttctcttgggggtagggcagtagaggtacagggcccatctctggagagtggtgatcatggcaaaattaaatttcccaccatgaaagtgccgaaatttggtgtctcaacagggcgtgagggccagacaccaaaggcagggctgagggtttctgcacctgaagtctctgtggggcacaagggcggcaagccaggcttgactatccaagcccctcagctggaagtcagtgtgccctctgccaatattgagggccttgaggggaagctgaagggcccccaaatcactgggccatcacttgagggtgacctaggcctgaaaggtgccaagccacaggggcacattggggtggatgcctctgctccccaaattgggggtagcatcactggccccagtgtggaagttcaggcccctgacattgatgttcaggggcctgggagcaaactgaatgtgcccaagatgaaagtccccaagttctctgtatcaggtgcaaagggagaggaaactgggattggtgtgacactgcctacaggtgaagtgactgttcctggggtctctggggatgtcagcctgcctgagattgctactggtgggctggaaggaaagatgaaaggtactaaagtgaagactcctgaaatgattattcagaaacctaaaatctccatgcaggatgtggatctgagccttgggtctcctaaactgaaaggagatattaaggtttctgctcctggggtgcaaggtgatgttaaaggccctcaagtggcacttaaaggctccagagtggacatagagacaccaaacctagagggaaccttgacaggccctaggcttggcagtccttccgggaaaaccggaacctgtaggatctctatgtcagaagtagacttaaatgtggccgcacctaaagtgaaagggggtgtagatgtcacactccccagagtagaagggaaagtcaaagtccctgaagttgatgtcagaggccccaaagtggatgtcagtgccccagatgtcgaagcgcatggcccagaatggaacctgaaaatgcccaagatgaaaatgcccacgttcagcactccaggagccaaaggggaaggtccagatgttcatatgactctacccaaaggagatatcagtatttcagggcccaaggtcaatgtggaagccccagatgtcaacttggagggtctggggggaaaacttaaaggccccgatgttaagctgcctgatatgagtgtcaagacaccaaagatctccatgcctgatgtagatttgcacgtgaaaggtacaaaggtgaagggagagtatgatgtaactgtaccaaagctggaaggagaactcaaaggcccaaaagtggacattgatgccccagatgtggatgttcatggcccagactggcacttgaagatgcccaagatgaaaatgcccaaattcagtgtgccagggttcaaagcagagggcccagaagtggatgtgaacctgcccaaggctgatgtggacatttccgggcccaagatagatgttactgctcctgatgtgagcattgaggaaccagaagggaaattgaaagggcccaagtttaagatgcctgagatgaacatcaaagtccccaagatctccatgcctgatgtggacttacatctgaaaggccctaacgtaaagggagaatatgatgtcacaatgccaaaggttgaaagtgagattaaagttcctgatgttgaacttaaaagtgccaaaatggacattgatgtcccagatgtggaggttcaaggcccagactggcacctgaagatgcccaagc

SEQ ID NO: 657 - DNA, 2322 bp, Homo sapiens
attaaacaaatgggctttctacttggccagtaccatcttgtctgctccttactatacacgcgggtggcaaagacaggagaagatggagccaccgttttgaacgtgtctattcccagctcggaaggcacaatccacataggtctgcatggtccaccgagctgcatacccacggggccagcgggaggtgggcagctgctgggctctcttctgaagcagacaggatctcactctgttgctgaggctggatcacagctccctgcaaccttgaactctccctcaagcaattctccccactctgccttccaaagcactagcattataggcctaagccaccactcccatccactgtagtgtaaactgtctccttcaatgtttccaatagttgcggagcagatcagataagggttcttcctgtctgttgcttcaagtttcattctctctttaaacaatacaaggttggcttccatggttccttcttaaagaatgttgaaggtgtgtcttcagattcatttagtgttcgtggaaccccagggaaagctgatgtaaaaacctcttttttctcccatatgtctcaaaaagttgtattttctgggtccaagggatctgcaagcctcctaaaggcatttccattgtcactaccaccaggtgtgaactgtaatctggcacgtatagttccaagaactgtcataatagatgctgaagaaacattgtgaagttaactcgctgttaccaactgtgaagtcattagctagaggaatcttgggcggtctgaaatctgagatactgtggaaagaacagaaagatcctgtatctttcctataattgttctactggaagttgtcattttacacaggagacattctgttttatttattttcttttgagacagggtctcactctgtcgcccaggctggagtgcagtgttgttaccacaggtcactggtgcctccactgcctgaggactgctcaagcaatcctcctgcctcagtcccctgaggagctggggccacaggcctgcaccaccatgcctggctaattatttttatttgtagagacaaagtctatcttgcctaggctgatctcgaactcctgggctcaagtaatcctcccgcggtggcttctcaaagtgcttgggattacagatgtaagctaccatgcccggcctcacaggagacatttttggtgtccctcttgacagtctacaaaagtctacaaatcttttttttttttttttgagacagggtcttgctctgtcacccagtctggaatgcagtggtgccatcatagctcactacagcctgagctgtactgagctcgagggatcttcccgtctccgcctcctaagcagctgggactacaggtacttgcccccaggcccagataatttatttaaaaactttttttgtagagacagggtctcactatgttgcccaggctggtctcaaactcctggcctcaaacaatcctctacctcaacccccctaagtgctggcattacaggcatcagctgccatgcctggctacaaatcttaatgttttccccatggcttctttttctggcgttcttttctcaggtaatggaagtgggcagagaatgatcctttccctaggctccagtgtgtaagaattaaagaaagaggaaagaaacacaatggcttgatggtcgaggacaggtttattttaaagaaaacaaacccaagagtggcttctggctgagttagatcagaggcatgctctcttacagactaagagtttttaaggattcagggtgggagagtttatcagaggcttggactgcttctgtgtctctttaggtgtgcttatctgggagggagttgtgtgtctgtttccatacatcttcctgcagctgcaggcatacccccaggtctgcttttagcttccctatcttagtgcacctgaagggaaagaatgtgcttattaaggcccactgttatactggggcccaatgtatgagggtgaagtttggcaattacccaagagactttccccccacctccctctgtgcctgagctgtctcatctatgttttactgtctgctctttctgtctgcttgttgttagaagagaagtgattttcttgaaatgcatgaggctggaaagggagctggcacttaaagtggcggtgtttgtccgagaggatggtgctcctgctctgtcacagtgggcatggggattcaggccactgccaccgaatttcaagagcccaagcacagagcccagaactaaattgtgagggtttaaaaaaaaaaaaagctttattgaagtataattgacatacaataaacttgaatatttaaagtgt

SEQ ID NO: 658 - DNA, 3140 bp, Homo sapiens
attcgcccggaacatggctgccgccggccgccaaccggtcttgctgtctcacccaggctggagtgcagtggcacgatcacagctcactgcagccttgagctcctgggctaccaagtagctgggacttcagagatggctggagccgtgtggatgggcataaatggctaatgtccagcaaccatcgatgtcaagtatccacacacctggcctgaatggatccctctgcctttcagagacggagtctcgctctgtcccccaggctggagtgcaatggtataatcttgtctcactgcaacctctgcctcctaggctcaagcgattctcctacctcagcctcccgagtagctgggattacatgcatgcgccaccgcgtccagctaatttttgtatttttagtagagacatagttgcccaggctggtcttgaactcctgacctcaggtgatccacccgcctcagcctcccaaagtgctgggattacaggcgtgagccactgtgcctggcttaatttttgtatttttagtggagatggggtttcaccatgttagtcaggctggtctcgaactcctgagctcaggtgatccacccacctcagcctcccaaactgctggaattataggcgtgagccaccgcgcctgcccccagtttatgttttcacagctgccactaagtttgggatatgagattgaaaatgacgactcggaattttcctgagagagaagtaccctgtgatgtagaagtggaaagattcacaagggaagttccctgcttgtccagtttaggtgatggttgggactgtgagaaccaggagggacacttgaggcaatcagctttaactctggagaaaccagggactcaggaagcaatttgtgaatatcctggttttggggagcatttgattgcaagctcagaccttccaccgtctcagagagttctggcaacaaatggtttccatgcacctgactcaaatgttagtggtctggattgtgaccccgccttacccagctatcctaaaggttatgcagataagagaactggtgacagtgatgcctgtggaaaaggcttcaaccattccatggaagttattcatggaagaaatccagtgagagagaagccctacaaataccctgaaagtgttaagtcttttaatcattttacctctcttggtcatcagaaaataatgaaaagaggcaagaaatcgtatgaaggtaagaattttgagaacatctttactctgagctcatcgcttaatgaaaaccagagaaatctccctggagagaaacaatatagatgtactgaatgtggcaaatgcttcaaacggaactcttctcttgttttgcatcaccgaactcacaccggagagaagccttatacttgtaatgagtgtggaaagtccttctccaagaactacaacctgattgtgcatcaaagaatccacacaggagagaagccctatgaatgcagtaaatgtgggaaagctttcagtgatggctcagctctgacacagcaccagagaattcacacaggcgagaaaccttatgaatgcctagagtgtggaaaaaccttcaaccgaaattcatccttaattttgcaccaaagaactcatacaggggaaaaaccatatagatgtaacgaatgtgggaaacccttcactgacatctcccaccttacagtgcatctcagaatccacaccggtgagaagccctatgagtgtagcaaatgtggaaaggctttccgggacggctcgtacctcacccagcatgagaggactcacactggagaaaagccctttgagtgtgcagagtgcgggaaatccttcaacagaaactctcacctcattgtgcatcaaaagatccattctggggagaaaccctatgaatgtaaagaatgtggcaagactttcatcgagagtgcgtacctcatcaggcatcagaggattcatactggcgagaagccctatggctgcaaccagtgtcagaaacttttcaggaatatcgctggcctcattaggcaccagaggactcatactggtgagaagccctatgagtgtaatcagtgtggcaaagccttcagggacagctcctgtctgaccaagcaccagagaattcacactaaggagaccccatatcagtgtccagaatgtgggaagtccttcaagcagaactctcacctggcagtacatcagagactccatagcagggagggtcccagccggtgtcctcagtgtggaaaaatgttccaaaagagctcatcccttgttcgacatcaaagagcacacctgggagagcaacccatggaaacataatggttgggggccacatgagtcttccagttcactctcactcctgtgtttaggaggcgtgtcttagatctgactcctctctggtcagtagaaaagaatcctttaagctatccagtgaattgatgaatgtgagacattgctgagccacactgttaagtctgctcattggggaactccagagacaacttaggatgagggcagaaaagtctttggggatgattcagtctgtaccagacatgacaacacacacactggaatgaaatgtgcaaacatgggggtgacaccacagagagaacctgtgaatgcattcagaacatgattggaatgaagagccctgtagtagggagtttccaccttgtacgtaagcaaacactgaatcaacttttttttttttttcggacagagcgagacaccatttcaaaaaaaaagactgaaacaagcttgtgctaagatggaaagggctgcttctaacagatgtggtttgttgctttagttgttgaagcaaaaatactgagttgttatgtttatgttatcaccccaccactacctccatggttgttcatttaggatgcttctaattcagccactgtgaaccattataaaggttttattgccatgttgaaaatgtttataatatggcaaaaaggggcatcaaatagaagatttactattattccagccatgtaaaaatatgtgcacatatggatgtatgttgaaagtggatgatggagaaataaaatgtggttttctttggggactggaattttttatcatatttttttctctgttacagatacttgttggcataataatttggtaataaattaaaaagtgaagcc

SEQ ID NO: 659 - DNA, 2791 bp, Homo sapiens
catgaccaaagttacatggccaagataagctatggcctgggagtcccagactcttctgtgtgggcactttcctgggatatgctaaatgatgggaaatctgggtctcatgtttctgtgtggtcctcacctcaagcgacttctctttctgttcactctgggcttctgtgctctcattaatgtagttctcaatcttccattggtccgtatcccattctatcttggatgcctttacttcctgctgcccactgagaagcttcatcaggtggcctgtcctggagatgagcttggcacaggtcacttgcacatgggccccagagcagtccatcttcaaggtccggataacatgagcaatgagccttctcacattgttgttggggataagggactgtagctgctgggttagctgaatttcaaactgatcacctggggacgagagcaatgggtaattgaagcttttgggctcgggggacaggtcagtgcccacgttgttgtattcccattttgtctcagtttgtttaacagttggccctaagttgaatgcagtcccagcggaatctgcctcatgaggatgattgtagtttgtgttttcagagatggttccttctggcatgttagtgttttccataaaatcattttcttcaaaggcatttcttgcagttgtgtgttttgtattattcttttccataaaatgttctgaaggagcagatacttccagaaaagggttttcttgaggactcaggtctcctaaggatgaaaaagccccttgtgaaggggaatttatgaggctcttcgctgcagagaatggaagcctgtttgcgagcatcagtctactcagataacttttctttctgacctttggactctttttgactttgggtgttctgtgggtcacgtgggagcgagttttgtgaaagcggtatttttttctggcatgtacgattggtttagacgtcttcgtatttgtaactctagcctttgcactttctaaaatggaaatagcgtgggttaagtctttccatctgtctctcacctgtggtagggcttttgcagggctggaggtagaaggcgcgcccttggagaagggtttcagcacagagactgctgccttatgctcttgggtgaaggaaggcttggtgtagacggcgtttcccgctaacttctcaggcccctgctgtgtgtggggctgttccacctcccttggggctggactcccgagccttttttcttcggcagcgttctccacagatgcctgggcaccctgttccctcctgatgctctgccttcctacctctttgaagtgccttttctggatgctccttgggcccatgaggactctcttcactctctgccggttttggcctacagtttgaatctttgccaggctgtttcctgtggttggcagtttaattaacggtagtaacagtgatttcacatctaggtttaccgctgagaaataaggcaagatgtaacttagtgtactgataaaatcactctcgtcattggtgtctagctgctcactcccaaagcctgacaagttgatgccactgctgtctgagggctcctctggctcaacaatcagctcagtgcttgtgtagttcttccgggcttgtaacaccttcatgaacgctccttctggattccctaccgatgcttcttcagctgtcaaaaaagaagagactgctttgatcatgaaagatgatgggatgggatgcatcagtccatagctgtacaccccagtcacacagagtaggagtcagcaaacattcgagtgccattcagagaggagaaacacacacccaatcctaaacctatgaaatggcaacaacaaaaggagaaaatacatcttttgaaaacacggccacctacttggaacattccatagtgtgacatagagtaactctgtttaggattatttcgttgacccccagaggccaattgcccagtgctcagtcaaagcccaaggtggaagacaagtgcttccctgatgagctggcctctctgcagactgctccgtaccctgtgctgtcctgcctcagatgcagagagagcacaaggctcctgctctcctcgtcctcggtgcacctgtgttcgtgctaccatcacagctgaatgcaatgaaaggcggtcctctgagaggagcagggtggagatgctaaagtggaggccccgtcccattgctgatagatcctcatctggcatgcgctccaccctccccattctctgctcccacgtatcgtagccccatcacagaagatgcgacatggaaaaacgcactgtgtccaccctagttcttaaatttgggcagggatttggggtgtatgttaagagtttttcaaatttgccagattgtatgcctatgttgttaaatacacaatgaatccctggtatgatagcagtttctggataaacattacttgaggtcctaaaatgcagaagggaaaaagcaacttttgtcagatgcctactttgctttcatttcatctctaatattttggatggggaatcatccaaagctcctgactgcatgaaggtcaggtgtgccagtgtgcagctgggtttcttttctggaattaaaagtactttgggtggtggtgagggccagaggaagaagtaaagattgtgagaaaggggaagaaacatgggcttggggagaacccagaattggggccagaagacctggcactaggctacagcacttagcacctctgatcttgtttttcctcatctgtaaaaggaggttaacaaagcttttctgcccacttcttggggagaagggaataacataattggt

SEQ ID NO: 660 - DNA, 2782 bp, Homo sapiens
ctatcccctctgggaggtgagtcagcgcggaacctctgcatctacggcgagctttcctggcctgggcgttggactcgcagttctgccttcccaggaccctgcccttccccagaaggagcaggagaaaatgaccaagtttcaggagatggtgacattcaaggatgtggctgtggtcttcaccagggaggagctggggttgctggaccttgcccagagaaagctgtaccaagatgtgatgctggagaacttcaggaacctgctgtcagtgggctatcaacccttcaaactagatgtgatattacagttgggaaaagaagacaagcttcggatgatggagacagaaatccaaggagatgggtgttcaggacacaagaatcaaaatgagatagatacccttcaagaagtaagattaagattcctttcatatgaagaccttatatgctggcaaatatgggaacaatttacaagtaaattaaccagtaatcaagacctaataataaatcttcaaggcaagaggtccaagttgctaaaacaaggtgattccccctgtcaggtgtggacaggagaatctagtcaggtctctgaagatgagaactatgtaataaagctacaaggggagagttcaaatagcataaaaaatcaagagcttccattgaggaccacctgggatttctggaggaaaatgtatctgagagaaccacagaattatcagagtaggtgtcagcaaattgatgtaaaaaataagctctgtaaatgtgatcattgtgttaggcaaagaattgctcatcaacatgatgatcatggagtacacaaaagagagaaagcttttagccacaataattgtggaaaagactgtgtgaaggaatcatcccagcatagcataatccaatcaggagagcaaacctctgatgaaaatggaaaaggcttaagtgttggctctaatcttgaacttcaccagcaactacacttaagagacaagcctcatgtaaatgttgagtacgggaagggcataggttacagctcagggcttcccaggcatcagtgtttccatataggagagaaatgctataggaatggtgacagtggtgagggcttcagtcagggctcacatctgcaacctcatcagagagtcagcacaggagagaacctctacagatgtcaggtatatgcccggagctccaaccagaactcctgtcttccctctcatgagcttactcacccaggagagaagttgtgtacatgtggcaggtgtgggaagggcttccatcatagcttagattttgacattcactgtgtagacagtgctggagagagagcctgtaaatgtgatgtatatgataaaggcttcagtcagacatcacaacttcaagcccatcagagaggtcactctagagacaagacatacaaatgggaagtaagtgacaggatatttaataggaattctggtcttcaccagagagttcacactggagagaaaccatataaatgtgaggtatgtgataagggcttcagtaaggcctcaaatcttcaagcccatcagagaatccacactggagagaaaccctacaaatgtgatgtgtgtgataagaacttcagccgtaattcccaccttcaggcccatcagagagtccatacaggagagaaaccctacaaatgtgacacatgtgggaaggacttcagtcagatctctcatcttcaggcccatcagagagttcacacaggagagaagccatacaaatgtgagacatgtgggaagggctttagtcagagttcgcatctccaagaccatcagcaagtccatactggagagaatccctacaaatgtgatgtgtgtgggaaaggcttcagttggagttcacatcttcaagcccatcagagagtccacacaggagagaaaccatacaaatgtgaagaatgtaggaaaggcttcatctggaactcatatcttcatgttcatcagaggatccacacgggagagaaaccctataaatgtggcatgtgtggtaagagcttcagtcagacttcacatcttcaagcccatcagagagtccatactggagagaaaccatacaaatgttttgtgtgtggtaagggctttagtaagagttcgttgtcttcagattcatcagagagtccatgatggtgatgaatctattaatcatgatgagtgtgataggggtgctcttcaagacttagacttcccattttcctcagaaaatccacacagcacagaatatttataaaatgtcatgttttaagaattcatgagctgagtttttatagttatctgaattccattgaagaaaacctatttttgtatgaatatgaccagtttcaagcagagcccaaaatgtcacagttgtcaagagaacacacaacagagaaaccctataaagaatgatacaatatgtttcaatcagaaccttcacatccaataagcaatatgcaggagtgaagccttcaaaatgataagtaaggtcagaatttagcaaaagtataatgagggacatgacaaaatctgtgtccactagaatctaagctccatgcaggaacattgtttactgctgcatgatcgtgaccttgaacaagtacctaagaaatagtggcttccctggaattgtttaacttgataggaaaaatctatcatatataggacatatatttgaatattttagtgagctcagccccaattcgtcattataattgtactgggaaaaggattcttgcaagaagccttaaaatgaattcaaggaaatgacatttaattaaaacacataaaacc

SEQ ID NO: 661 - DNA, 3436 bp, Homo sapiens
gtttagattaggttggaagtcacctgggctgagctgatggctgattccgtcagcaaaaagaactgtggaacatactggcacttgggccggtgtgaagccacccccctgccatgaaaaatggctcttccctgccacagccggcccagcgggagccaggtcagggcctggagacacagcgccccccaccggagccactgcccggctttctgcaaatccaccttatggaagccggataagcacctcctcctctgatgcgtcacagtcacaggtcctggtgaggagggagccacgccaagcacagcggctggaacaggggcaagtgggtgcccaccccgaagtgcaggcaatgaacttgtgctgtagcccatggtgagctgtggggctgtttgtgactgcagcgtagccaagcccatcccgcctgatgcggcctcttcatccagagtgggggtgacgtgccagcccccacctcaccggaatgctgggaggagcgtctccacggaaggagctcactttgtcagctgtaatgtgctgtgactatcgtaaagttccttccgggtgcagagtgatacatgaaccctggggactcactccaacttggtattgattttctccacggaggacccagcagtcacggcccgtgtctgcacagccccttggatcctgcggaggaattcagccggcccctccccctgtgccgaaaaccacggaggcaaagccaggccagggtacagtgagaacacgggagaggactgagagaccgctggctgccgagggaggaagagcaggattcgcacccccgtcatcgctgggcccacacgccgccgacagcttccgcgtgtggccatctgtctttcagaaaccctctggcagagggacccagcagatgacacgggggccgttcacactctgaaacctgcctggagtcaaaacactgctggcgagcctccaccgcaaacccaatccagatggtcttccctggtggccctcggggtggcgggcaccctgcccactccctgccagcccctgcccgctggactccaggcccggccgagcccccgaccggtcgcctgacccagcatgctgctctcccctgggcccggctttctcgcccgctgggactcccaggcccctccagcccagccccgagagcaggagccccaagggaggcttggcggctgtggaggcgagtgggccacgtgtagctgggaggccggcaggaccaggagcccctcacagcgcagcacccacagcatcacgagccacttccactcctgggtggcctgggggcccccaccctgctctgagctgccccttgttgtgacctggggtcccccgtggtgggcccgccccttgcgcctgggatccagcctcagcgaggctccagaagtgtcgtctccgccggccaggcgtcagcgcctccacccaggatcacacactcctatctctgcacttctgccctccatcctgctccacgccgcctctgcttgttattccagcacattccagggtgatgcctgctgaagccacgcagccagtgcctccaccctaccccccatctgacccaccggccccttccgcacgctggaagcctgcccggcctgaagtgtcctcacctgtcgccctatcctcccctccactccagcccaccggtgactcagccctcacagctccctcctccccgagggagccggtgacttggctctgatggtgccgggacccagccccggcatgttcagaatccttgtcctttaacctgcgtccacatgtagtcgcctccacctccctgcctgaacctccaggccctgcagagcaaacactgctgcctgcaggagacccctggggccttctccgtcccctcatcctcctaaggagcctcccctgccaccgtgccagaatgtgccggaggaacagaggcccgagcctcccgtggccccagcgaggcttcctctggggaagacagtgagcccaacgccctggctctcgaggggtggacggagtccagctggcatcgaccgggtgcccctcttcaccggtgtccacagtccttgagagcaaaggtggtcccagcagtggagcagagggcaagggtggggcatgtagagtctccagggagccactgttggttagagagggagcccgaagtgggctccggaccccagcagggacagcgtccccttccagcgggggcagccgattgatctgggcacacgagcaggaggagcggcgccacccagggctgacctcacggccctgctcacgtctcggggcattttggcagacccacctagacctgggggacagcctgatttcctgcagccatgacctacaagggtggcagctctctcaggcttgagtaaccaggacacagacctgggccatttaatgcgcaggcagccccaagtcccggcagggccagaagcagagacggcggctggggatgaaagtgcacgctggtcccagatggggctgggggtgaaagctgcatactgatccctgggccccctcactctatgagctcctgaaaggagggaagcccccacaccctactgagtggagtgctccttggcctgggaccccgtccagtgtctgctgctgtgggggcgggctctgggcagagagaggccagacaggcacccaggaaagctggaacacatccctcctgcttcccccagggttcccagaggcgacttccctcctgccaggcatttgtcatccttaccctctaggacagctttgccgtgtgcagtgaacccctggacagtgttgcgtgccactttgccggatttggactgtatacagaccgaagcatgtggcatgaagccttctgctgtcagcaagttccttgtccctcgacagtatgtgcccaggctgcccttcaaggtggcagtgatggcagttgtctcttgcacgctgcgtacagttctgtcactgactcttacacacagccctggagacgggagagtgccgggagcattctatgcaagtgtcctggcctttgcgggcgtctccacagcacaaacacgagtcagggaccacccctcttctgcttccatgattccaccaactgggtggggcagagcagtgccagggccggaggcacgccccaggtgagggcaggtggccatgccagtgagtgcactgcgttctcagttaattcatccgaaatatttctaagtttcttgattattgcagttgcatccccaagataatgccgccctcaccaagtagaaggcacatgtgctctgatggcccctcccacactggggtcagggcacagcaacttagcgaggcgacgtgggggctcagaggacctcggaccaggctcggcacatggggcttctccagccagccagggggaagcaccctgcagactgctaacttttgcaaaatagagtaaaaaagatcagctagaaaaataaaacaaaaaaggaaagat

SEQ ID NO: 662 - DNA, 3816 bp, Homo sapiens
ttattttagaatcactttagatttatagaaaagttgcagagatagaacagagttcctgtaagcccccacctagttgcctaagttgttaacatcttatattttaccgtgatgtgtttgtcaaaactaagacactcaccctgatacgttactattagtctgaaacactagaatggatttggatttcctgttgttccagtcacagcctctttctctaccaggaccccatcgagaggtccacattacatgtaaggtcacatctccccagtgtcttctgcttttcttcttagtcttttctgacttctcatgaccttgacagttgaggagcgctggccaggtatcttgtagaatgtcacccaatttaggtttgtcccccagtttaggtttgtctgatgcttttcttaggactatcctggggttgtgggtttttagaaagaataccccaggcaaagtgcccttctcatcacatctattggggttacatgctagccacgtgatttcaagctgatgttaacctccaccacgtggttaagatagtgttggccaggtctctccactgtaaagttactcttttccctttccctgctcctcaggaggaagtgagtaaccaagtctagaccaccctaggcttaggagatgcagagtggacaagaattaagctccttctatgggagggggatataactacctacattgtttggaattcttctggaaggaagatttatctccccccccccattgatgtattgattcattgatttattggctgatttgttttaattgaagctttattttttattattactttttgagacgcagtttcgctcttgttgcctaggctggagtgcaatggcgcatctccgcctcccaggttcaaaccattctcctgccttcagcctcccaagtagctgggattgcgggcatgcgccaccatgcccggctaattttgtgtttttagtagagacggggtttctccatgttggtcaggctggtctcgaactcccaacctcaggtgatccgcctgcttcggcctcccaaagtgctgggattacaggcatgagccaccgcacctcgccgaagttttatttttatcaatggaatacatgtatgtagtttgcaaagttaaggcttataggggaaaagaatagctacctaaagtcttactgttatttctgttggtacttctaaataacatgcttacttttccatgtgtacgtttttccgttttatattgggttggatcatatgaaattgccagtattcaaccatttttttatctgcaaaactggcaatttcatatggtccaacctaataacctaatctttttcttcctgcttcttgtccagatgattattgtgtgacatggagttgcttcgttttgattgttgtggattgtgactgcacctgcccctcagctgacctggttcagggatcagcctctgagctcagcccctgctttgggctcctcctgcccagatggcatctcgggcctgggtgagaaagggctgcagggtatgaggtcagcctttgctgtgatcactgccccccagtgggccagcctggagctgccagctgggcagctgggggcagggcctcgggggctgcctgagctctgtctgctttgctgacgctgtgaccaatctcgtgctcatcagtgatctgggccccaggcagaccacctttctgggtccatggccattagtccagtgctccaggtgtagccttaggccaaccattgaaccctttgagtctcagtttccccatctgtttaagatgaggattgttcaaccttccagatgggcttctgtggtgatagaatggcaggtacttgtcctgaggccatcagagctgctggtgacaggacaccttcctgaactcctccaggcgcctctgatctctccttagctgctgttgtgttaccttcaggtcagtgagaagctgcccaggacagggtctggaggtctagatcccaggcttagctcaacctgtcttgccccaagaccatagccaagtgctctgtgcctcagtctccccatctgtgccaggtggttggtgccaatcctctgaggcctccaggtgcctgagagctgcggtgtctgtagtgtgagcccctgtcccctcatccttctctgaggctgggccctgcccaacctgctccagggaccagtggtcttgggaagcttgggctgactgggattgcagactccgggtctggtgtatagggcccttggcaaatccctattcctttctgggcctccttgaagagacagtgggctgagcttctaggctccctttgattcttctgtgtgtggcccagaatgggacagacagactgagctgggcacagaaataccatagtgacagaaccattcgaagaccctgccctgatggaggccccgggccaggggaggaggcacagtcaggctgtcagctgaatggaaaattacactttcgatgagtctgttatcgagtagagattagtggggccaagaactaatctggggggcaagtgatccttcctgagccctgaagagtaagcagctgtcaactagatgaacggggagagaacattccaggcagaagaaacagtaaagatcctgccgtggggtgaggtggagccgggagagggcggacagggaccctaacaaggtctcagagcacgagggagttcgagctttgccctaaggcttgggaagcctttggaggatttgaaggctggaagtaacaccatcagatgtgggttttgaaaagctccctctggctgccagggagaatggggtgggcacgggtttgagagcagggagcccaaggaccaagctttgctgttgtttaggagatgagatgacagtggctctgtccagagtagtgactgtggggatggatccaaagggtggatttgagtttagggggaattgacaggtcatggtggctcgatgtatgagagaagtgtcagggcaattttgtggcctgggcacctggctggaagatgggggcatggatgctgagtgggagaagtgtatttgacagagggaaggtgaggagtttgatgtggacctggctgggatggaagtggctgtgggaggatggggcagaggcctctggttgcacaggcaccaggctggcattcgaggccagagcctgggatggaggtgtagaccatgggtgggggcagggggagtccaggcagcttctgagaggccagaccttgcagggtcaattatgggccctgaggtgggggccctgaggagggcctctccagtgattgtgatccagagccaggcaggggcgttcctgtcttccaacaccacctgccagcagttcagggatcctgggtttagggggaggtacccagcagcgcctcacaccctctctctccccccagatcctgctcatctctgattacttctatgccttcctgcggcgggagtactacctcacacatggcctctacttgaccgccaaggatggcacagaggccatgctcgtgctcaagtaggcctggctggcacagggctgcatggacctcagggggctgtggggccagaagctgggccaagccctccagccagagttgccagcaggcgagtgcttgggcagaagaggttcgagtccagggtcacaagtctctggtaccaaaagggacccatggctgactgacagcaaggcctatggggaagaactgggagctccccaacttggacccccaccttgtggctctgcacaccaaggagccccctcccagacaggaaggagaagaggcaggtgagcagggcttgttagattgtggctacttaataaatgttttttgttatgaagtct

SEQ ID NO: 663 - DNA, 3424 bp, Homo sapiens
attgtaatgtagcacttactttaaaagtataaatcatccactgtatcttctatttctaccacattttgcacattcaacagaatttatatgttgtaataggaattatctgatcaattacactcttatatataatttcctacaaaaatatttcagaaattctatttaagaaagctagtggacaatcagtgtatgtttacaattgtttatacactgttctccaaaggtaccttatccttccaaagatcccctctgtagagtcatgcgaactacagtttggaacttgggacttagcccgttggtgtaaaagtataaatcaggtatttgtattaaattgattaaaatgtgtaaaatcaattttcgtttttatgtgttatagggtcaagttggtatctttttcaaagctctttaagatttttttggtttttagtttggaaatggctgtttttaattttctttgtctgatttttatttctaggttaattaacagcaagtgtttctttatggttttctttgtttgcatcttaattacatgtcataacgttgcttcattagtagcaaatagagcagagatacagcagagagaataaagaattagggcctccttttgggtttctgtgattattgagcataactgatgagagaatgacagtattggtgactagcttttttgtttttaaataacacactttaaaatgccacagtgttatttgaaagcttaaaggcattttctcatcttcagtgtttgctttttatcagttgtagaaaagaaccttagtgttttcttctctacctatgtatgcttatgaaaccgctctacctacatatgaaacttctctacctatgtatgtttacgaaaagagatgtatttgccaagaaaatcttgattatataaaagacaaaaagattataaaagacagtttctgtttaagtaaaactgtctttgaaacttaagaaagcttaagttttaaaaaaatctcagttaaacatcattggtttatttgacttactgttaactcttgcttctctttgactccatggtgtttttagataaccatgtatgaactttatgttaatggtttgtgggatactaaaatagcttgaagatgacttgatgactgtgcattttatatagttttattctcctaaaatctcaggagggcagcaagtgctgtcaacgattatatagtgatgagatttttatgggaatgatttcttcttggtgcgttttacacatttgtactgatagcaaaactaaagtttaaagcagcaaagtttaagttctccttaaatcctacagaaaccaaccttttaaggacataatttcatctaaaacatgacgatatttagcacaccttttaatgtgggtatatatcaagtgtttaaggactggctagtatgtgatagagcaagacctgagactttataagtatttgctcgtgtctgttgacagacctctttctttcaaacttgttagaagagtggtaagacatatccaattggaaaataagatgcagtgttgtatagcacatacatttaaagtgcttgcgttaaaattagtttctcaataagataaaattattttaaaaatttggttcactttattacaatagtggcaatttagcttttcagtattacaggaatttaaaaattggtttcttgtaggggacatctcaactttgggaatatcttcacttaatttttaaaaaatattttcatgctttattgtccagctatacaatatatcgcaaaatcctgacaagttcattgtattaaggtattaactattacatggaaagcaattctgttcatcttttgatgtttgtgttgaaaatgcttatctttgtgttttgatcttccaacagctgagagcttgaactgatttaaacatttgtcaatatacttaagaatgctttaagtaaagaaggggaaaattttaagtaagttttttcccttctaggaagaaaaactatgatgatgttaagaaaatgtcattatagagcttgctcaataatatgttctttaaatccacctccatttgtacattataggtatcattctgtttttgcttaaaataatctgcaaccatttcagatagttttacagcaaattgatctaaaagccactaataaattctagggtttgagtctagaagccaagcaaactgtcaccaatgtcagttgtaaattagaatgcaacatgaggcttcagactcatgacaatgatatacatgaaaacaaaaatataattgtgtctaccttcctactttcccttttgacatatgtagttggaattttacatagtcttaaaatccatatttagaatcttacctgtttctataataattagtaaaatgccaaagtagtgatagaatattgtggcattgaagtagccgaaaaattgttagttttagcatcaaaaaagtaaatagatgttgaaatgaatttttgtatgtgccaggttgaagagagtgtgccagtgacaggaagtagtctaaaaaattaacagttatggttttaataggatctgaaagacaatctttaaagaaatgggagaaattgggggtatcagtgaacctataccaacctctctttgtacataaatgtggtgatgtagctagatataaaaatcagtgtcttactggcaccatttacagtttagaaaacaatctttttcttaaaaatgcccatctgatttctatttttaggagctacttggatttgtatgtattttttctacgtgaaaatatatgtactcttcacttttgttccagtactataattgctcatgcactctttctcccctttgagaacattcagtgaaatacaacttcatcaaagatttgctcaaaggagaagaatcgcatgagtgtgaaaagtagatgctcgtagccagaacagaaaaggttacacatgatcatggcacagaagataggaggtttgacttggtgggccataatgtttattatcctttttgaaataacagggaccagcagcagttttctcaggataaatgctctaccccacttctctatgaacaggtgtggggaggcttactttccattttcatatttatacacctctctacaaaagcaatttttaatgaaggttagtggaattgttaaaaatctgagaggaatgatgactggaggtgtttggggtttttttctgtattcattttttaatgagaaaagttttaaatgtagtacaggttagacccaactactaccttactattataggacgattctatgtttctgttaaagtattcaagtagctttctctgggggaaaaagtaccacttggacacttaaaggaattgggatttttgtctactttggataaggcagttgacttcttaagtaaaagcaatagtgtaaaatgtcattttgtttggaatgttaagtgagcaaataaaaaacatgttg

SEQ ID NO: 664 - DNA, 2956 bp, Homo sapiens
ttcttaaggcccaaatttttgtttttaagcaaaaggatagctctaagtgtgggttgcagttactggacataaatattcactaaatgagattcctttggttatggctgttcatagaattttaattctatgtcagtgttcttgttcactaagatatttcgaagtgagagaaagcattttaccaatacattcttattttttctcctttaaaataatattgaatttttcctggtacgaagacagatatttattaacttgattggaaaacacagaaattaagatcatgttgaacactgagttatctagatgatccctgagatttgaatgttcatgtcaaccgtgttgagcgctcaccagccaccaggctttaggcactggcagtgcaaggtgtctgaggcccattctcaggctgggcagaggtcacacagtgagtaaatgggtcttttcagtgcaatgtggttatgatagaggcatgccagggtgccactaacccagcaggtgtggcaggaggggcttcacagaggaaagggactttgagctcagtgttaaaggatgaggagtgagtcataagggggaaaaatggaaatgactttccaggcttcagaaacagcataaacaaacaaaggcctgagagctggagtcagtgtggtgtgtccagggatcacaagtgggctggagctgccggagaacagccaagtggctcagctgccatcccagaattgagctcgtcactatcagatgctgctgctccctggcctcagaggaaagcagcacacagctcaccacgaggggtttccccagaggctcctcctgcagccaatgctactattagtttatattataatagtatcagtttctttttctttggaaatccctagaactgttaactgaaggtgactcagggtaactaattctggatctttgggtgcacagcctctcactggagtctgagaggaggaggtggagactatcagtgcacggcccgcaaccaggaaggactcccagactaacgccaaaggtgtgttgggctcagctgctccactgtggaaaaggaaagccctggccctgtggcaggagaggattgttctagtcaagtgtggcgttgcacggacaggcggtgccgagtgtttgggtgcagacacaggcagctgctgccctccacttcctgctcttgcaagtcacagatgattccagtacaatgtgggaggtcctccttacaggggcacttgcaacaggaaggcagagagtttcgtcaattcaggtacaggtctgtctgggagacctggccctgtggaggcaggaacaccgtgcaggggcatggcagcgcctgtctttgctatcacatcatttgccttttccttgtaggacccaaagatctatgtccaaaacttagtccagaaacatctgcattcctgtttaaacttcagctcagtttcttaaccaagaaccacgtcaaccctccagggttgtggtttgtatttttgcctttaagcattatctcctttccaccaagaagcctacttaggtttaacacatgaaagcagtgtctaaaaattagatcggtcctaaattggaatgggatgtcttccttgcatgtcccataccagggaattttttttaacacacagtgtggagcctttgccagagatgttgaaagggagattaaaggcttgagggatgaatttgatcatcattcttaaagtcccttccaatcctgtgattctctgattccctgagtctcgtttattattggacatgcctagcccatcaccagtgacctgcccgcatattgctggcttcccttggataacggagagcctatcaccacatgcctttgttgtcttccatcatatcaagtgagttgctttctggactttttccatctagagcctgctaggtttggttttgagaaaagatggtgaagtttcttttcatgagtttgtagggcaaaaaaaaaattctttttaaagatggtaagggtggaaattaatcatggtaccatctcattaaaaatagatacctcaaaatgtttacctttacaagtcaagaagagtatctgactttcttggaagtgtcaagaattgcaggttggctgaaaagttagattgagaatctgaccttgttacttatgattcttttttcccttggttctcggggatgcatgagaaggtgagctgtcactcacaaaaaaagggaaaatgatttgaaaaatgtttcacatatacactttttatcattttagtggatggcagccttacgtcagtagtatatgccactatgaagtatggccaaaaccctagcgtcacttgtaaccattgtactcttatggatttgtgtcttacaccatttgccttgctttttaaatgactttgtttttcaaggtgctgtcattttgcaaaaggaaatctttatatgaaatgtacaaaaaccgttactaattggacaacagggaaggtgctggccccacattagtgcctgcccactgctctacttctaaccagggacacggatcttccattctctacatccaccggactgcagcccaagtctggacctggctgcagtgggcatattaccgtatggatatctttttctttctttttttaaagtgaggagattcttcagggggtcaggctgagaatgtaataagcctgacattggaacagatttctcccgtgtggtctagctggacccctccggcatttgccacactccctgccagtcctgacattgacttcctgaatgtgatcaggtggtaatgagcaagaatttcctaggatgttgaaacatctgtatccaggcccccaatcaaatgctgctgaatattgtgaatgtttttactccgctcactttcccactgtgctttcctctaaccaaaatatacgtgtagccattaccaatgtacaactctcaatgcggagttgccgccacggtttaaaataaatctctgtgaaaacct

SEQ ID NO: 665 - DNA, 3023 bp, Homo sapiens
ggccacccagcaaccaaagactccgagatgtgcaaattcagcccagccgactgggaaaggttgaaaggaaatcaggacaaaaagccaaagtcggtcaccctggaggaggccattgcagaacagaacgaaagtgagagatgcgagtatagtgttggaaacaagcaccgtgatccctttgaagccccagaggacaaagatcttcctgtggagaagtactttgtggagaggcagcctgtgagcgagcctcccgcagaccaggtggcctcggacatgcctcacagccccaccctccgggtggacaggaaacgcaaagtctcaggtgacagcagccacactgagaccactgcggaggaggtgccagaggaccctctgctgaaagccaaacgccgacgagtctctaaagatgactggcctgagagggaaatgacaaacagttcctctaaccacttagaagacccacattatagtgagctgaccaacctgaaggtgtgcattgaattaacagggctccatcctaaaaaacaacgccacttgctgcaccttagagaacgatgggagcagcaggtgtcggcagcagatggcaaacctggccggcaaagcaggaaggaagtgacccaggccactcagcctgaggccattcctcaggggactaacatcactgaagagaaacctggcaggaaaagggcagaggccaaaggcaacagaagctggtcggaagagtctcttaaacccagtgacaatgaacaaggcttgcctgtgttctccggctctccgcccatgaagagtctttcatccaccagtgcaggcggcaaaaagcaggctcagccaagctgcgcaccagcctccaggccgcctgccaaacagcagaaaattaaagaaaaccagaagacagatgtgctgtgtgcagacgaagaagaggattgccaggctgcctccctgctgcagaaatacaccgacaacagcgagaagccatccgggaagagactgtgcaaaaccaaacacttgatccctcaggagtccaggcggggattgccactgacaggggaatactacgtggagaatgccgatggcaaggtgactgtccggagattcagaaagcggccggagcccagttcggactatgatctgtcaccagccaagcaggagccaaagcccttcgaccgcttgcagcaactgctaccagcctcccagtccacacagctgccatgctcaagttcccctcaggagaccacccagtctcgccctatgccgccggaagcacggagacttattgtcaataagaacgctggcgagacccttctgcagcgggcagccaggcttggctatgaggaagtggtcctgtactgcttagagaacaagatttgtgatgtaaatcatcgggacaacgcaggttactgcgccctgcatgaagcttgtgctaggggctggctcaacattgtgcgacacctccttgaatatggcgctgatgtcaactgtagtgcccaggatggaaccaggcctctgcacgatgctgttgagaacgatcacttggaaattgtccgactacttctctcttatggtgctgaccccaccttggctacgtactcaggtagaaccatcatgaaaatgacccacagtgaacttatggaaaagttcttaacagattatttaaatgacctccagggtcgcaatgatgatgacgccagtggcacttgggacttctatggcagctctgtttgtgaaccagatgatgaaagtggctatgatgttttagccaaccccccaggaccagaagaccaggatgatgatgacgatgcctatagcgatgtgtttgaatttgaattttcagagacccccctcttaccgtgttataacatccaagtatctgtggctcaggggccacgaaactggctactgctttcggatgtccttaagaaattgaaaatgtcctcccgcatatttcgctgcaattttccaaacgtggaaattgtcaccattgcagaggcagaattttatcggcaggtttctgcaagtctcttgttctcttgctccaaagacctggaagccttcaaccctgaaagtaaggagctgttagatctggtggaattcacgaacgaaattcagactctgctgggctcctctgtggagtggctccaccccagtgatctggcctcagacaactactggtgagcaagctggacccaccatgtacagtgtgttatagtgttaatccttgtgcatatgtgtcataatacaactatttctgtaaagaaaggacactattacatatgaaaatatctcttctttatataagagaaattactccagtcagaaggacttagaaacatgtttttttccttttaaacttttaagtcagtttttatgaagttgttataatgtttctttacttttcaatgcacacatgctttgggatacgtttgtttttacttggaacatttgtttcttttcttttttaaggagaaaaaaaaatgagtaaaaggagctccacactttgacttaatttcatacaaagctctgatgacaggccatgactgtagagtggtcagaactgtgtggttggtttgagggagcgaattcggggaaggcacttggtgatataactttgttttgtttacagagtacctgctcgggccaggtaaatgctattggatgtaatccagtagtgtgtaatataaattcaaaccatatccacacacaacaactaattgtatgaaacttttatatcctaatttaaaagctgtgaaattagttttcacgcatcaaaccggattgtttatatgtttaaacattttatgctcttatttaaagaagactttgagctatttttttctgtaccctgtaaaatattgaaaactaacataatatgttgaggttgcttggaaatgtacataaaactaaaattttctgaatcgtgtgtttatgtttgaaatctgtgttttaactttgtaagtaaattctctgcctttgtatttatattttacaaaaattttcttaaaaggcaataaaactgttgaggaaaggag

SEQ ID NO: 666 - DNA, 3692 bp, Homo sapiens
ttctgcctgtgacaggtgctttctttgtgaccttgcacaagcttctgaacttgtctcctatataaagagtgtgagtttaatatcagtgtccctcacagaactgttagaaggatgaaatgacatacctgtaaagcagaaagcacagtggtaaagtacatacttattattttactaatctttaactgtattttaatttggaacaattaagggctcaaatggtggtggtcagagaggtattttatcctaagtttcaaacttcagaaaatgctcatcaaaatccaccactatagtttcgcatatgtaaaacttagagaagaatgtacagatattgtggtacattggatacagtcacctcgcattgttggtatttctttagaaaaactatttttttcaataatcaggagaaaaatatcttataaggtgattcctttgctaactaaatgaacggcattttctactggttaacatagtttagtatataatctatctggtgaaatttatctattggattttagaattttactgtttttagtagaacattttcacccatgctgtacttgagagtattgtgtcttaatttcattagaaagacacatttttttcgtaatggtaggaagagagacggctgattcaacagatgaagtgagtcatcttaaattctggtggtaatagaccttgccagtaaatgaatatcttcttttttataccacagttaactacccaaactctaaatcacctcatatttactgtgagtgtgaataaaatgaccaggaaaacaactccacgtgtaatgcctagagatttgaactgttgagtatttaccatttgtaccctgactttgttggtgtatgtccttttatgcctttgactatgaatgtgtctctgctttaccctacgaaagtgtttctgaaattgttttatgaataacaattacttaattctgcaaggtgattttggtttttaactcagtatatcatgtccatcttttcatatcattacacaaaattgcctctttttatgactaaattgtaccatcgtttaaaaatttaaccagttttctgttgatggaacctctggctcttcttaagtatcttgcacatgtgagcatatttgtaggatactgcctaggtgtgaaattgctgggcaaaagagatgtatctgcatttttttttaagagatgatatcttgctatgttgtccaggatggcctcaaactcctgggctcaagcaatcctcccacctcagtctcttgtgtagctggaagtaccttcgtgtgccagcaccaccactccagctaattttattttttgtagagatggggtctcacttgtagtggcccaggctgctctcaaactcctggcttcaagtgctcctcgtaccttggcctccaaagtgctaggatgatgggcataagccactctgcccagcccaagtttaccacttttaagcttttgcacacctctttgtctctaaagaaatacccttatactgctcattttttattttccaacttaagttactttgctatggatgtcctgccattttggagatgtggttaaattacttccaccatattcttcctccacaccaaggcagggttttgaatctccttgtcaagtttatacttctgtaatttttttaaccttttaaaacacaattcctactggaattgaattaaattcataaagtaattttggtcacatgccagggataaaaaataatgtgttctgacatcgcaccagttgatgttcaataattaatgttcaatgttatttccttttcctttttttttttttttttttgagacagggtcttgctctgtcacccaggctggagtgcagtagcacgatcatagctcactgcagtctcagtctcccgggctcaaggggtattcattgttactgagttgattagtgtttctgggcttatttggtagacacagcacattttctaagagaaatagctcgtactggcattttcaattcaaatttgggattactaagattttatttaaccacttgtatttttatatcttttacctctcatgtgaaaactcttggttcctgttgacagttactctaaatttgatttttatacatcccacaaagcattatattaccctgcttttaaaagtcactgctctaagtatgtttcctgccagccagataaacagtgagtttcacttatttcattttgcttttgctttttttctgaagagacttttaagggattactttataacaataggaatgattcatacgataggatatctaaactacaaggatgtactacagtttatttaaccagacactctctagatccaatagatatttgaattatttccaatgttgtgcttttgaaatagtgctacaatgtagatctttgtgtagacatttcatatgcttgccagtatatctttgaggtaggaggacgccggacccgactgctcgagggatgaaggggggtcccccgagggcgcaagccccagcactgcctccgagatggaggaggagaagtcgattctccggcaacgacgctgtctgccccaggagccgcccggctcagccacagatgcctgaggacctcgacaggggtcacagagatcgcgtacttcccaaggtaataaaatatcacaaaggaaatggaggcagggcgagatcacagaaccataggacctgggcaaaattaaaattgctaattaagtttcgggcacacattgtcattgataacatcttatcaggagatggggttttagagcagaccactggtctgaccaaaatttattaggcaggaatttcctcatcctaataagcctgggagcactacgggagaccggggcttatttcctcccttagctatgactgtaaaagacagccgtccccaaagtggccatttcagaggcctccccttagggacacattctctttctcagggatgttacttgctgagaaaaagaattcagcgatatttctcctatttgcttttgaaagaagagaaatatggctctgttccaccaggctcacaggcagccagagtttaaggtcatctcctttgttgtctgaacattgctgttatcctgttcttttttcaaggtgcccagatttcatattgtttaaacaatttgtgcaattaacacaattatcacagggtcctgaggcgacattcatcctcagcttatgaagatgatgggattaagagattaaagtaaagacaggcataggaaatcacaagagtattgattggggaagtgataagtgtgcatgaagtcttcacaatttatgttcagagattgcagtaaagacaggcataataaattataaaagtattaatttggggaactaataaatgtccatgaaatcttcacaatttatgttcttctgccatggcttcagccggtccctccgtttggggtccctgacttcctgcaacagccagtagaaagtaaatgaatatgtgcttttgctagacactcctacacacccctctttattggttatttcctcagagactcacttttacagtatgatattaaacatcccgatttttcccagtagaacaggtggaaacatataactcagtatggttttaatttgcaaaaagaaataatttttattctaaaataccaaggattatattaactgaggtaaaatatttaaagctcagcattatgaaatgtctttgcatacccataac

SEQ ID NO: 667 - DNA, 2777 bp, Homo sapiens
ttgtaaaagagctaccttttcccacgagttggagcctgaggtgcggagtttcgtgagtttttactgactcgagatgggtctaggaaagacaatccaggcaattggaattacttacttctataaagaggaatggcctctgttaatagtggtcccttcgtctctgaggtacccttggacagaagaaattgaaaaatggatcccagagctaagtccagaagaaatcaatgttattcagaataaaactgatgttaggagaatgtcgaccagtaaagtgacagttctgggttatggtctcttaaccgcagatgcaaagactttgatagatgcactgaataatcagaacttcaaagtagttatagtggatgaatcacactacatgaaatccagaaatgcaactcgcagcaggattttattgccaatagtacagaaagccagacgagccattcttcttacaggaacaccagctttaggaaggcctgaagagctttttatgcagattgaagctctctttccacaaaaatttggaagatggaccgactatgcaaaaagatactgtaatgcacacatcagatattttggtaaaagacctcagtgggattgtagaggggcatcaaatcttaatgaacttcaccagctattaagtgacataatgattagaagattaaagactgaagttttaacccagctaccccctaaagtcagacagcgtattccatttgatcttccatcagcagctgccaaggaattgaataccagctttgaagagtgggaaaaaataatgagaactccaaattcaggtgccatggagacagtcatggggttgataactcgcatgtttaaacaaactgctattgccaaggcaggtgctgtaaaggattatattaagatgatgcttcagaatgattcgcttaaatttctggtttttgctcaccatttaagcatgctccaagcttgcacagaagcagtcatcgaaaataagactcgttacactaggatagatggaagtgtttcatcttcagaaagaatacatctggttaatcagtttcaaaaggatcctgacactcgcgtggctatcctaagcattcaggctgctggccaggacctgtatgacaaggtggcctgggggaaaagaactcttgtctcaggactttttatggagtgcttctgttttgtcccttaggattaagtttgaagggattaacatttactgcagcaagtcatgttgtatttgctgagttgtactgggaccctggacatataaaacaagcaaatgacagttctgaggagttaaggaaggaagctttgttcactcacttcgaaaaagaaaaacagcatgatattcgatcattttttgtaccacaacctaaaaaaagacagttgatgacctcctgtgacaaatcaaagagattccgggaggaaaatactgtagtgtcatcagaccctacaaaaacagctgcaagagatatcatcgattatgaaagtgatgttgaacctgaaacgaaaagattgaaattggctgcctcggaagaccactgcagtccgtcggaagagacaccatcccagtccaagcaaatccgaactccactcgtggaaagtgtacaggaggccaaggcccagttaaccactccagcctttcctgtagagggctggcaatgtagtctctgcacctatatcaataattcagtgttaccttattgtgaaatgtgtgagactcctcaaggcagtgctgttatgcaaatagatagcctcaaccatatccaggataaaaacgagaaggatgattctcagaaagacacctccaaaaaggttcaaactatctcagactgtgaaaaacaagcccttgcacagtcagaacctggccagttggctgacagcaaggaagaaacaccaaaaattgagaaagaagacggacttacatcccagccaggtaatgaacagtggaagagttcagacactttgccagtgtatgacaccttaatgttctgtgcaagtaggaatactgactggattcacatctatactaaggatggaaaacagatgagctgtaatttcattcctctggatataaaattagacctttgggaagatttaccagcaagctttcagctgaaacaatatcgctcactgattttgagatttgttcgagaatggagtagtctaactgccatgaagcaaaggataatcaggaaaagtggacagctattctgtagcccaattcttgctttggaagagatcacaaagcaacaaaccaaacaaaattgcaccaaaagatacataaccaaagaagatgttgccgtagcctcaatggacaaagtgaagaatgttgggggccatgtccgtctgatcacaaaggagtccaggccacgggatcctttcacaaaaaaacttcttgaagatggagcctgtgtcccgtttctaaatccatacacagtccaggcagatctcactgtgaagccctctacatccaaaggctatttgcaagctgtggataatgaaggaaatccactttgccttcgctgtcagcaacccacttgccagactaagcaagcatgtaaagcgaactcttgggattcacggttttgctctctgaaatgtcaggaagagttttggattcgatctaataacagttacctgagagccaaagtatttgaaactgaacatggtgtgtgtcagctctgtaatgtgaacgcacaagaactctttttacgtctgagagatgcccctaaaagtcagaggaagaatcttctgtatgctacctggacttcaaagctcccatt

SEQ ID NO: 668 - DNA, 2646 bp, Homo sapiens
atacaccagaagaaggccaacaccaacacggacctgaggctggcagctgccaatggagccctcctgagacaccgggtgctgctgggggtgacagacacagtggaaggatgccagagtgtgattcagctttggtttgtctacttcgacctggagaactgtgtgcagtttttgtctgatcatgttcaagaaatgaagactagccaagagtccttgctgagaagcagattgagccagttgtgtgttgtcatggagactggggtgagccctgcaacagcggaggggcctgagaacttggaggatgctcctctcctgcccggcaattcttgtcctaacgagaggccactcatgcagactgagcttcatcagcttgttcctgaggctgagccggaggaaatggcccgccagctgctggcagtgtttggcggctactacatccggcttctagtgacctcccagctccctcaggcaatggggacacgacacacgaactctccgagaattccatgcccctgccagctcatagaagcctacatcctaggcacagggtgctgcccgttcctggcgaggtgacctagggatgaaggtactcatcttccttcaagactgagcagtcaggaaggcttcaggagcccaagatggccaatggggagccccaggtgaggagagaagcatctgggggcactccaaaaggggcctgtgatgtcagccactggggtgttgtgctcacttcagggcccagcacaaaaatccttgtttgacatctcatgctgaccccctggcctttgcagaagctgatggttacagagctagtcccaccaaagctactctctctgctgcttagaactgtggacacgtatggaaagactggacccccattgctttcattgttcagagaacccaggagacatgaagatgaccagactgggcaaattatgtgtccaaaacttggcctcagatgatgtttccatctccaaccccttcatgccagatggggaaactgaggctcagagaggatactgctctatgtggcattgccttgaacccctaaaattatcagacttcctttttccaatataaagaaaaaaagtaagttttcagaattctctcaatttttaagtttttctcccccatattttgtgaaaagcagtggtatgtgtacgtgttgtctaccagtacacaggctgcagaagacagagacagaagaaagagatcaagggcagataactgttgataggaatatttgagaaagattgatcctgtttgacttgaggacttattttgttcacaggcatgcacgcttgtggttgtggttttatattacagatgtagaacaatggttatgtttcccgacatgaacattgtcctggaatgaagtgtgatcagccacttgtggaattctttgaagagctcagaggcttccaagtgatctgctcctgaacaagtttgaagacctattgtttcatagacccaagaccaaacgcatctaaaggatccccagcccccaagacctagcctttgtctgcgattttggcttcatctcccacaaaacccctttatgagttcacgctctttcctggactgacatacctattcctttccatttgttggactcctattcatgcttcaaagtccagctttcttaagcccttctttaggaagccttcccacacagccaaccctgctgctctctgcctcctttaaattcttgatacagctgctgcttgttctgatgttttatggtattgattctgttttcctgtgtatatgccagtttttctagctagactgtaaactccttaaggacagagactacaccttgtactttttgtgcatgacctggacctgctaaggaaaaaaaaatcttgtggattgattgctttgccatccccacagcagcttttgcaaattgctttccaaactcacttgaatgatgacattgctgtggacctgggttctggacctgatctgccacttcaagctgtgtaatttttggcaagttgctttctttgcctggtcctcagtttgcccatcaatataatgggtggattggatgatttttttttttttaattgagatggagtcttgcactgtcacccaggctggagtgcagtggcgcgatcttggctcactgcaacccccgccacctaggttcaagtgattctcatgcctcagcctcccaagtagctgggactacaggtgtgcaccactactcctggatatttttttgtgtttttagtagagatggggtttcgccatgttggccaagctggtcttgaactcctgacctcaggtgatccacccgcctcgggctcccaaagtgctgggattacagacgtgaggcaccacaaccagcctggatgattcttaagggcccttctaggaccaaagttctgggaatttctagcttattctgccccctcatagcccttggcctatctatctttatccacatgcagaaacatctggcaaccccacatggctgagatgacctggtcctaggacacccttggacagaagactggcctacctagcagacctggatttttcttcctgatctgctgcttccaagttgtgtgaccttggctaagtcacttaacctttctgattgtcatttcgctttttaataaagtgggtctggtgaacaag

SEQ ID NO: 669 - DNA, 2768 bp, Homo sapiens
ctggcgcgggacgccggacgcggtgcggggcggagcggggcgccaaggggcgcgccaggagctgcgcgggcgctgggagggagtccagggcgcagttccgggcgcgtctgagcggttctcgaggcgttctcgcctcggtctctggcgagtgcacggatcaaaagcagcatggatctgcctgtggatgagtggaaatcatatctgcttcaaaagtgggcttcactcccgacgtctgttcaggtcacaatttctacagcagagaccttgagggatatctttcttcactcctcttcacttcttcaacctgaggatgagctgtttctaaaaagactttctaaaggttacttggtgggaaaggactcggacgctcctcttttctacagagaagaaggaaacaaaaaatttcaggagaaagattacacaggagctgcagtgctgtactctaagggagtgtcacattcaaggcctaacactgaggacatgtcactgtgtcatgctaaccgctcggcagccctcttccacctgggtcagtatgagacgtgtcttaaagacattaacatagcacagacacatgggtatccagaaaggttgcaacccaagattatgttacgtaaagcagaatgtctggtggccctggggagactgcaggaggcaagccagaccatcagtgatcttgaaaggaacttcacagccacaccagccctagcagatgtcctccctcagactctgcagagaaacctccatcgtctgaaaatgaagatgcaagaaaaggacagtctcacagaaagcttcccagcagctctggccaaaacccttgaggatgcagcgctgagggaggagaatgaacaactttccaatgcctcatcatccatcggcttatgcgtagatcctttaaaaggtcgctgtctcgttgccacaaaagatattctcccaggagagctcctggtgcaggaggatgcttttgtgagtgttctcaacccaggagaactgccaccaccgcatcacggcctagacagcaaatgggacaccagagtcaccaatggggacctctattgtcaccgatgtttgaagcacactttggccacagttccgtgtgacggatgcagttatgccaagtattgcagccaggagtgtttgcagcaggcctgggagctctaccacaggacagaatgtcctctgggagggctgcttctcacactgggtgtcttttgccacattgccctgaggttgactcttttggtgggatttgaggatgttcgcaaaatcataacgaagctttgtgataagattagtaacaaggacatctgtttacctgaaagcaacaatcaggtcaagacacttaattatggcctaggggagagtgagaaaaatggcaacatcgttgagaccccaattcctggatgcgatattaatgggaagtatgaaaataattataatgctgtcttcaaccttttgccccacactgaaaaccatagcccagagcacaaattcctctgtgctctctgtgtttctgcactgtgcagacagctagaagcagccagtttacaggccatcccaactgagaggattgtgaactcctctcagcttaaagcagcagtgacacctgaattgtgtcctgacgtgactatttggggagtggcgatgctgagacacatgttacagcttcagtgtaacgctcaggcgatgaccaccatacaacacacaggatctaaagggagcatcgttaccgacagcaggcaggtgcgccttgccacaggcatcttccctgttatcagcctcctgaaccactcctgtagccccaacaccagcgtgtccttcattagcactgtcgccaccatccgggcgtcacagcggattagaaaggggcaagagattctccactgctatgggcctcacaagagccggatgggggttgccgaaaggcagcagaagctgaggtctcagtatttctttgactgcgcctgtccagcttgtcaaactgaggcacacaggatggctgcagggcccaggtgggaagcattctgttgcaacagttgcggagcgcccatgcagggagatgacgtgctgcgctgtggcagcagatcttgtgcagaatccgccgtcagcagggaccacctggtctctcggttacaggacctacagcagcaggtcagagtggcccagaagcttctcagagatggtgaactagagcgagctgttcagcggctgtcggggtgccagcgtgacgccgagagcttcctgtgggcagagcacgccgtggtgggagagatcgcggatggcctggcccgggcctgtgctgccttaggagactggcaaaagtcagccacccatctacagaggagtctctacgtggtggaggttcgccacgggccgtccagtgttgaaatgggccatgagctcttcaaattggcccagatctttttcaacgggtttgcagtacccgaagccctgagcacaatacagaaagctgaggaggttctgtcgctgcactgtggcccatgggacgatgaaatccaggagctccagaagatgaaatcctgtttgttggacttaccacccacccctgtagggcctgcattgtagggttccaggaggattttgacccacagaaaaggagcccatggaacacaagttaaagaggttttgctggccaggtatggtggctcacgcctgtaatcccagcactttgggaggctaaggtgggcggatcacctgatgtcgggagttcaagaccagcctggccaacatggtgaaaccccatctttact

SEQ ID NO: 670 - DNA, 2654 bp, Homo sapiens
atacattcttctcagcactacatggcacttattctaaaattgaccacataattgaaagtaaaacactccttagcaaatgcaaaagaatggaaatcataacaaacagtttctcagaccacagtgcaatcaaattagaactcaggattaagaaactcactcaaaaccacacaactacatggaaactgaacaacctgctcctgaatgactactggataaataacgaaaataagacagaaataaataagtgctttgcaactgatgagagcaaagacacaacataccagaatctctgggacacagctagagggaaatttatagcactaaatgcccacaagagaaagcaggaaagatctaaaatcgacaccctaacatcacaattaaaagaactagagaagcaagatcaaacaaatgcaaaagctagcagaagacaaaaaaataactaggatcagagcagaaatgaaggagatagagacacaaaatcccttcaaaaaaccaatgaatccaggagctggttttttgaaaagtttaacaaaatagatagaccactagccagactaataaagaagaaaagagagaagaatcaaatagacacaataaaaaatgataaaggggatatcaccactgatccacagaaatacaaactaccatcagagaatactttaaacacctccatgcaaataaactagaaaatctagaagaaatggataaattcctggacacatacatgctccaaagactaagccaggaagaagtcgaatctccgaatagaccaataacaagttctgaaattgaggcagtaattaatggcctaccaaccaaaaaaagcccaggaccagattcacagttgaattctaccagaggtacaaagaggagctggtaccattccttctgaaactattccaaacaatacaaaaagagggcctcctccctaactcattttatgaggccagcatcatcctgataccaaaacctggcagagacacaacaaaaaaagaaaatttcaggccaatatctctgatgaatatctatgtgaaaatcctcagaaaaatactggcaaactgaatccagcagcacatcaaaaagcttacccaccacgatcaggtcggcttcagccctgggatacaaggctggttcaacatacacaaatcaataaacacaatcaatcacataaacagaaccaagaacaatagccacatgattatctcagtagatgcagaaaaggcctttgataaaattcaacacctcttcatgctaaaaactctcaataaactaggtattggtggaacatatctcaaaataataagagctatttatgacaaacccacagccaatatcatactgaatgggcaaaagctggaagcattccctttgaaaaccagcacaagacaaggatgctctctctcaccactcctattcaacatagtattagaacttctggctagggcaatcaggcaagtgagagaaatgaagggtatccaaataggaagagaggaagtcaaattgtctctgtttgcagatgacataattgtatatttcgaaaatcccatcatctcagccccaaatctccttaagctgataaggacttcagcaaaatctcaggttacaaaatcgatgtgcaaaaatcacaagcattcctatacatcaataatagacgaacagagagccaaatcctgagtgaactcccattcacaattgctacaaagagaataaaatacctaggaatacaacttacaagggatgtgaaggacctcttcaaggagaactacaaaccactgctcaaggaaataagagaggatacaaacaaatggaaaaacattccatgctcatggatgggatgaatcaatcttgtgaaaatggccatatttcccaaagtaatttatagattcagtgctattcccattaagctaccactgacttttttcacagaattagaaaaaactactttaaatttcatatggaacaaaaaaagagcccatatagccaagacaattctaagcaaaagaacaaagctggaggcatcacgctacctgacttcaaactatactaccaggctacagtagccgaaacagcatggtattggtaccaaaacagacatataaaccaatggaacagaacagaggcctcaaaaataacgccacacatctacagccatctgatctttgacaaacctgacaaaaacaagcaatgagaaaaggattccctatttaataaatggtgttgggaaaactggctagtcatatgcagaaaactgaaattggaccccttccttacaccttatacaaaaattaactcaagatggattaaatacttaaacgtaagtcctaaaaccataaaaaccctagaagaaaacctaggcaataccattcaggacataggcatgggcaaagactttatgactaaaacaccaaaagcaatggcaacaaaagccaaaattgacaaatgatatctaattaaactaaagagcttctgcacagcaaaagtaactaccatcagagtgaacagactacctacagaatgggggaaaatttttgcaatctatcagtctgacaaatggctaatatccagaatctacaaagaacttaaacaaatttacaagaaaaaagtgggcgaaggatatgaacagacacttctcaaaagaagacatatatgcagcc

SEQ ID NO: 671 - DNA, 3543 bp, Homo sapiens
atggtgttgtgttcgactgtggctttagtgttactgtatcttccctttacgggccccacctgcctgccctctgtgtagggagccctgttctcgtcttgtgtacctgggcatccctccagggtttggggagccagcctcccccgcccccctacactggaatttgtttgtgtttcttcactgggggtggagggctcaaggggctctaagagggaaaagctccccacacccccagatgctgctcctcctcccggctagagggaacccaacacccaccagtgaaatctgatgcagctgggagtttggaccttgggtctagacagctggtgcgcccaagaggtagggggaggggtgcggcttctccccagttcccagggagtcttgtttgttaagcggggccttgggcagtgttttcctgctgagggtggttttacatttttttttcctcattggcccacagagagtggagttggcctagctctgacgcgtcccctctttatccccaatgtgccccctccattaggggctccaggtgggctccagcccacacttgctctctgcctctgctgacacgtgcacacacacacacatgcacacactgctcctctctgcctgctttcccctggagtcccatgccctgccccatccagacactgcccaaggcccacccgtctatttccacctcattccccctttaagctgagaatggggtctgcctatagaagcttccagagacagctgagactgggtccccggtgcctccaccctaggatctcaggcctgccccaaactgcttcttacagcgtggaggtttctctgatttctcccttatctagcaacacttggttcttttggctagtcagggctgggatcccagggggatccacctgcaggagtcagaggtaaagaagcatccacacggagggtagcggggaaggaagcccacatggcagaagctctgcaaacacagtccgagggactgaggagtccatacaatgcctcacacacaaaggccattgtcaaagcctcgggcctggcagaaagtgaggggggtggggccgctaggccacctcctgctcagccacccctggtcctcattctgggatgaggggagggcctaggagaagccctccctttcagtgcagattcccttcttgaatgggacattgagttcctatcagccaccccagactgggtcttcccatgtatataatggaggaagacccctcccagccctctcagtcccccagctcaaagtgcctcagttcctccatctgctcccagatcccctggcactctagacaggcatgcccatgggaaggaccctgggatggagaggcaggcttcgcggcccttcatgcctgcccactgggattccagttaactcaccccagggtgtcaggggctctgcaggatggcaagtgttggggaggagggaggcagaccactctgtgccccacgggcactgacccaccctgccataggcttcctaagggagccccccaacccctcccctcccctccctggtgctgctattgaaccccctgccagctccatttctgccctggcaaccctgggcccagcaggtgggtcgtcgttgtctggccctcactgccctggccccagcccaggctgcccagtagccacgtagcagaagtctgaagccatgccagccctggtgcggctctcccctctacacatttggggtactggatagggtgaagttaggggagaaaattgtggagtctttccagccacagggcagagggaggtggaggagctgggctgcttttcccagcagtattagtgtcccccaggacaggggaccttttccacattacatcactgccccatcccaccttacaacactctggcccctctgcttggtccccttttcccccaggcaggaggcaatcccaggggcctgcctgatagaggcatttcctgtccctgtctcctcctgcatctcctttatcctgcactgccaccctctattccccattctgtgttggactttgaaggccccaagcccagccaaagcactgagttcccccttaagacacctccacaccctccccacaagcaaagcacaaattttggggtccatgtagcatgggccacgtaggaggctcctgacttgccaggggcccagcctcagcatacccaccgagcagctgccagcctgggctgagggtgggcatgaggcaggagtcagcacttggacctagggatgtgaggttttctgtgccccaagtttgtgggaaggtgggcactactgctgggcccacagacacagccagctggcaaaagggaggtctagcccagcagagagatgaggacattttgcttctccttcatgcccacagcatgagctgagcttctgctttgctggaaatgaaataaacttggtatgaattgtgccaaggcctccccagttgtcatcctgcctcttgttgccctccctgtccttgccccccaccccacacccatgcccctgtttccttacagattttgatattgttctaatgtgtaatagaaccagccgagtccccttttatcagaagggtctgaaaagcagcagcacagagtaggtgaacacaggcctgcaagtgcgaccacctcagacccagtacgtgtgcctacagtggacacactcacacctccaacacacccacgcgcaggcatgtgtacacgcatgtacacacgcatgcatgcacagccagatggccactcagcacagatgtggcagagggaatggtctgatcctgctgaaagccattaaggagaaacgaatttcccagtgcccgggctgcaagagagccttataggggccctgtttcctgggcatgcgcttcctctgccagccaacccccacttgcccaagtcactggtgcaataacttttctgccttcctcagagcagagaaattgggaattgtgttaggtgggtgtgggcagctctgctgagccaagcagacacggatgtcccctcttctgggaggagggtagtgctcccaggcctcaggagtccagacagagacccccaaagcctgactgccaacagaaaccctctcctagtgaggggcaggtgggtgtgccccaggtccccacacccacagggaggcttcacacactgcccagtaccggggatgccaggaggcaggcccctctgctgctgccactgctgccaacactgcccagcttgtgaggccaggaggagcccctgtcccactcggtgctgctgctcttctgacccctgctgtgaggaatgggattcttggtcgaaaaaattggttttccttttttgtataaatgaaaagaatccaggagaagctgccaccctcccctcccagcgtgatgcgctaccttgcttcggcgtcttgtcgccctttccgcctttggtccagggacagcccagcagatcctcctggttctgacctggggggtgtttgcatcacccccttttacttgtattaaaaaaaaatgatgggttgaaaatgtactgaggattaaaaatgtacttttttataaataaagtgtttaaaac

SEQ ID NO: 672 - DNA, 2573 bp, Homo sapiens
agagatgccctaaaacatctgttaagagcagctgcaacagggaaaccggagtcgggggatgagggccgcgaactggacggactgagagttgtgcccgcacgttcagtctcttcttggccaactctttgctcacctcccaagtccccatcccgcttcctccataaagaaaaatccccaataaaagcaaaggcagagaagacaaagaggcaggaggaggctgcaaggagcgtccacaacaatggagaagatggagcgagcgaaactcctgaggacaatgaagggaggtggagaagcgccgagggaaacgctgctgacccgggccccgccagtggcggacgctggacacaggccgggccgcaccgtccctgtcatcccggacgccgcgggctggggccgggcaagcgggcgccgcagggcctgggggcgctggcggggcctgcgcgggttcgcgggcaaaggccggcgggactcaccggcattctgatctcggggcctgaggtagtatgtcgccgggatcacgatgagccccacgaaggaggtgaggaagtagaagaaggtgttcccactgtcatcgtactggaactgctgcccggccatggcaccccctcctccgcctcgctcttctcaccgccgccgccacgaccacgctctgcactcccgctcccaacgccccagcccgagtggcgtagcttggacactgccgccgccgcctctcctccccgcccccacgccactctcacggacacgccgccgccacctctgccgctgccgccgccgtcgccagctctcgcgagaggagatagttcccgccccgctcagttttccctccccctgcgtgtccccagcgagctcgctaagggagacgtggcgagcgcaacggtggaactcggcgaggtctcgcccttagccccgccctaacgtcaaagccctcccccaacccctcccctagggtcccgcccctaaccgctccgccttcctccaccgctcagtttcccagcgcaccacgccggattccgggcgtcggcgtacaggatcccagagaaggcttcccgccggagcagcggtcgcgggcggttcacctggctgcgcaggggtcccagatattcagagaagagctgaggctcagcctgtcctgccctctggattaattgccctggttgatcacgtttccttgggttctggatctgctcctccagcccccatattttggaaacaagtgtcatttagaatagggggtgggaggccgggcacagtggctcacgcctgtaatcccagcactttgagaggccgaggcggacggatcatgagatcaggagttcgagaccagcctgaccaacatggtgaaacccactctctactaaaaatacaaaaattagccggacgtggtggcgcgcgcctccatctcaaaaaaaaaaaaaattgggggatggggaggtgtgggttgcgggaggtgtgggttgcagttgtgttttcaaagcaatgtttactatctggccgggcgcagtggctcatgcctgtaatcccagtactttgggagaccgggtggatcatgaggtcaggagttccagaccagcctaaccaacatggtgaaaccgcgtctctactaaaaatacaaaaactagccggctgtggtggcacgcgcctgtaatcccagctactcaggaggctgaggcaggagaatcgcttgaacccgggaggcggaggttgcagtgagaccggatcgctctccactgggcgacagatttgaatctacgctgtgcccatcttgcagatgaagatttccccaagccgttacagatggttccctacccattccagagctgctaattataaccaccagcttcaggcggtaggctgagacctttattgttttgtgtcatttagtcatcagtaaaccccatggaataaagcaaagtatgtctgctctacaaagagaaaattgaggcccagagagactgcccaaggtccctcacagtaaaagaatgtctgaggattcaaacccatatcattttgatgccacaaagccagtgtgcccttgaccctccatcgcccaggaccttaaaatttcctgacagtgactggcattctccctgcgggttgtgaacaggaaactgcatttcagggatggacggtggcgggagcagtcgctctcgggagcctctccttcccctggctgtgggaccctagaggctggtgtccgctgagctggaaactggacttctgcccagatctttgaacgaccccacggtccagcggcagctgtggctggggtctatcccagagtccattgcccctctctgggttaaaaggatagcccacctggttgcagagattgaaaggactaattgtgaaaatgcttttcaaaggagaaagtgtaatatgcaaataccaaatattacactatatttcaaggactcattttaatactttatactctgttaactaaatgcattataatattccttccattgttggaggaaaaatctggttgctcattgtctttcatttcatgtcttcaaaactagtatcttaatcagtaatgctttccttcataatagattgtgttcatatgt

SEQ ID NO: 673 - DNA, 2840 bp, Homo sapiens
agcacaggcacgtcccgggggctccagcttctgctcagagcgcggagagccgggccgggcgggcgcgcgcgcaggactcgggccgctcgaggggtccggccggacggtgtcgggagccggacccgtcggcagaggagcgggcgccgcgatggctgagggcagtgccgtgtctgaccctcagcacgccgcgcgtctgctgcgagcgctcagctctttccgcgaggagtctcgcttctgcgacgcgcacctggtcctcgacggggaggagatcccggtgcagaagaacatcctggcggcggccagcccgtacatcaggacaaagttaaactataatcctccaaaagatgatggatcaacttataagattgaacttgaagggatatcggtaatggttatgagagagatcctggattacatcttcagtgggcagatcaggctaaatgaagatacaatccaagatgttgttcaggcagctgacctgctgctactgacggaccttaaaaccctgtgctgtgagtttttggaaggctgcattgctgctgagaactgtattggtatccgtgactttgcactacattactgcctccatcacgttcattaccttgccacagaatacctggagactcatttccgagacgtcagcagcacggaagaattcttagagctgagtcctcaaaagcttaaagaagtgatttctcttgagaagttaaacgttggcaatgaaagatatgtctttgaagcagtaattcgatggatagcacatgatacagaaataagaaaggtccacatgaaggatgttatgtcagctctgtgggtttcagggttggactccagttatttacgggaacagatgctgaatgaaccattagtacgagaaattgtcaaagagtgtagcaatataccgctcagccagccgcagcaaggggaggcgatgctggccaacttcaaaccccggggctactctgagtgcatcgtgactgttggtggagaagagagagtttcacggaaacccacagcagcgatgcgatgcatgtgccctctctatgaccctaacaggcagctttggatcgaactggcccctttaagcatgccgagaattaaccatggagttctctcagcagaaggatttttgtttgtattcgggggccaagatgaaaataagcagacccttagctcaggagaaaagtatgatccagatgcaaatacatggacagcattgccacctatgaacgaggcaagacataacttcggaattgtggagatagatgggatgctgtacattttgggaggagaggatggtgaaaaggagctgatttccatggagtgttacgatatttattctaaaacctggacaaagcaacctgatttgaccatggtcagaaagatcggctgctatgcagctatgaaaaagaaaatctacgccatgggtggaggctcctacggaaagctttttgagtctgtagagtgttatgatcccaggacccagcagtggactgccatatgtccactaaaagagaggaggtttggagcggtggcctgtggagttgctatggagctgtatgtgtttgggggagtccgaagtcgtgaggacgcccagggtagcgagatggtaacttgcaagtccgagttctaccatgatgagtttaaaaggtggatctatcttaacgaccagaatttatgcatccccgccagttcctcttttgtttatggagctgtacctataggagccagtatttatgttattggagatcttgatacaggtaccaattacgactacgtgcgtgagtttaaaagaagcacaggaacctggcaccacactaaaccactccttccatccaaccttcgccgtacaggatgtgcagccttacgcattgcgaattgcaagcttttccgcctgcagcttcagcaaggcttattccgtattcgtgttcattccccttgaggaggaagcagagcagagtgcgagatcctgacccaagagcaccataacatagctccgaaagggagagcagagatggcagctgaaactcactctgtgctgggctttggtatggtaactctttggtggttttatgatgcttacaaacttgagctttagctcttgtttgggagaacacgtaactgttgaaaaactacctgggaggagtgagttcctccagttaaatgtggctgtagatgttggaggctaaggaggctagtaaatatcaaaaggaaaagggagtgggaattgctatcatgtaaaatatcaaagttaaaatactaaggtgcattttccctgaagggaactcatgtctgactgctgtattcaaatacgtagctttggtaacaaacaaaatccgtatatgcaaatcaacatatccaaacatgccaagactgcttttccactgcacttggaaggatatattatgcctaagcctgcccaacaaattaaggtttgtgcctaaaatgttagattggactgtatgccagttagtctccatttattcctagtactctgtcctaagaatctttttaaaactatatcatgatgaatagaaatgaagataaaattgctcttttgtaactttatcttagtaatgtaaagattcagtaaattgatgagtcaggttgcagccctcatgtgaactgaaagaagttgctcgcttctgtgttgacttagatcaagacacgtcacgcatcctttctggggtagtacctgtggagccgggaagggtctcctgcagtgccattctgccttctcaatgagcaaaaccattttctaagtatgaggatattagtgagtaggagattttataaaagaaagacctgagtcagacaaataataaaggtctgctgtggct

SEQ ID NO: 674 - DNA, 2574 bp, Homo sapiens
ttacgttgtagtgcttgtgagatgatagtcatggggtttaaatgcttgaggaagtcagtgaggggtttagttgtagaaagaatggttttttgtgttcgtttttgtttttgagacagtgtcttgctttgtcacctaggctggagcatagtggcacagtcgtggctcactgcagcctcagcctcccgggcgcaaccagtcctcccacctcaccctccctggtagctgggactatgggcgtgtgctaccacacctggctgatttttgtattttttgtagagggtgttgccgtgttgccggggctggtcttggactcttgggctcaggcagtccccccgcctcagcctcccaaagtgctgggattacagacatgagccaccatgccctactgaaagaattttaaaaagtaaccccagggttatatgtatccattgattacgagcatttctaatgaccccataactgatttcttgtgaatgaagattttggccaggcgtggtggcttgtgcttgtagtcctagcactttgggaggctgaggcgggaggattgcttgaggccgggtgttcaagaccagcctgggcaacacagtgagacccccaccttcaaaaaaataaaaattaaaaaattgaaataaagaattgttttggaaattacagtttagaatgatctcaagagctcttgttttcacttagagtagtagctctttttccatttagttatatcatttaagtgggttgaggagaaagctattttgacattcattgtaagatgaagaatagcatctgcagattattttattctttgttagtacagaattttattttctaattataaacgtatatttagctgtataaatagaaagtttggaaagcagaggagaagtgcaaagtacctgcaatctaagggaaatatttgatttcacagcattttatttacttggtgaaaaccaaatacaatggcaaatgttccacaggagactaaagttgaaccactgaaatcacgcatatctgagcatgaacagacaaggcatttgtgtcaccaagaagtcaaggagacccaaaataaacatttacgtgactgccaggcgcagtgccctttcatatttgcattttgcctggtgtgaacatcgttttaccagagtatggaaatgttttcattttggacataactttctcttctaatattcgattgggactatcataggccatttgggggaaaataataaaacatatcttcaagttttaaaattttacttaattttggacatgtgcaagaaaatttactgctactggtacttgctctgaatttctaggtttcaattttggtgagactagactagttgctctgaaagatctctgcgctgtattcatcttacaagtctacttttatactgatactcattccttgggaagacataaaagaatgaaaaggtgatgcagttcattttccacagcattgaacactcatttgtcaccagcgtagaagggatttggggagagattaagcagtagcaggaatagtcaataatctgcgtctaaagtggcttgctggctttacttcagtaaattctggccatgtgaagaatacctaaatcaactatcagagttcttaacagtgaacctgtcataactatgatttttttttcttttttgcaattatagaattgattttttttttccttttgaggcagagtcttgctctgtcacctgtgctggagtgcagtgccgcggtctcggctcactgccacttccgcctcccgggttcaggcagttctcccgtgtcggcctcccgaggggttgggattacaggcgcatgccactaccgctggctaatttttgtgtttttagtagagagaggatttcatcatgttggccaggctggtcttgaactcctgacctcagttgattcccctgcctccgcctcttaaggtgctgggattgcaggtgtgagccaccgtgcctggcctgatttaacaattttaatacagggattcttagcaaataaaatatctcatcaaattgtgaagacacagagctgatagctgaaaaatgattcctggttaaaatctgatactttagaaaatacttggaatgctgcctccaatttggtgtaatttccaatatcaaaaacaaatgaatcttatgtatttgagtctgaacttttttttggataatatgaatatgagtctcatttacactctggctaatcagaaagtatttgtttttaattaaaaattatgtttaagcagtgtaatcaataaaaattaaaacttcaaggccgggggcggtggctcacgcctgtaatcccagcactttgggaggccgaggcaggcggatcacgaggtcaggagatcgagaccacggtgaagccccgtctctactaaaaatacaaaaaaaaagttggctgggcgcagtggcgggtgcctgtggtcccggctactcgggaggctgaggcgggagaatggcgtgggcctggagggcggagcttgcagtgagcggagatcgcgccacggcactcccgcctgggtgacagagcgagactccgtctcaaaaaaaaaaaacaaaaaacaaaaaaac

SEQ ID NO: 675 - DNA, 2576 bp, Homo sapiens
gagttcagagggcccacgttcaagggatggaggtggaacctggagaccgactcttaaaagcacagtccgtggttgggtgtggtggctcatgcctgtaagtaagtctcagccctttggaggccacagcagaaggattgcttgagcccaggtactcaaaccagcctgggcaacagagtgaggccctgtcaaaaaaaaatcagccttactgtgaagcctccaaggctgctcgcaggcagctgtggctctcgggaagggaggctgctttgcccagcagggaacatttggggcagggggtaaattttgccagtttgagcatcatgaggtgtaacaagaaatgggttgaatgggccaaatgcaaggagtgcatctctgggctgcaaactgacttgagtgctgcactattgctattccgtgcaaacaaaactcagcttttcctgactcagttccttgacttagtggcctttacaaaaaaagttgagtagtgtgtggcctgctgtcgcacagcccctagttagcttcatggtttctcagcttcagacccctccagcccacagaggagcccatggagggacccacttcccttggtccagacagctgggagtgggttaggcccactgctgttttgagcagggccacttgctccatttcactgaaggctttgctgggtgaaaacacttcagcatctcctcctcaggtcaacccataaagaccaggtccagcaccgtggtcttggcacatccctggcctcaggccctcacctaacagtgaggcagcagctgcccagccccgcaatgtgcctgctgtcaggcagctcttgcctgaaacttacttccacattctttcctgatgggcaggtggctgaaggcccagccatcagtgtcgcttgttgccaccccgtgcctcccttggcctctctgagctttgcccagaagaccaacaatcatacataccctaactgggacaccactctgcagaatgcagatgatccattctggaggaagctgtcccttgagctcagtgagctcccaggcaagcagggcatctggccgacttccctcacaacagctgctcccacatcccctcggactggagcttcagccctgactgaggtgggcagacctaagacctgagaccacaagattagctcagtgtctaccaagcatctagccactgtccagggccagagcataccacgtctgcagtgcctgtgagcagagccagcagttgccctgtgactgtaaccaccaaattgtccaaacacccgctgcagttagcaagaagggtaggcttcaccctcctttactgaggagaatgatgcggaggagtttcctctccagggctaggcaaggcaggcgagcagccagaagccgggtgcccacagggcagggacaggaaggctgtgctgctactggctgctcacttctccatcaacctcaccctctgcaccactaaccaagaccttgtcctcttgcctgtctcgctgctttcacagctgcaacgattgtgtctgcctcatggggttttcctccagagcctttattctgtagccagacgacacgaggagtctgtgtcactgagccagtgcttctagatgctaccctgtgtgggcggcacctcagggacagtaaatcagaaatgctggtcttgaaaccttgaaaagatcaagctgaatgttccttttcatctgtcgctgttgatcttcatctatttaaataggtattctaacgtttcctctctgtatttcatgaagctgatttcctctctctttccttttcagcaatactggagtaaccgcttcctaaaccattttgcagaaatgtaagggtgttcggttgcgtgcatgtgcgtttttagcaacacatctaccaaccctgtgcatgactgatgttggggaaaaagaaaagtaaaaaacttcccaactcactttgtgttatgtggaggaaatgtgtattaccaatggggttgttagcttttaaatcaaaatactgattacagatgtacaatttagcttaatcagaaagcctctccagagaagtttggtttctttgctgcaagaggaatgaggctctgtaaccttatctaagaacttggaagccgtcagccaagtcgccacatttctctgcaaaatgtcatagcttatataaatgtacagtattcaattgtaatgcatgccttcggttgtaagtagccagatccctctccagtgacattggaacatgctactttttaattggccctgtacagtttgcttatttataaattcattaaaaacactacaggtgttgaatggttaaaatgtaggcctccagttcattttcagttattttctgagtgtgcagacagctatttcgcactgtattaaatgtaacttatttaatgaaatcagaagcagtagacagatgttggtgcaatacaaatattgtgatgcatttatcttaataaaatgctaaatgtcaatttatcactgcgcatgtttgactttagactgtaaatagagatcagtttgtttctttctgtgctggtaacaatgagcgtcgcacagacatggtttcaggtaaataaatctattctatgat

SEQ ID NO: 676 - DNA, 2647 bp, Homo sapiens
cttttgcctcgagtattcccaggagggacggtccatccagctgttcttcaggaccaaggacccactgttcttcctcagtgacccaggaaaatgaagcctcctcctgttgggacggctcagaatggtggactccacagtccctccgcgagagacgtggtttccatgcgtacaatagatcttcctcatcccccaaacccaacaccctcctgctcaacaggcgttattcctaaagtggcttcactgttcagactgaagagccacggtagccaaagtgatgagcggagtagaaccgagcagtcgggagagatcttgttccctgtaggaaactgggcatcgctgaggccctgagcatcccaggaggccgattgcacagagacctctggtcgctgaccccagtctgcctccacatccctggaatagcccatcatgggcccttcacccttggcaggtggaaaccattcaacctgctggggccggtgtgtccccatttcatggcattgggggacaacaggattctctgtctaggtcccactgtactcaagtccttgggaagatgcccacccctgcttgggacttgagactccagagactggagcagctgtgggccactgggtctggcccctttttccctgggggcggcggtggaatgggggttacgcagccagccagcatctgggagcccggcgagagcggttcaggtgttctccgaagccgccgcgtacggtgtgacctttagacaattctgtctcacaggatggacgtggtagaggtcgcgggcagttggtgggcacaagagcgagaggacatcattatgaaatacgaaaagggacaccgagctgggctgccagaggacaaggggcctaagccttttcgaagctacaacaacaacgtcgatcatttggggattgtacatgagacggagctgcctcctctgactgcgcgggaggcgaagcaaattcggcgggagatcagccgaaagagcaagtgggtggatatgctgggagactgggagaaatacaaaagcagcagaaagctcatagatcgagcgtacaagggaatgcccatgaacatccggggcccgatgtggtcagtcctcctgaacactgaggaaatgaagttgaaaaaccccggaagataccagatcatgaaggagaagggcaagaggtcatctgagcacatccagcgcatcgaccgggacgtaagcgggacattaaggaagcatatattcttcagggatcgatacggaaccaagcagcgggaactactccacatcctcctggcatatgaggagtataacccggaggtgggctactgcagggacctgagccacatcgccgccttgttcctcctctatcttcctgaggaggatgcattctgggcactggtgcagctgctggccagtgagaggcactccctgcagggatttcacagcccaaatggcgggaccgtccaggggctccaagaccaacaggagcatgtggtagccacgtcacaacccaagaccatggggcatcagatctctctcgggctcaccctgcgcctgtgggacgtgtatctggtagaaggcgaacaggcgttgatgccgataacaagaatcgcctttaaggttcagcagaagcgcctcacgaagacgtccaggtgtggcccgtgggcacgtttttgcaaccggttcgttgatacctgggccagggatgaggacactgtgctcaagcatcttagggcctctatgaagaaactaacaagaaagcagggggacctgcaacccccagccaaacccgagcaagggtcgtcggcatccaggcctgtgccggcttcacgtggcgggaagaccctctgcaagggggacaggcaggcccctccaggcccaccagcccggttcccgcggcccatttggtcagcttccccgccacgggcacctcgttcttccacaccctgtcctggtggggctgtccgggaagacacctaccctgtgggcactcagggtgtgcccagcccggccctggctcagggaggacctcagggttcctggagattcctgcagtggaactccatgccccgcctcccaacggacctggacgtagagggcccttggttccgccattatgatttcagacagagctgctgggtccgtgccatatcccaggaggaccagctggccccctgctggcaggctgaacaccctgcggagcgggtgagatcggctttcgctgcacccagcactgattccgaccagggcacccccttcagagctagggacgaacagccgtgtgctcccacctcagggccttgcctctgcggcctccacttggaaagttctcagttccctccaggcttctagaagcatctgggccagggctcatggctggataatttccctaggcttaacaacccaagcaagcttcgcatcctcgttttatttttggttaaacttatgaaaatgtattaagaaagagtgcagctcgagagagattcagagatggaacacaccagaccccagatcacaaagccaaccatgcccagcccctcccagcacccccagccccacgaccatcgttctgaattctgacgacaccgtgagcctgcctttgtacttcaaactcatggaaggataaccaccttcatgttttgaaataaatgtttcctgttg

SEQ ID NO: 677 - DNA, 2339 bp, Homo sapiens
gcagcttctccgtcaggccttgggccatggcctcgctacgcaatgccaacccgaggctgaagaactacttcaaggagaactacattcctcaggtctgcgaggcactgttatgtggtatacttgttacatgtcctgaggatccgctgaggtatttagagggaatgatcatggttataatcaaaagtggccttcagaatcttctttggtaaagaaagtttttatggttcaccgaggataatcaactgcttcacagtctagaacctaaagactggatcttttgagaacatcagagaaagactgtgcttgccatccacactgcaacaaaactttggaaccttgaactttaagttcataatctcacaactgagaagggtccctccacactattggaactgtacacccattggaacccttaagatgactccggaattgatgataaaagcctgtagcttttatactggacatttagtaaagactcatttttgatatgctattgcggatacaacagatcatctattgtcacaagctaaccattatcctaacaaaatggcggaatacagcaagacataagagtaaaaagaaagaagatgagctgatattaaaacatgaacttcaattgaaaaaatggaaaaataggttaatactcaaaagacctgctgcagaagaatccaattttcctgaacgaagttcttctgaagtctttcttgtagatgagactctaaaatgtgacatttcactgttacctgaaagagcaatattacagattttcttctacctcagtttaaaagatgtgataatatgtggtcaagttaatcatgcctggatgttgatgacacaactaaactcactgtggaatgctattgatttttcctcagtgaaaaatgtgattccagataaatatatagtgtctactttgcaaaggtggcgtttaaatgtgctgcgtttgaattttcgtggttgtcttctccgacccaaaactttcagatccctttcacctttgaagcaactgactgtgttgaatttggcaaattgtgtaagaattggtgatatgggactaaagcaatttcttgatggtcctgcaagcatgaggataggagagctaaatttaagcaactgtgtgcggctaagtgatgcctctgttatgaaactatctgagcgctgccctaatttaaactacttgagtttacgaaattgtgaacatttgactgcccaaggaattggatatattgtaaacatcttttccttggtatcaatagatctctctggaacagacatctctaatgagggtttgaatgtgctttccagacataaaaaattgaaggaactttctgtatctgaatgttatagaatcactgatgatggaattcaggcattctgcaaaagctcactgatcttggaacatttggatgtctcttattgctcccagctgtcagatatgattatcaaagcactggccatttactgcattaacctcacatctctcagcattgctggctgtccaaagattactgactcagcgatggagatgttatcggcaaaatgccattacctgcacattttggatatctctggttgtgtcttgcttactgaccaaatccttgaggaccttcagataggctgcaaacaactccggatccttaagatgcaatactgcacaaatatttccaagaaggcagctcaaagaatgtcatctaaagttcagcagcaggaatacaacactaatgaccctccacgttggtttggctatgatagggaaggaaaccctgttacagagcttgacaacataacatcatctaaaggagccttagaattaacagtgaaaaagtcaacatacagcagtgaagaccaagcagcgtgaccttcagcctcaagcaggaagaacaaaaaatcaagaacttggcaagttttctccatttgttgcaagtatgtttactagctgaatctcaataacaatgtaaacaagcaacaaaccatcttctgattcttattccaactacaaatatttccaaacacatcagtagttcttctgtctaaataatcatgatttaaaaaagaagccaggccaggagcggtggctcacacctgtaatcctagcactttggtaggccaaggcgggtggaccataagtcaggagttcaagaccagcctggccgacatggtgaaaccccatctttactaaaaatacaaaaattagccgggtgtggtggtgggcgcctgtaatcccagctactcaggaggctgaggcaggggacttgcttgaacctgagaggcggaggttgcagtgagcctagatcacgtcactgcattccagcctcggcgacagagcaagactccgtctc

SEQ ID NO: 678 - DNA, 3005 bp, Homo sapiens
acgtcatcacgcagggccgagtcggcgcggccacatcctttaaatatggtctttcttgggcgcgcgcgacaatgtgaggagtggggtggagcgtgtgtggtgtgtggctgcggcctgggcaagagccgccgcggaccatgagctgagtaagttctggagggatcctgcctcttggagccttcgcagccaggcagctgtgaactgtgagctagagtgaagcagaaatctaggaagatgagctccaagatggtcataagtgaaccaggactgaattgggatatttcccccaaaaatggccttaagacatttttctctcgagaaaattataaagatcattccatggctccaagtttaaaagaactacgtgttttatccaacagagagagcagaggagttatgtggacttgttggttaaatacgcaaagattcctgcaaattccaaagctgttggaataaataaaaatgactacttgcagtacttggatatgaaaaaacatgtgaacgaagaagttactgagttcctaaagtttttgcagaattctgcaaagaaatgtgcgcaggattataatatgctttctgatgatgcccgtctcttcacagagaaaattttaagagcttgcattgaacaagtgaaaaagtattcagaattctatactctccacgaggtcaccagcttaatgggattcttcccattcagagtagagatgggattaaagttagaaaaaactcttctcgcattgggcagtgtaaaatatgtgaaaacagtatttccctcaatgcctataaagttgcagctgtcaaaggacgatatagctaccattgaaacgtcagaacaaacagctgaagctatgcattatgatattagtaaagatccaaatgcagagaagcttgtttccagatatcaccctcagatagctctaactagtcagtcattatttaccttattaaataatcatggaccaacgtacaaggaacagtgggaaattccagtgtgtattcaagtaatacctgttgcaggttcaaaaccagttaaagtaatatatattaattcaccacttccccaaaagaaaatgaccatgagagagagaaatcaaatctttcatgaagttccattaaaatttatgatgtccaaaaacacatctgttccagtctctgcagtctttatggacaaacctgaagagtttatatctgaaatggacatgtcctgtgaagtcaacgagtgccgaaaaattgagagtcttgaaaacttgtatttggattttgatgatgatgtcacagaacttgaaacttttggagtaaccaccaccaaagtatcaaaatcaccaagtccagcaagtacttccacagtacctaacatgacagatgctcctacagcccccaaagcaggaactacaactgtggcaccaagtgcaccagacatttctgctaattctagaagtttatctcagattctgatggaacaattgcaaaaggagaaacagctggtcactggtatggatggtggccctgaggaatgcaaaaataaagatgatcagggatttgaatcatgtgaaaaggtatcaaattctgacaagcctttgatacaagatagtgacttgaaaacatctgatgccttacagttagaaaattctcaggaaattgaaacttctaataaaaatgatatgactatagatatattacatgctgatggtgaaagacctaatgttctagaaaacctagacaactcaaaggaaaagactgttggatcagaagcagcaaaaactgaagatacagttctctgcagcagtgatacagatgaggagtgtttaatcattgatacagaatgtaaaaataatagtgatggaaagacagctgttgtgggttctaacttaagttccagaccagctagtccaaattcttcctcaggacaggcttctgtaggaaaccagactaatactgcttgtagtcctgaagagtcatgtgttttaaaaaaacctatcaaacgagtatataaaaaatttgatccagttggagagattttaaaaatgcaggatgagctcttaaagccaatttccagaaaagtaccagaattgcccttaatgaatttagaaaattctaaacagccttctgtttctgagcaattgtctggtccttcagactcctctagttggccgaaatctggatggccttctgcatttcagaagccaaaaggacgattgccatatgaacttcaggactatgttgaagatacatcggaatacctagctcctcaggaaggaaattttgtttataagttatttagcctgcaagacctgttgttactcgtacgctgcagtgtccagaggatagagacaagaccacgttctaaaaaacggaagaaaatcagaagacaatttccagtttatgtactaccaaaagtagagtatcaagcttgttacggagttgaagctctgactgaaagtgaactttgtcgcttatggactgaaagtttattgcattccaacagctcattttatgttgggcatatcgatgcatttacttcaaaactttttctactggaagaaattacctcagaagaattaaaagaaaagctttcagcactcaagatttccaatttatttaacatcctccaacacattctaaagaaactaagtagcttgcaggagggttcctacttgttatctcatgcagcagaagattcttcactcctgatttataaggcctctgatggaaaagttactaggacagcatacaatttgtataaaacacattgcggccttcctggtgtaccttccagtctctcagttccctgggtcccattagatcccagcctgttattaccatatcatatccatcatggaagaataccttgtacttttccaccgaaatcactggataccacaacacaacaaaagattggtggaacgagaatgcctacacgcagccacaggaatccagtttccatggaaaccaaaagcagttgcttgcctgctcagcaagttgaaactgaaggagtggctccacat

SEQ ID NO: 679 - DNA, 3132 bp, Homo sapiens
tacaaatgcctctcgtcagtggcaagccagtaaccaccactcagaagagaatgcaaaacaggccgggcacagtggctcacacctgtaatcccaacactttgagaggctgaagtgggtggatcacttgaggtcaggagtttgagaccagtctggccaacacggtgaaaccccgactctactaaaaaatacaaaaattagccaggcatggtggtgcacacctgtagtcccagttactcaggaggctgaggcaggagaattgcttgaactcaggaggtggaggctgcagtgagctgagtttgcaccattgtactccaccctgggtaacagagtaagactctgtttcaaaaaaagagagaatgcaaaacacctaccctatggaagtgaatcagcattgtcatctttatatcctgagaataaatgattccatccatcatccatccatccattcatctacccctaatgcatgtattcatttcaacttaattttcacctcctgggtgtttacaaccaactagctactgaaggatgaaacacctctttcttacccacaatatcttattaaaggaagaaagagaattatccctttaaagtcttataaaccttcagagataatggatttccaggctcaagataacctgtagaaccacatggagggtcttgtgtttcccagctctttaattttcagacactttgatccctcctcagttctcataagtacatgatgaccaggggagttggttattacaatagctaccatgcacaaggggcatgaagacatggagagatgacaatacttgtctagggccatctagattggtggaatgtgagaacctagagttgttgctcccttgacctaagaatgactcagtatattgataggcatgtacaccaccctcaaatctttaaaccattacctgcaggctccttgaatgtattgaggcctctcctctctgtactatttctgcttgtcatcattttcgtggtaagtaatgccctttgcacattacatttacatgcaagaaagaagtgtttctcaatgggagggtttaggaatgagggccaggccacagcagaagtcaacctcaatccaccaatatcatctgacacctcccttccactatcctttctcaggatggcctcagttggggccgggggtgaggatttggatccggagtttgtctttagtctcatgcctcttagcctcatgctatcgtgcttctatgaggaacttacaggtcataattgtagacaggattctgctcctttcccacaacaccctcatgctggttcccatgctgtgtcctgctcctgctttctggaggtcatcgggagcgggcactgcaggcagggagcactctgtggcctctgtgactcctagagcctggctacctggagcctgagtgggcatgaagggtgagtaagccggggaactaggacacgttagctaatgcagagcctggatcaaacaccaccaccaccatttgcccccgctcccaaatggttataagcaaaactctcctgtcttctgaggtagatttcttcatcattacttctttgccatatggaaatgtaatttgacttttagatttaaatctagtaatgattaatatatcagaatttacagtgtttgcaatgtcaaggaggcaacacctgtaaacagttggttcaggaattgctaggagtcttggcctctttccctcttggtcgcctgctcagcagcagcctgtgtatttatagtccattatgggcataggatgttaccctaactggtgcccacagtgaacaaggggctaagccctgtctctcgtctggtcttaggagggcttctgtttaatgggctgaacttaaaggtccttccctgcaacccccacacagccacagcccatgggctgaaagctcagctgaactcccattgtacctccccagctcatcctagtgaatgtgccagggcccagagggagaggtcaggctgtgccagctcagtgctatactgcaggcacatggatccccaaccctgggccctattttgaggcagtgtggagtggtggtcaaagggctggactccagagacagacagtcttggttcaaaccttgctgtgtgatcttgggcaaatcagtccatttatcactgtctcagtttccttatctaagaaatggagaccctaatagtacctaccttttagggttgctaggagaaaagtgcctggcacatagtaagaacttactacatgttggttgtttttatgattattgttatataattagaagagtgaccaggctagcagcagagagtcctcattctcaggagagtgggaagagggagagaggtgaagtgtcagagggctgcagagccaatacctggcagagccccaggcagcaggtttgccacttggggggcctgggtggggcccaggtagctttcctggttctcaggtcttcatttcagacagtgctctgagcctcccatccacagtccagagcccattctctgcctgcctccttctctactattgtcgccacctgcagtctttctgagcagctggttaaggtgctactattcctcctcccaagggtgagggccagccctgaacaaaagggctccggagggagccacaaaaccagatagcctcaggtttcccaaatcgcctctcctgctgccctggcttctcaacaccgtcacctgtctaaaagcttttcttggtgtgggctggaagaatttggataaagtctaccatccccgctcttccttaatcctattaccacagcttctttgctcccagctctgtccagctacctaacctcaaggaagccaacaggcgatggaaaagttggcataaaaatgagaatgtaggctggacgtaatcccacctgtaataacacctgtaatcccagcactttgggaggccagggacggcagattgcttgaggccaggagtttgagaccagcctgggcaacgtggtgggctcctgtctctacaaaaaatataaaaattagttgggcatgaaggcatgcacctgtggtttctgctacttcggaggctgaggtggaagatcgtttgagcctgggatgtcagagctgcagtgagccaagattgtgtcactccaacctggcaacagaggagaccttgtctc

SEQ ID NO: 680 - DNA, 3250 bp, Homo sapiens
actccgccgcacgctgcagccgcggctggaagatggcggggaacgactgcggcgcgctgctggacgaagagctctcctccttcttcctcaactatctcgctgacacgcagggtggagggtccggggaggagcaactctatgctgactttccagaacttgacctctcccagctggatgccagcgactttgactcggccacctgctttggggagctgcagtggtgcccagagaactcagagactgaacccaaccagtacagccccgatgactccgagctcttccagattgacagtgagaatgaggccctcctggcagagctcaccaagaccctggatgacatccctgaagatgacgtgggtctggctgccttcccagccctggatggtggagacgctctatcatgcacctcagcttcgcctgccccctcatctgcaccccccagccctgccccggagaagccctcggccccagcccctgaggtggacgagctctcactgctgcagaagctcctcctggccacatcctacccaacatcaagctctgacacccagaaggaagggaccgcctggcgccaggcaggcctcagatctaaaagtcaacggccttgtgttaaggcggacagcacccaagacaagaaggctcccatgatgcagtctcagagccgaagttgtacagaactacataagcacctcacctcggcacagtgctgcctgcaggatcggggtctgcagccaccatgcctccagagtccccggctccctgccaaggaggacaaggagccgggtgaggactgcccgagcccccagccagctccagcctctccccgggactccctagctctgggcagggcagaccccggtgccccggtttcccaggaagacatgcaggcgatggtgcaactcatacgctacatgcacacctactgcctcccccagaggaagctgcccccacagacccctgagccactccccaaggcctgcagcaacccctcccagcaggtcagatcccggccctggtcccggcaccactccaaagcctcctgggctgagttctccattctgagggaacttctggctcaagacgtgctctgtgatgtcagcaaaccctaccgtctggccacgcctgtttatgcctccctcacacctcggtcaaggcccaggccccccaaagacagtcaggcctcccctggtcgcccgtcctcggtggaggaggtaaggatcgcagcttcacccaagagcaccgggcccagaccaagcctgcgcccactgcggctggaggtgaaaagggaggtccgccggcctgccagactgcagcagcaggaggaggaagacgaggaagaagaggaggaggaagaggaagaagaaaaagaggaggaggaggagtggggcaggaaaaggccaggccgaggcctgccatggacgaagctggggaggaagctggagagctctgtgtgccccgtgcggcgttctcggagactgaaccctgagctgggcccctggctgacatttgcagatgagccgctggtcccctcggagccccaaggtgctctgccctcactgtgcctggctcccaaggcctacgacgtagagcgggagctgggcagccccacggacgaggacagtggccaagaccagcagctcctacggggaccccagatccctgccctggagagcccctgtgagagtgggtgtggggacatggatggggaccccagctgcccgcagctccctcccagagactctcccaggtgcctcatgctggccttgtcacaaagcgacccaacttttggcaagaagagctttgagcagaccttgacagtggagctctgtggcacagcaggactcaccccacccaccacaccaccgtacaagcccacagaggaggatcccttcaaaccagacatcaagcatagtctaggcaaagaaatagctctcagcctcccctcccctgagggcctctcactcaaggccaccccaggggctgcccacaagctgccaaagaagcacccagagcgaagtgagctcctgtcccacttgcgacatgccacagcccagccagcctcccaggctggccagaagcgtcccttctcctgttcctttggagaccatgactactgccaggtgctccgaccagaaggcgtcctgcaaaggaaggtgctgaggtcctgggagccgtctggggttcaccttgaggactggccccagcagggtgccccttgggctgaggcacaggcccctggcagggaggaagacagaagctgtgatgctggcgccccacccaaggacagcacgctgctgagagaccatgagatccgtgccagcctcaccaaacactttgggctgctggagaccgccctggaggaggaagacctggcctcctgcaagagccctgagtatgacactgtctttgaagacagcagcagcagcagcggcgagagcagcttcctcccagaggaggaagaggaagaaggggaggaggaggaggaggacgatgaagaagaggactcaggggtcagccccacttgctctgaccactgcccctaccagagcccaccaagcaaggccaaccggcagctctgttcccgcagccgctcaagctctggctcttcaccctgccactcctggtcaccagccactcgaaggaacttcagatgcgagagcagagggccgtgttcagacagaacgccaagcatccggcacgccaggaagcggcgggaaaaggccattggggaaggccgcgtggtgtacattcaaaatctctccagcgacatgagctcccgagagctgaagaggcgctttgaagtgtttggtgagattgaggagtgcgaggtgctgacaagaaataggagaggcgagaagtacggcttcatcacctaccggtgttctgagcacgcggccctctctttgacaaagggcgctgccctgaggaagcgcaacgagccctccttccagctgagctacggagggctccggcacttctgctggcccagatacactgactacgattccaattcagaagaggcccttcctgcgtcagggaaaagcaagtatgaagccatggattttgacagcttactgaaagaggcccagcagagcctgcattgataacagccttaaccctcgaggaatacctcaatacctcagacaaggcccttccaatatgtttacgttttcaaagaaatcaagtatatgaggagagcgagcgagcgtgagagaacacccgtgagagagacttgaaactgctgtccttt

SEQ ID NO: 681 - DNA, 3100 bp, Homo sapiens
agagcgcgtgggcagggccagccgcagcgaccccgagacacggcggcgctgggaggaggaaggtttccgtcagatttctctgaacaaggtggccgtcctgctgctggctggggggcagggcactcgcctgggcgtgacctaccccaagggtatgtaccgtgtggggctgcccagccggaagaccctgtaccagctgcaggcggagcggattcggcgggtggagcagctggccggtgagcgccacgggacccgctgcaccgtcccctggtacgtcatgatcagcgagttcactctggggcccacggccgagttcttcagggagcacaacttcttccacctggaccccgccaacgtggtcatgtttgagcagcgcctgctgcctgctgtgacctttgatggcaaggttatcctggagcggaaagacaaagttgccatggccccagacggcaacgggggcctctactgcgcgctggaggaccacaagatcctggaggacatggagcgccggggagtggagtttgtgcacgtgtactgtgtggacaacatcctggtgcggctggcggaccctgtcttcatcggcttctgtgtgttgcagggcgcagactgtggcgccaaggtggtggaaaaggcataccccgaggagcccgtgggcgtggtgtgccaggtggacggtgtcccccaggtggtggagtacagcgagatcagtcctgagaccgcacagctacgtgtctccgacgggagcctgctgtacaatgcaggcaacatctgcaaccacttcttcacccgaggcttccttaaggcggtcaccagggagtttgagcctttgctgaagccacacgtggctgtgaagaaggtcccgtatgtggatgaggaggggaatctggtaaagccgctaaaaccgaacgggataaagatggagaagtttgtgtttgatgtgttccggtttgctaagaactttgctgccttggaagtgctgcgggaggaggaattttccccactgaagaacgcagagccagccgacagggacagtccccgcaccgctcgccaggccctgctcacccagcactaccggtgggctctgcgggccggggcccgcttcctggatgcccatggggcctggctcccagagctgcccagcttgcccccaaatggagaccctccggccatctgtgagatatcgcccttggtgtcttactctggagagggtttagaagtgtacctgcaaggccgggagttccagtccccgctcatcctggatgaagaccaggccagggagccgcagctgcaggagtcctgacccgcccagactgcccccagactcccccgagacctgccagccccggcatcctggaagtcccgactccccccagacctgccagccccggcgtcctggagctgggggctacagcccagcctgagctctgggtgggaaagcagcctgccccatgcttccagcctgcagaacacagaatgaaacatgctggtagactccacgagggcagggcctctcctgtcgcctctggacacaagtggcgacagcctgctgggggctctgtggctccattcctggctgtggggtctagtcaagaggcagagggacttgggacctgggagaatggggctgagaggaggcttcgggttggggcccaagggaggtgtggtgtcatctggggagaacaggagggcatgtccctttgggagcccgccttgtggatccaccacaccccaccgagcactagaagctgcataagctacacaggatgtgcttctgcagcctacagatgcagaaccagaatgagggggacaattccacccactcgagggctgccccctcttccttagcagacgaaccagtaatgggggcaaggctggggcatcccagcccacacaccctggatgcccagcaaggccacagaaagagcctgatgtccatgatccaggtggctctgagaagcttggcctggacacctgagcctgcggccggtactcctgccttctccccatctatccccaagtcctctgcctctcagcctcttccatggtcggtttaggctgctgagttttctgtgcttccccaagaaccagtgggatcaatgccggcggcctctgtgatggttgctgactaatccgggatttcatgagtcagaggcaccacccctcaccccagctgcctgctgcttctgacggatcttggtgctcaggctgcctggctctccgagtgaggacgcagcctccatatttggtgcactcaggcatggctgggacaagccagctgccccagggttcttcccctggtgattctcgcctgctttctcatctcaggggaggcagtggcacctccctctccctgctgacatgaagagagctatgatatgccactgctgccaactcatcctctgcccccacctcgaaacccacagtccccagtggagggccactactcatccccattggtttcccaggggaggggtgttgtctggaagggcaggttcagatgcagccttccagatttagaggcactgggaggacagtggctgagtggaggcgcccagacctgggcaggcagcaggctcaggcccacaccttgtgatttttgaaaccaaagcccagaagatgatgtttacttctctctccctggctctgcccttcttactgcaaaccatgctgtgccttagggcccttctcatagctgttcctcatggccatgactggaacagggatgcaacctctttctacacaagcacagttagttgggtgaagtctttttttttgtttgttttagacggagtttcactcttgttgcccaggctggagtgaagtggcgtgaccttggctcactgcaacctccaggccagcctcagcctccctagtagctgggactacaggcacccactaccacgcctggctaattctttgtatttttagtagagatggggtttgaccgtgttagccaggatggtctcgatctcctgacctcgtgatccacccacctcggcctcccaaagtgctgggattataggtgtgagccaccgcgccgggccggttgctggcatcttaatgttctgtaggtggaatatttccaataaacacaaggtgccgt

SEQ ID NO: 682 - DNA, 2690 bp, Homo sapiens
gctgccgcagcctggtgaaggtgaacctctcgggctgccacctcacttccctgcgcctctccaagatgctctcggccctgcagcacctgcgctcgctggccatcgacgtgagccccggcttcgacgccagccagctgagcagcgagtgcaaggccaccctgagccgcgtgcgggagctcaagcagacgctgttcactccctcctacggcgtggtgccctgctgcaccagcctagagaagctgctgctctacttcgagattctggaccgcacgcgcgagggcgccatcctctcgggccagcttatggtgggccagagcaacgtgccgcactaccagaacctgcgggtcttctatgcgcgcctggcccccggctacatcaaccaggaggtggtgcggctctacctggctgtgcttagcgaccgcactcctcagaacctccacgccttcctcatctccgtccctggcagcttcgcggagagcggcgccaccaagaacctcctggactccatggcgcgcaatgtcgtgctggatgccctgcagctgcccaagtcctggctgaacggctcttccctcctgcagcacatgaaattcaacaacccgttctacttcagtttcagccgctgtaccctgtcaggcggccatctgatccagcaggtcatcaacggcgggaaggacctgcggagcctggccagcttgggcctcagcggctgcgtccactgcctgtccccagactcgctgctccgcaaggcggaggacgacatcgacagcagcatcctggagacgctggtggcgtcctgctgcaacctgcgccacctgaacctctcggccgcccaccaccacagctcggagggcctgggccgccacctctgccagctcctggcccggctgcgtcacctgcgctccctctccctgcctgtctgctctgtcgctgactccgcgccgcgcgccgaccgcgcgcccgcccagccggccatgcacgcagtgccgcgcggctttggcaagaaagtgcgtgtgggcgtgcagtcctgtcccagccccttctcgggccaggcgtgcccccagccctcctccgtgttctggtctctgctgaagaacctgcccttcctggaacacctcgagctgattgggtccaacttctcctccgccatgccccgcaacgagcccgccatccgcaactcgctcccaccctgcagccgcgcacagagtgtcggggactcggaggtggccgccatcggccagctggccttcctgcggcacctgacgctcgcacagctgcccagcgtccttacgggctccgggctggtcaatatcggcctgcagtgccagcagttgcggtccctgtcgctggccaacctgggcatgatggggaaggtggtgtacatgcccgcgctctcagacatgctgaagcactgcaagcggctgagggacctcaggctggagcagccctacttcagcgccaacgcccagttcttccaggcgctgagccagtgcccctcgctgcagcgcctgtgcctggtctctcgcagcggcaccctccagcccgatgccgtgctggccttcatggctcgctgcctgcaggttgtcatgtgccacctgttcaccggggagtccctcgccacctgcaagagcctgcagcagtcgcttctccgcaggtggggagaggtgacaggaaggaggccccagctgttcacagagttgcgagaagagccatcagccaggacgtctcgagccactgggtgccgacaaccctgcttgccagactctggggtagtctgttgtccttgcggtcggccgctggctgtctcaggaataatcctgattggggtttccccctctctggttgtaaaaacaacttgtgtttatagagtactttttaaaaatttagactatgcatcaatcttttttcttgtttgtttgtttgagacagagtctcactctgtcgtccaggctggagtgcagtggcgggatctcagctcactgcaacctctgctttctgggttgcaacctcagcctcctgagcagctgggattacaagtgtgcaccactatacctggctaatttttgtatttttctttttttcttttttgagacagagtctcgctctgtcgcccaggctggagtgcagtggcgtgatctcggctcgctgcaagctctgcctcccgggttcacgacattctcctgcctcaacctcccaagtagctgggactacaggcgcccgccaccacacctggctaattttttgtattttttttttttttttttagtagagacggggtttcactgtgttggccaggatggtctcgatctcctgacctcatgatctgcccacctcggcctcccaaagtgctgggattacaggcgtgagccaccgcgcccggcctaatttttgtatttttagtagagacggggtttcaccatgttgcccaggctggtctctaactcctgacctcaggtgatccgcttacctcagcctcccaaagtgctgggattacaggcgtgagccacaacgcctggccaacatcaacctatttttaagtgaaggtttcccaacagtgaatgctgccaactttccctggagaatgaactggagatagggttctcatattgttttgtaatttgatttttaaaaatgtaacactacaccgtggagtcctcttgtgtcagtaaataaagccctaagtgattattctc

SEQ ID NO: 683 - DNA, 2920 bp, Homo sapiens
acaagccttgaaactgtgggtaactttacagttctcagatcggcttctcgcaacaggcagtcagttctcactgggccccttggactcccatttcaaaaatggagaagacagatcacagccactgaccagggaccgtgggaggtgccacgtgatggtgaagatcctcatgtatgaaaatgaagtcccaggcaaccatgatttgctgcttagtgttctttctgtccacagaatgttcccactatagatccaagattcacctaaaagctggagataaacttcaaagccctgaagggaaacccaagactggaaggatccaagagaaatgcgaaggaccttgtatttcttcttccaactgcagccagccctgtgctaaggactttcatggagaaataggatttacatgtaatcaaaaaaagtggcaaaaatcagctgaaacatgtacaagcctttctgtggaaaaactctttaaggactcaactggtgcatctcgcctttctgtagcagcaccatctatacctctgcatattctagactttcgagctccagagaccattgagagtgtagctcaaggaatccgtaagaactgcccctttgattatgcctgcatcactgacatggtgaaatcatcagaaacaacatctggaaatattgcatttatagtggagttattaaaaaatatttctacagacttgtctgataatgttactcgagagaaaatgaagagctatagtgaagtggccaaccacatcctcgacacagcagccatttcaaactgggctttcattcccaacaaaaatgccagctcggatttgttgcagtcagtgaatttgtttgccagacaactccacatccacaataattctgagaacattgtgaatgaactcttcattcagacaaaagggtttcacatcaaccataatacctcagagaaaagcctcaatttctccatgagcatgaacaataccacagaagatatcttaggaatggtacagattcccaggcaagagctaaggaagctgtggccaaatgcatcccaagccattagcatagctttcccaaccttgggggctatcctgagagaagcccacttgcaaaatgtgagtcttcccagacaggtaaatggtctggtgctatcagtggtcttaccagaaaggttgcaagaaatcatactcaccttcgaaaagatcaataaaacccgcaatgccagagcccagtgtgttggctggcactccaagaaaaggagatgggatgagaaagcgtgccaaatgatgttggatatcaggaacgaagtgaaatgccgctgtaactacaccagtgtggtgatgtctttttccattctcatgtcctccaaatcgatgaccgacaaagttctggactacatcacctgcattgggctcagcgtctcaatcctaagcttggttctttgcctgatcattgaagccacagtgtggtcccgggtggttgtgacggagatatcatacatgcgtcacgtgtgcatcgtgaatatagcagtgtcccttctgactgccaatgtgtggtttatcataggctctcactttaacattaaggcccaggactacaacatgtgtgttgcagtgacatttttcagccactttttctacctctctctgtttttctggatgctcttcaaagcattgctcatcatttatggaatattggtcattttccgtaggatgatgaagtcccgaatgatggtcattggctttgccattggctatgggtgcccattgatcattgctgtcactacagttgctatcacagagccagagaacggctacatgagacctgaggcctgttggcttaactgggacaataccaaagcccttttagcatttgccatcccggcgttcgtcattgtggctgtaaatctgattgtggttttggttgttgctgtcaacactcagaggccctctattggcagttccaagtctcaggatgtggtcataattatgaggatcagcaaaaatgttgccatcctcactccactgctgggactgacctggggttttggaatagccactctcatagaaggcacttccttgacgttccatataatttttgccttgctcaatgctttccagggttttttcatcctgctgtttggaaccattatggatcacaagataagagatgctttgaggatgaggatgtcttcactgaaggggaaatcgagggcagctgagaatgcatcactaggcccaaccaatggatctaaattaatgaatcgtcaaggatgaaatgctgccccatttctcatggatgtcctgagaccaagaggggagatccaggagaaagaggccatggaaagcaggctggagtgaggaggaatggtcatgcttccttggaagactttctcttcttgtcaggagtgactcccaagctcttggtcggccgaagaaaaactgaggataacatttgctgactgggctttaaggagcatgatttatggaccccttaacctacccgtgccctgcaagaggctggcttcttggtcaatcttgactagattaagagtcaatctgcaagccattttatggtctccctggccagctgggggctgtagggccctgctgggcttggtcgtctttcactcctgaggcctgctctgtggctccatagctcagtcctccatcactctgcgtggatcctgggtactttggacagtgagggttcgatccaattttaggggtagggttgggggtgggagtgggagtgtgggttggcaggaggaagaatgagtctactttggagacaattaagtcatggtacgtttcctaaagatagggaacggaagaaaagcaagagaactgtttaatatgctgattattttagtctattttagaccttgagtaaactaatttagcttctaggatccaagtttccttatttgtgaaacagg

SEQ ID NO: 684 - DNA, 2862 bp, Homo sapiens
aagtgtttccagggctgtcggaacagtgccacaggctgagcagctgcagctgcagacatgggtcgtccgtggttctagagcctggaagcctgagatcaagtgtgcgtccaccaggctggccccttctgaggcgtgaggaagtctgctccacactgccagcttccaggtgttccttggctggtgagcacctgcggatctgtccccagggctacacctgctgcaccagcgagatggaggagaacctggccaaccgcagccatgccgagctggagaccgcgctccgggacagcagccgcgtcctgcaggccatgcttgccacccagctgcgcagcttcgatgaccacttccagcacctgctgaacgactcggagcggacgctgcaggccaccttccccggcgccttcggagagctgtacacgcagaacgcgagggccttccgggacctgtactcagagctgcgcctgtactaccgcggtgccaacctgcacctggaggagacgctggccgagttctgggcccgcctgctcgagcgcctcttcaagcagctgcacccccagctgctgctgcctgatgactacctggactgcctgggcaagcaggccgaggcgctgcggcccttcggggaggccccgagagagctgcgcctgcgggccacccgtgccttcgtggctgctcgctcctttgtgcagggcctgggcgtggccagcgacgtggtccggaaagtggctcaggtccccctgggcccggagtgctcgagagctgtcatgaagctggtctactgtgctcactgcctgggagtccccggcgccaggccctgccctgactattgccgaaatgtgctcaagggctgccttgccaaccaggccgacctggacgccgagtggaggaacctcctgggtgagcccccacccgcgagagcggcctggaactgtcttggggagtgcacgactgggggtcctggggggcgggtggtccctagcttagagcttggacccagggacctgatcagggatgccctgacccgggccagatctgggtggtgctgcagggttgaggggccagggtgccttttgaatgtcctgagtgatgtgtgacttggggcagctgccagggagggagccctgtggggtcatagtttcttgtccttccccacttagcaagcacctcggtgtgcatacatgccaacacgtgtgactcatcgaggaccggcacttgtttaagctaacacatacatgcaccgtcacacgacaggctgacacatgcgaactggcgtgctcacttgctgacacacagtgggccagtgcccaccagtacagcgtgtgctcctgggcgcatgtgatgacatgagctgggctgacccgcatcaatgccaacacgtgtgtggtaatatgtacatgcttatccagatccactaacatgtacacatgcttacatgaggggggacagcatgcatctgtgccaacacgtgctagcatgtgctgacacggggccaacaggtgtgtgctaacgtgatgggagctgacaaaatgcatgagctttacttgtacatgtgctcaccgtgcacgcaacacacacatgaactaaggtgtacatggggggggcatgaggtaagccagcatgcatacacaccagctcacacgggctcatgtgcacacaagctggaccaaggtgagccagcgtatgtacatgtcaacacctgcatgagccagcgtggacatacgagacacggcaggccagcaagcatgcagaatggcctctgtgtatgtgcgtgttcacctgtgcccgtggcacaggtgcacacgtgggtgtgggccaagctgagtgcacgtggcctgcacatgtcacacgggccaacctgagtgcacacgtgggatctcccatgctgacccgtgctgtcaagactgcattaacatgcacacgtggtgacgcctgcgtgtgcgtgtcaacgcctgtgtgcgcgcgttaacgcctgtgtgtccgcgtgttaacgcctgtcctagactccatggtgctcatcaccgacaagttctggggtacatcgggtgtggagagtgtcatcggcagcgtgcacacgtggctggcggaggccatcaacgccctccaggacaacagggacacgctcacggccagggtcatccagggctgcgggaaccccaaggtcaacccccagggccccgggcctgaggagaagcggcgccggggcaagctggccccgcgggagaggccaccttcaggcacgctggagaagctggtctccgaagccaaggcccagctccgcgacgtccaggacttctggatcagcctcccagggacactgtgcagtgagaagatggccctgagcactgccagtgatgaccgctgctggaacgggatggccagaggccggtacctccccgaggtcatgggtgacggcctggccaaccagatcaacaaccccgaggtggaggtggacatcaccaagccggacatgaccatccggcagcagatcatgcagctgaagatcatgaccaaccggctgcgcagcgcctacaacggcaacgacgtggacttccaggacgccagtgacgacggcagcggctcgggcagcggtgatggctgtctggatgacctctgcagccggaaggtcagcaggaagagctccagctcccggacgcccttgacccatgccctcccaggcctgtcagagcaggaaggacagaagacctcggctgccagctgcccccagcccccgaccttcctcctgcccctcctcctcttcctggcccttacagtagccaggccccggtggcggtaactgccccaaggccccagggacagaggccaaggactgactttgccaaaaatacaacacagacgatattt

SEQ ID NO: 685 - DNA, 2796 bp, Homo sapiens
atttctagactgctagatttggttgttcagcctgtcccccggccttctcagtgttcggagtttattcagcaaagctccatgaaatctcctttgtacctagtatcccgttcactgccctcaagttcgcaattaaaaggatcgcctcaggccatctccagggcttcagaattacatttgcttgaaactcctcttgtagttaagaaagctaaaagtttggccatgtcagttactacttctggattttctgagttcactcctcagtccatcctgaggtctactcttcgatcaacacctttagcatctccctctccatcacctggaaggtctcctcaacgacttaaagaaactagaatttcatttgtggaagaagatgtccacccaaaatggattcctggggctgcagatgatagcaaattagaagtatttactacacctaaaaaatgtgcagttccagtggaaactgaatggctgaagagcaaagataggaccacatcttttttcctgaacagccctgaaaaggagcatcaagaaatggatgaggggtcacaaagtttagagaaactggatgtgagcaaaggaaacagcagtgtttcaatcacatccgatgagactaccttagagtatcaggatgcaccgtcaccggaagaccttgaagagactgttttcacggcctctaagcccaaaagctcttccactgcactaactactaatgtaactgaacaaactgaaaaggatggagataaagatgtatttgcatcagaagtaactccttcagacctacagaaacaaatgggcaatttagaagatgcagaaacaaaggatctcttagttgcagcagaggcattttcagaattgaatcacttaagcccggttcaaggaactgaagcttctctttgtgcaccatcagtctatgaagggaaaatcttcacccagaagtccaaggtaccagtgttggacgaaggattaacatctgttgaaacctacacccctgcaattagagcaaatgacaataaatctatggctgatgtccttggtgatggtggaaactcctcgctcactatctctgaaggtcctattgtctctgagcgcaggcttaaccaggaagtagcgctgaacttaaaagaagatcatgaagtagaagttggtgtactaaaagaaagtgttgacttaccagaagaaaagcttccaatttctgacagccctcctgatactcaagaaattcatgtgattgaacaagaaaagcttgaagctcaagattcaggagaagaggctaggaatctttcatttaatgagttatatccctctggaacacttaagcttcagtacaattttgatactattgaccaacagttttgtgacttagctgataacaaagacactgctgaatgtgacattgctgaagtagatggggaactttttgtggctcaaagcaactttaccttgatattggaaggtgaagaaggagaagttgagccaggtgattttgcatcatctgatgtgttacctaaagcagctaacacagcaactgaagaaaaacttgtatgcagtggggaaaatgataatcatggacaaattgcaaatttgccatctgccgtaactagtgaccaaaagtcccaaaaagtagacactttaccatatgtgcctgaacctattaaagtagcaattgcagaaaatttactagatgtaattaaagacacaagaagtaaagaaattacttcagatacaatggaacagtccattcatgaaacaatacctttagtgagccaaaacataatgtgtcccactaaattggtcaaatctgcatttaagactgctcaggaaacaagcacaatgactatgaatgtcagccaggttgatgacgtggtttcctccaaaactcgtacgagaggtcaacgtatccaaaacgtgaatgtcaaatcagcacaacaggaagcatcagcagatgttgctactcctaagatgccagggcagtcagtcaggaagaaaactaggaaggcaaaagaaatttctgaagcttctgaaaacatctattctgatgtcagaggactatctcagaaccagcaaatacctcaaaattctgttacgcctaggagaggaaggagaaagaaagaagttaatcaggacatactagaaaacaccagttctgtggaacaagaattacagatcactacaggtagggaatcaaaaagattaaaatcatctcagctgttggaaccagcagttgaagaaactactaaaaaagaagttaaggtttcatctgttacaaaaaggactcctagaagaattaaaagatctgtagaaaatcaggaaagtgttgaaattataaatgatctaaaagttagtacggtaacaagtcctagcagaatgatcagaaaattgagaagtactaatttagatgcttctgaaaatacaggaaataagcaagatgataaatccagtgacaagcagctgcgtattaaacatgttagaagggtcagagggagagaagttagtccatcagatgtgagagaagactccaaccttgagtcatctcagttgactgttcaagcagaatttgatatgtctgccatacctagaaaacgtggtagaccaggaaaaatcaatccatctgaagatgtaggatctaaggctgttaaggaagagagaagccccaagaagaaagaagctcccagcattagaaggagatctacaagaaataccccagctaaaagtgaaaatgttgatgttggaaaaccagctttaggaaaatccattttagtgccaaacgaggaactttcgatggtgatgagctctaag

SEQ ID NO: 686 - DNA, 3921 bp, Homo sapiens
gtgcaagcatctgaagagctgccgggatgcagcagagaggagcagctggaagccgtggctgcgctctcttccctctgctgggcgtcctgttcttccagggtgtttatatcgtcttttccttggagattcgtgcagatgcccatgtccgaggttatgttggagaaaagatcaagttgaaatgcactttcaagtcaacttcagatgtcactgacaagcttactatagactggacatatcgccctcccagcagcagccacacagtatcaatatttcattatcagtctttccagtacccaaccacagcaggcacatttcgggatcggatttcctgggttggaaatgtatacaaaggggatgcatctataagtataagcaaccctaccataaaggacaatgggacattcagctgtgctgtgaagaatcccccagatgtgcaccataatattcccatgacagagctaacagtcacagaaaggggttttggcaccatgctttcctctgtggcccttctttccatccttgtctttgtgccctcagccgtggtggttgctctgctgctggtgagaatggggaggaaggctgctgggctgaagaagaggagcaggtctggctataagaagtcatctattgaggtttccgatgacactgatcaggaggaggaagaggcgtgtatggcgaggctttgtgtccgttgcgctgagtgcctggattcagactatgaagagacatattgatgaaagtctgtatgacacaagaagagtcacctaaagacaggaaacatcccattccactggcagctaaagcctgtcagagaaagtggagctggcctggaccatagcgatggacaatcctggagatcatcagtaaagactttaggaaccacttatttattgaataaatgttcttgttgtatttataaactgttcaggaagtctcataagagactcatgacttcccctttcaatgaattatgctgtaattgaatgaagaaattcttttcctgagcaaaaagatactttttgattcatctttgctctggaatgtattacatgttttcttccaactgtttgaaggagaattttgaatgtttgccacaccgctgatacccaaataattttttaaatgaagtggagcttgtggcttcctgatgtgtcaccagacaaaatattcgcttgggatatgtattctttgttttttgctccatgtacactttcagctgtgagttagtatagggcgtatacttaccggtttaatgacctcaacctcagttgtgtttggataacttagggtgtatacccttagtttccttagagttggtaggatcaagtcattggtttgctttgactgggtttttaaagtattaagtacagtgtcatcaatttacagttaaggaaaggaatcgtgaagtagaaaaattattttctttagtcttgctggtacaatttgggctaaggagtctttgttattttctgtcttgcttttttttttttgaggcagagtctcactctgtcgccaggctggagtgcagtggtgtgatcttggctcactgcaacctctgcctcctgggttcaagcgattcttgtgcctcagcctctcgagtagctgggattacaggcaagcgccaccacacccagctaatttttgtgtttttagtagagacggggtttcaccattttggccaggatggtctcaatcccctgacctcgtgatccatctgcctcggcctcccaaagtgttgggattacaggcatgagccactgtgcttggcctgttattttattttcttataactacaacttttcttcttgaattttcaggtcagaggcatgaaaaactctttacaggtttttagtggggggcttatggagtatttcaggagttctttgcaattaaatcatcttttcacttgtattgtttttcaaaactttgttgatttctaaaatgtgccaactgtgagtaaactatggtatttgcaagtggtttttacataatatttgagatgaggaagtgagattgtgcatgacatacttctcctttgtattctctcagtgccttacagcaggttactccattctgctatgacaacttgtttcaaatgttaatttacataggattttttataagccattaaggcatatgtatagtatatcagtaaagatggatggtgcatatataaatagtcttctgtaatagtgattggatttacttctcaattatgagagacaaaaattatcccctcacctgtctctattctttcaacaggttgatcccttttcatgatttttcattaggtggttcaggaagtttccatattacagcgcttcagactgtatatgttagtttaaaaatcacttttctctctctcaacttctttcttttttttttgaagacttaatttaaaaaatttgggttgttagatccgtatcatagatttggcctagcctcttctgttaacctagtccacagatgagcgaatctggttagttgaaggacattgtgatttgactctggtcacgcgaggaagtagaagggcaaagacaggaccggcagtttacatttccagtggttaaacctcacggtactttgggactgcttgttaacttttgtggttgtctgaggccaatctaacgtgaccatttctgacacctcaacagagagaggaaagcaacttgagcaatgagagtaaataacttgggctctcagagatttgaagatagagatctcattgtgagggggactattttgcaggtcctcatttctccaagaaagagatggtgttacaggaacccactgaaagccatatcccattaaatgaggaactaattttggctgggccttcttgtaatgtcctcgcaggtgtgttgtgaagattaatgcagggtagtatgtttgtagattgacacctagtctaaacttgaggtaattggtgctctgtgaatactcagtcgtgttcttttatagccttaatcatgatttgaactagtcccttgctttttaaatgactgaatgaagtccttcgtggtaagggagtacgttgataacttagtttactatatgggtttgtggtcgcatcccagtcatcagctgctatcattttccttcttcatcccttatactgagatttgggttacagctttttattcttcgaaggatcacaaagcagtgtacagacacctgccttctttaaggatgaaaggaagataaagtggtctttttttgtttacttatttgtttcacctcttgtttgagtaacttctaaggtgctattctctctctctttttgctaccccatgagctcttgtcacagccatggaaaccagcctcgtttagaaagggaacttagttcagaaggggttaaaagccttccagaatttttctttagctgctgaagtttttacatgtggttacatgactttaagttttatgcattacgctcttaattctattacaaaatgtggactcaccaattgctttgtgttttccatgtgacctgttacttcaggctacttggggaacatcttagtcctctgtagctcctgaacccagcactggtgcttcaagagagaaggtagcacgtctttgttcaaaacaaaacaaaacgacacttctggaggccacatcctgaatatgaatgttctactaagtcactcagttatggttctaaagggaaactgtaagaagacccacaaggagtggaccaagactattatttaattgcacaacttgaaactttgctgccagaagaggcagctccattcctttgactccagtgttgggctgttaactgctgcacctcattgcctttttttgtttttgtttttgttttgtaggagggtaggcactgttgggccatatgcacaaatattgtaactcttggtatctttactgcatcatagtcaataaacttctttgtaccctttg

SEQ ID NO: 687 - DNA, 3261 bp, Homo sapiens
aaacaggaaaagtaaggcagcgttggacttggggctgggagggcttaaggccagacagacgttttcatcctgatcctgtgacctgccctattcatctgagttttccgtctgatgaaggttggccatttgcaaagtatcttggagcttgtggaagaatggtggctgtaaattatgttggagaagaactgtggagttactttaatgcgccatgggaaaaacgagttgacctcgcttggcaattaatggaaatagcagaacagcttacaaacaatgactttgaatttgcactctacctcctggacgtcagctttgacaattttgcagttggtcctagagatgggaaggtaatcattgtggatgctgaaaatgttttggttgctgacaaaagattaattagacaaaataaacctgaaaattgggatgtatggtatgaaagcaagtttggtgactgtgataaggaggcttgcttatcattttcaaaagaaattctttgtgctcgtgccactgtggaccacaattactatgctgtttgtcagaacctcttatccagacatgccacctggcgtggcacttctggaggactccttcatgatccaccaagtgaaattgccaaagatggccggctcgaggccttgctggatgagtgtgccaacccaaagaagcgctatggcagattccaggctgcaaaagaactgcgtgaatacctagcacaattaagtaacaacgtgaggtagtctatggtgaacttttctttttttctccatttaaacagcactggctaaaactaaaccaccaaaaaacgatctgaaaaaatgaaatttggaagtgttacattcagaggatgataaacttgcactgatagatcttaatgttaacatccatcaaaataagacattacttcaaaaatcacatgatgcttctgcaaataagtatgttcttatactttggaggcttgagctgtcatcagctgctccccactaccccggaatgcttgagtggattaatgaatattgttaagctattggaaatgagtctgatagtacattggcttgtgtatcaaagggtacttggtacttagtttgcatttactatcatgattttgtgaatctcttgcatttactttgaacgtcaagtcagattggtctgttttataggccgctttttccttctgatgtgtagggttttttcccccttttttttttttaattaaattttgaaaattcaggttactgtaggtgttcatttaaatttttaatagttgtcattcagtgctatttggtacatatttactgttagggcaggattcccaggtttactgtgttttttttttttttttttaaagaaagctaaatattacattatgtaaatacttcttttcaccaacttctgtagtttcaccattgcatggtgtcatttcaggttatttaacagttatatccctctatgccaataattagaagtgtacactaaacatgaagtttggcatatgttgcaaaatgtcattttatcttttctaaaggctttaagaagaatatactagaatctatatattgatgttaattttgattcagaaaaaaaatacaacccagtatctaaaaagtgttaactagtccaagatagtaatgcatatgccaaagaaatattacacctaatctcatgtttagaatttaaaatagaattggtcagctacttattcttaccaccctacttccagtattttagctctgtcattattaaattcagatcttcctgattattttttctgttgaaagttaaactactgctttcaagtaatttaaagttatcctaccttttattcatgggtagttttgcaaaattaacatggtagccattgtttgaatttaatcgggcatcataacttttcatttattgaggaactaatcattattactataaagcatacaaattagccagtcagcacactttggtcttctttacctaagggttaaacatcagaacatcaaatttaattatttgcatagaaatgtgtgggctctttatataagttgactatcactaacaggtaatatttttctgtttgaagttgttacttttgtttacagcaaagtttgatgtagtgtgcagtagtgagctctagaccgatctttttctaaatcagaaagtgattaaagtatgcacaaccaaaggcaggtttttctttttcatttattcagcaactatttattaagcatcaactctgtgccaggcacgttactagctgctacatactgtctgaacatgacatacggttaagtaactttacaattattatcaaatacttcaatgtagatatttcttaagttgaaatagcattaactaggataatgctttcatgttattttattgtcttgtgatagaaattcaacttgtaccatctaaaactaggttgctataaaaataggaggatgaagtcaataaagtttatgccagtttaaaaactggaaggaaaaggtaagagctctccattataaaatagttgcattcggttaatttttacacattagtgcattgcgtatatcaactggccctcaatgaagcatttaagtgcttggaattttactaaactgacttttttgcaactttgggagatttttgaggggagtgttgaaaattgccaaacactcacctcttactcaaaacttcaaataaaatacacattttcaagagggagcaccttttatatttgataagttttcattataaaccttataataccagtcacaaagaggttgtctgtctatggtttagcaaacatttgcttttctttttggaagtgtgattgcaattgcagaacagaaagtgagaaaacactgccagcggtgattgctacttgaggtagttttttacaactaccatttcccctccatgaaattatgtgaaatttattttatctttgggaaaagttgagaagatagtaaaagaattaggaatttaaaattacagggaaaaatatgtaagtgaaaagcaataaatattttgttcactttgctatcaagatgttcactatcagatatttattatatggcagcaatttatatttttaatcattgcccattaatagacgcagtaaaatatttttgaaccagacatttggggtttgtatgtgcattaaaattgtcttttgtactgtaagttactgttaatttgaatattttattgaactgtctccctgtgcctttataatataaagttgtttctacaacttttaatgatcttaataaagaatactttaagaatcac

SEQ ID NO: 688 - DNA, 3296 bp, Homo sapiens
agggatcgccatttacataagaggagactgaggcatagagcagataagaaaatgaatgtatctgaagccacaaagctttgaagtggtgaattgaggacttagagctaggcctgtctgactccaaaactcatgcttttcccagccctgccccgaatccctgccaaaagcgacctcctccaactgcagcctcagcaccgacactctgatgctcactggtgtgcctcctgcccgcctctgcaccacacaaggagctctttgaggacaaggactatgttgaactcatctttgtatttccagccatcagcacagtgccagggccagggacggcatcaacaaacattctgctgaatgattgaatggtcaaagaataactttttcttaaggacaaaatcgtgactctgataccaataacctatgtcaaaaattgtatttagtccattaattcatgggggaaccagtaagatattacaattggttaaaagaaaatctcaaagaacctgaaatatagctctcatggtctgctccaactgccataagaaaacaccataggctggtggcttcaacaagggaaatctatttctcacagttctggacactggaagtccaagatcaaggttcaggtgtctgatgggggctcacttcctggcttgtgtgtcctcttgctatggcctcacatgccttttcctcgttgtgttattaccagttttctgtaacttccagggctgtaaaatagctcaaagaccatgaagcctgaaaaaaacccagaagagtatgctagacaagacacccaatcatctttttggtccatttcaaagtctttcacaatttttccctatagaacgcatcaatgaaaacagctgtctgggatgccgctgggagtgtccactcccccatccacccccaatcccacctctctggggttgcattttgtcatgcttctttcatcacttacttccatcagacagtgggtggtcccacagcttgggcctgaggcctttcaactgccaaccaactccacccacagtgatactgacaccccagactcacacttacaactgcctatgcagtatctcctttgtctacagtaaagaaagaaggccgcattacaatgtcctaaatggagggggcctgtgactcggaacagccatgcaagggcacagatgggctgggagggagagccctacagtgcgtggactcccttgccactcacattggcattggcccatgaagatcttagcccaggaaagagcgtgcctgacacagtcttacaggaaagggcatccccaggctgcccagacctaagggcttctacaccagctagctgggcaccattgaaaaatttaagacctcaccagaaactgcacctgacaaggggccgagagtgtaggaggaagatcacgcatgagaaggaggttcccactggaaaatcaatggaaagcaaaccctgggatgtctaaatgccaagaagagtccagctagctcattggaaaattcaaccttgacttcagatcccttgaaaatccaacatttgttcttaaaaaacaatttctgatgtctttttctgtcttccttttatgaaggtcaagttctacctgcagaatggtgtttgtgatgcaagtccacagtgtttatctctggaataacagtgggcacgaactggccaagacccccatcagccgctgacagcctcacatctctagcctgcactagcaacagcatccaactagttcgctggcctccagtttcaccccttaacccatcccacatggatgccagagtcagctttcaagatacatttagccttatcattttcctacgtaaagtatttcattggcttctgattggctgcctgtaagataaaggcccgtggtgtccaaggtgttccacaactgccccctgctcacctcccagccttgtcttcatcactccctgatcccttctttgggctctagcctcaccagctgctgggagttctctgcatgccccaggccatttctcccacctttactcacacccttcttctgaccagctcctgtcccctcagagattggttcaggggtcttcccagcacacatgctctctctctgctccagcgtgcctccgggaatcaccacatcgctcctctatgttaacaggtctgctcctccttccatgagacaatgggctccttgagagcaagcattgtttcccatgctgttgactgctatccctgcaaaatgcatgtccatctagaacctgggaatgtgactttaatttggaaatagtgtctttgcagatatgatcagggttaagatgagttcacactggattagagtggaccctcactccaacgcaactggcatccttttaagagggaaatgtggacttagcagcacacgggagaatgtcatgtgaagacagagacagattggagtgaggctctacaagcctaggcatgccagggactgccagaagccatcagaagctgggagagaggtatgggacagattcttttctcgaacctcagagggagcatgactctgccgtcaccttgattctgggcttccagccttcagagctgcgagagaagaaatgtctgttgctttaagccatgccgtttgtggtaatttgttactgcagccctaggaaattcacagggttctcatcggagcccctagcctggtgcttggtaaatgctttgagtgaattaatggaaggtcttacaatacactgcctgcctcactccctggcctcaaattgtagctgaggaagggaaagaagacttggggcaagagtactccctctgaccaagggagacgggctcagtcaacacatatttattacacacttagcaagtgcaaacagctctaccccatgtagtgagtcagaaacggctcccatcctgacagaaatgacctaacgccatggataacagtattagtccgttttcacacgctataaagaactgcctgagactgggtaatttataaagaaaagaggcttaattgactcacagttcagtgtggctggggaggcctcaggaaacttacaatcatggtggaaggagaaggggaagcaagcaccttcttcacaaggcagcaggaaggagaatgaacacagatgcaactaccaaacacttataaaaccatcagatctcgtgagaactcattgtgaaaacggcatagggggagccgccctcatgatccaattacctccaccttgtctctcccttgacatataagagattatggggattatagggattataattcaagatgatatctgggtggggatacaaagcctaaccatatcaatag

SEQ ID NO: 689 - DNA, 2685 bp, Homo sapiens
aggcatcgcgctgcccccaaacagggcagacacaaaagaacaaggggaggaggaagctatggatacagaagcggtatgctttcagttccagactcaagacgtaagccctctccccacattggccaagaaacgacttccattagcaagttgcgccggaaaggggaggtggcgggtggtctcactggactgaattcctgccacctcccacctattcagaaagcccgtccacaccctggccaaacgcataccagcgtccgcctgacgggtggcccagtcctcgccggaaagctgcttgccaaacgcccccgctcaccccctagccccaacggtgagaggggctcggctgcgtcgcgttctccaaccgctgcgccccagcagcgtccccggtcgccagtgggcggacgccaggagctcacggaggcggcaccgctcccgaagtaacggagcccggagggcgcccaggcgttaaggcaagtgcaaggggccgagcgggtgcgccgaggacgcgggggcgtctcccccagctgaggttcggtccctccaggcagccaaggcttggcagcgctagaggctgaaggacaacggccgagaacgcccaggatggggtggtcgctgaccaccgtgtcccaggtgaatcagctccgcttggaggcagggggatgactaaaatgacctccaagaagatgtcaattacaagaacaaaaatttcaacccggaatctcgagaccttcgaaaaacgacgcggaggaaaaaaggaaagaaagaaaagaaagtaaatcagatcccttccccgaaccgcagggaaacttacctccagcttggcgacccagctgttaagcagaacaaatcaatccacggatggagaagaggtcgtgggtcttctgagcccagctgatacacaccaagtaatccacgttaaggggtccgcagccccccacccaattccccactttccatccaaggccaaagagcagccagaccctgtcctctgcgctccagactcgcggaggtcgcgggcgggggtcctcaggcggccgccttctcgtccccaggggtgggcgcgcgacgcgggcagggaccgggcgcccggaggaccaagcgagcgcatcccgcctactcgtgctgggacatcacccagcctggacgccgctcctcgcctttcttccccgcgcatcgccagcgccaaccaaagatccccgccgggaaagcctctctgccaagctggaaagcgctgaaggcggatcgtctctcagacttgggtttgcaggttcacaaggcccgggaggcttacggtgggcgcctgcctaacagagggtccttgcggagaagcgcagaacgacaaatgccagaggcggtgaccgcgtcctctggataccagcgccgcaccgcgcacccgcgccgcctgcgcgccctgcagtcggctgggccattcggcccttatataccaggcggacccgcgccgggacggggcggagcggggtgggcggggagggggtggggaaggccgaacggcttcctgggagtcgtagttcgactacgtagtcctgtcgtagtcagaacaaaagctaaacaaggatggaaatggttagggtttgcccaccacagctgtcctcccttgcgcccttccttcacagacaaagctggcattccagtcctattgtcaatgccgctaggtctattctggcctttgtgcataaggtgggtcacaccagccccgaatgccgcccaggatgacaaaccttggtggccctagagtcaggttatcccagctgggccccacttctggagaccagaggtccgaaatcaaggggttagcggggttgcttgcttctaggggcagtgagggagaatctgtcccgggcctctctgagacctggtggtcattggctatcttaggcgttccttatcttaggcgttccttggcttgcaactgccttaccttcatcctccaccttttacacggtcttctccgtgtatcttttcacatagttttccctctgcgtgaatctctgtctcttcacactgtggtgtttctacaaggatgccagtcatattggataaggggcccaccctgatccagtacgacctcatcattaaccaatgacatctgcaacgaccctatttccaaataaggttacattcttggaggtcctgaagattaggactgcaatatattaatattttggagttgtagggggaaaagttcaacccctaacaggtcttctatgccttgttgcacctattaacagccattgtgactaaccaacccttttgataaaagcaagccctgagaagcaagatgaaatcacaaaatcactgaggctgtgacaggaggggaagccaagaacattggaatctcctgggccaggttttcctgtggccacggtgggattgctggagaggaaatggtcagaaaaagaaggcatcaggttgggcgtggtggctcatgcctgtaatcccaccactgaggtcaggagttcgagaccagcctggccaacatggcaaaaccccatctctactgaaaatacaaaaaaaattaggtgggcgtggtggtgcatgcctgtagtcccaactactcaggaggctgaggcatgagaatcgcttggacccgggaggcggaggttgcagtgagccgagattgcgtcactgcactccagcctgagcaacagagtgagactctgtctc

SEQ ID NO: 690 - DNA, 2518 bp, Homo sapiens
tgctgcggctggcccactcctcatccctgcaccatggaggctctcccagaggcatgtcaaaaccccagcctgacgaccaagctctgtccactgcccaccaccaacagccaccacttgagcctagatgtgtgcacgcagcggcggcgtccacccaggaggcagaccccaggaagaggcctgccgtctgggaagcaggctcaggcctgtgtgggcagcaacctagacggaaggggctaggtgctgaggggccatgtcccttgagctggaggagggcacagcaaggaactctgcagcatggacctcaggacagagctcctgggtcggggcattgccggcctgcaacgcaggagcgggtcgggggcccgcactggtgagtacagctccagcgttggtgtgctagggccactgtaaggaggtgcctccaacggggcgtgaacagcagcagcgtgtggtcccagttctggaggctccagctgtccacagggctggttgggtctgaggcagttgtggggaacctggcctctcctccactctcgtggggtttgcaggccgtctttgctgttccttggctggtggaggcagcgcctcaatctctgcccgaatcttcacatggtattctccctgcgagctgtgtccaaatttcccgtctttataaggacacagtcacacaggatcaggggcccacactcccgggatgactcaccctaacttgatggatcacatctgcaaagaccctatttccaaacaaggtcacattctgaggccctgggggttaggccttcaacatatgaattcgaggggacacaattcgacccgtaacagcttctgtctccccacacatccgatgtgcttctccctctgccacgcttaggctggggtctctaccaggcacctcgacccgagtcctcactcaggccggctctgagcctcacagctctgtctgtgggagctgccctagttttccacggacctttattaggtgacatgggaatatcgagcagtgccccagaatccctgggttttgacacagtgcttcctcctcacctgaggcagcattcccaccctcctgcagggatctctccgaagagattcctctgcagagatctctggcccgcggagctcccttctccagcggtcagctcggcagtgagcggccccacatggccagagggcatctctgctcctgtgtttgggaagcagacccacgttccccagaggaccgggagccaggactgccactcctgcgaccccaccttaccagagtgggaaagaaaaatccctccatagccgattagctgtcacggccactctgtgtaaggactgcagaggcgtggcaaggccgtgactggcgtccgtccacagaagccctctcacaggcatggccacctccagttcggcattctggcggtggggaaacggcctcctaggtcggtcccaggttagaagcctgttctgccccccacaggcctgcatctcagtgttaaggggtgcagtctccccgctgcaaccattccaccagtctgttaggcctcctgcttctaggtgaagggcgtggagtgagaccagtggaactgatggacacaagcttatcgccacactggttttcctctgaaacaaggccctggattacaagtgtcatttgtggaatcccaaggcagcgaaggaggccaaggatggcatgctggcgggagaagcctgcgaggacccgtccctttgaggatccatccctgcaaggactggctctcgacaaaaggcacgccgtgtgctctgcctgcttcctggaggctggctgccctccccacagggggtggtgccacatcagggctcagacaccatcctcgctgttggaaagatgggcgcccagctgtccatgctgctggaagggtctggtgggggtgaataggctacggagcctgtgtggccaccatgcctgtggcctcagccactttgtgcaaaggactgcagaggcgtggcaaggccatgatgtgtccgtccaccgaaggcctccctggttttgagcccctcctctgcagggaatgcttccagcattttcatggattacaaatgtcttagcccctgccctttcaagcagttccttagctcccctccccagtccacagagccatctcctgcctgtgagttaggcctaatcaacgtaaatctgtcctccaggccctcccttccctccagatgaggtgcgcaaccagtggtgctgctggacgtttgaaaatacaaaaggccgggcgtggtggctcatgcctgtaatcccagaattttgtgaggccgaggcgggtggatcccaaggtcaggagttcaagaccagcctggccaagatggtaaaaccctgtgtctactaaaaatacaaaaatcagccaggcatggtgacgggcacctgtaatcccatctactcaggaggctgaggcaggagaatcgcttgaacctgggaggtggaagtttcagtgagccgaggtggtgccagtgcactccagcctgggtgacagagcgagactcctgtctc

SEQ ID NO: 691 - DNA, 2440 bp, Homo sapiens
aaccggcgcgcgcgtaggggctgggaggccggcgcgcagatctggcggtgagcgctgccgccccggggcccccagccatgtcggccgaggagatggtgcagatccgcctggaggaccgctgctacccggtgagcaagaggaagctcatcgagcagagcgactacttccgcgccctctaccgctccggcatgcgcgaggccctgagccaggaggccggcggcccggaggtgcagcagctgcgcggcctcagcgcgccgggcctgcggctggtgctggacttcatcaacgccggcggggcccgcgaaggctggctcctgggcccgcgcggggaaaagggcggcggggtggacgaggacgaggagatggatgaggtgagcctgctgtccgagctggtggaggcggcctccttcctgcaggtcacgtccctgctgcagctgctgctgtcccaggtgcggctcaataactgcctggagatgtaccgcctggcgcaggtgtacgggctgcccgacctgcaggaggcctgcctgcgcttcatggtcgtccacttccacgaggtgctgtgcaagccccagttccacctcctggggtctcctccccaagctccaggggatgtcagcctgaagcagaggctgagggaggcccggatgactgggactcctgtcctcgtggccctcggggacttcctggggggacccctggcccctcacccctaccagggggagcccccgtccatgctcaggtacgaggagatgactgagcgttggttcccgctggccaacaaccttcctcccgacctggtcaatgtcaggggctatgggtctgccatcctggacaactacctcttcatagtgggcgggtacaggatcactagccaggagatctccgctgcgcattcctacaaccccagcaccaacgagtggctccaggtggcctccatgaaccagaagaggtctaacttcaaacttgtggctgttaattcaaaactctatgccatcggagggcaggccgtttctaacgttgagtgttacaaccccgagcaggatgcgtggaattttgtggcgcccttacccaatcctctggctgagttctctgcctgtgagtgtaagggaaaaatttatgtcattggaggatacactaccagagaccggaacatgaacattttgcagtactgcccctcttccgacatgtggacgctctttgaaacatgtgacgtccacattcgcaagcagcagatggtgtctgtggaagagaccatctacatcgtgggggggtgtctccacgagctggggcccaaccgcaggagcagccagagcgaggacatgctcaccgtgcagtcctacaacaccgtcacccgccagtggctctacctcaaggagaacacgtccaaatcgggtcttaacttgacttgtgcgctccataacgacggcatctacatcatgagcagagacgtcaccctgtcgaccagcttggaacaccgagtgttcctcaagtacaacatcttttcagatagttgggaagcatttcggcgttttccagcttttggacataacttgctggtttcttctctttatctgcccaataaagcagaaacatgactgaattgaattggtagatgaaaaaaacctggttcaagttttttttaaaatgtggtgtcccattccaagggagaccaattcctaaagggtaaagaagggttaaagtaggtcacatatatacagtagcagctgtaaataagcttacttgaactaattacttgaaaactggtggaaaaaagagaccaactttgttattttttaaattattgatttttaaattatgggagcaaatccatctccaaacatgatactcttgggccaatgacggatcatcaaaatgtagattcattgtgtctgtgtggtaaagggccaaagtcaataattgggacaaatggtaaagatgattttaaaatctgttgtatttaggtcccttgacatatcattagcaccttaagtgagaggttttctttttcttatcagtgtccttgacaagcattcatattaacatattcattctctcttctccatcacccatacccacacatacatctagtatgtttagggttctgtgttcagatattttgtttgcacactactttttaggaaacttataatgatggagccctacagtgaatccttaccagtgttcagtcctccccaaaacttgcataaaaatattcttagctatttttccagccttttttgcagttacaaatgctggataaatagactgataaaacctcttattttatttatgtggcaggttgcatatttatgtggacacataggttgcactgctaggcattctgtattgttttaaagaggatatattatttagaaaaatggacatatgaatattattaaaaattgagtcttaaatttaaatgggaagggaagaaaacacc

SEQ ID NO: 692 - DNA, 2399 bp, Homo sapiens
catgctgcagaagcgggagaaggtgctgctgctgaggaccttccagggccgcacgctgcggatcgtgcgcgagcactacctgcggccctgcgtgccctgccacagcccgctctgcccgcagcccgccgcctgcagccacgatgggaaactcttgtctagtgatgtgactcattacgtgatcccagactggaaagttgttcaagattatcttgagatccttgagtttcctgagttgaagggaattattttcatgcagacagcttgtcaagctgtgcagcatcaaagaggcaggagacagtataacaaactgcgaaacctgctgaaggatgcgcgtcatgattgcattctctttgctaatgaattccagcaatgctgctatctgccacgggaaagaggagagtccatggagaagtggcagaccaggagcatatacaacgcagctgtttggtactatcatcactgccaggacaggatgccaattgttatggtgacagaagatgaagaggcaattcagcagtatggaagtgaaacagaaggagtattcgtgattactttcaagaattacctggacaatttctggcctgatttaaaagctgcccacgagctttgtgattctatccttcagtctcgacgggagagagagaatgagagtcaggagagccatgggaaggagtacccagaacatcttcccctggaagtgttagaagctgggattaaatctggacgctatatccagggaattctgaatgtcaacaaacacagagcccaaatagaagcttttgttcgacttcaaggagccagcagtaaagattcagatttagtcagtgacatcctaatccacgggatgaaggctcgaaaccgctcaattcatggagatgtggtagttgtggagctgcttcctaaaaatgaatggaaaggaagaaccgtagccctgtgtgagaatgactgtgacgacaaggcttcgggcgagtccccaagtgagcccatgcctacaggtcgagtggtgggcatacttcagaagaactggcgggattatgtggtgacatttccgtccaaagaagaggtccaatctcagggcaaaaatgctcagaaaatcctggttacaccttgggattacagaattcccaaaattcgaattagcactcagcaagcagaaaccctccaggacttcagggtggtcgtgcgcatcgattcctgggagtcaacatctgtgtatccaaatggacattttgtgcgtgttttaggaagaatcggagatctggaaggggaaattgcaaccatcctggtggaaaacagtatttcagttattcctttctcagaagctcagatgtgtgagatgccagtaaacacaccagaaagtccctggaaggtgagtcctgaagaggaacaaaaacgtaaagacttgaggaaaagccatctcgtattcagcattgaccccaaaggttgtgaagatgtggatgacacactctcagtcagaaccttaaataatggcaacctggaacttggggtccacatcgcagatgtaacacactttgtggcaccaaattcttacattgatattgaagctagaacaagggccaccacttattatctagcagatcgtcgctatgacatgctgccttccgtcctcagtgcagatttgtgttcccttctgggaggcgttgataggtatgctgtaagcatcatgtgggaactggataaagcctcttatgaaattaagaaagtgtggtatggcagaaccattattcgatcagcatacaaactgttctatgaagcagcccaagaactactggatggaaacttaagcgttgttgatgatattccagaattcaaagacttgggtgagaagagcagacaagccaagctggaggagttggtgtgggcaattggaaagctgaccgacatagctcgccatgtcagagctaaacgagacggatgtggtgccctggaactggaaggggtagaggtttgcgtacagctagatgacaaaaagaacattcacgacctcatccccaagcagcccctggaagtccacgagacagtggctgaatgcatgatcctggccaaccactgggtcgccaaaaagatctgggagagcttccctcatcaggccttgctgcgccagcaccctcctccacaccaggagttcttttcagaactccgggaatgtgctaaagccaaaggcttcttcatagatacacggtattcctcttttgagggggcagaggaatggagtggcatgctgtatatttagttatcttacagttgttcttaaaatgtgacagccagatctttgaccaaaaagagaaaacagattcttggctctcctcatttttgaagacacatttttccctcttcattgttatgtatagagacttaaaacaagtttatttaggcat

SEQ ID NO: 693 - DNA, 2672 bp, Homo sapiens
atcccaatagctctaaatctgaaaccattgcattaaagatgttgttacgattattaaaagcattatcaactaggatcacatgcggctacgtgtctcggtgggcgacagctaaagaaacttgcaagcccgttgttccacaccaatttcagcgcgatggagacctctccagtctctccacatcttctctttgccgggcggagggaggaggctctctccaaccccacgactgccgttctggggggcaagtcgagacgagcacgcctggctgctacctccgcacccgcgtcccacaagcttgctttcggggatctcacacatcaacatggaatctctccagaggccagaggagaatgaggggcactcgcgaggactaaggtagaaagccaggatccccgggctgcgggcgagcgcgtctcccatggctccccaggctcagccgctgcctcttctgggcaaatgcaaagcaagcaacgcacccaccccccgccctccccggaggccgacctggaaaaggaagagcgggaaggtgtctacaactgttcctcagccacagacagtcccaggatcatggcccagagagagagagagaaagagagaaagggacaggattaactcactgctgctccagatcatcggccatagtaaacaagccttgccaggtcctggcgagcccgcccagcgcctgacgccagcaccagctgacccgggaggccgcggggagcaagggggcgtggccgcgcagggggcagggctcgcggcgggccggcggtcggcggcgggaccctcaaaactctgcaacttggtttcagctagtggggcccttgctgtgttttcaatcactggcatgtgtcccggcagagatgtctctgacggtctcagaatgggacagtaatcctggtcacacatttgggggagtccttgcaggagctccgacagccctcccttctctcataactaaaaagtggtagaactacgcctgcacgctcgcacccactctttgggcttcccattgtaactgtgtcctcctgaaatcgacccttgttaatgttccttctagtaagaggcttaaatgtttgtggagacaacgccattggttgaatgctcctacaaagggcctggatgccagatttcgaaactaaaatacaggacacctagttaaatgtaaattccagatttaaataaagcaaatacttttttagaataagtatgggccatgcagtatttgggacataagtaggcatcctgtattttctctggcaaacctaaacctatatgacatctgccaaaatgggcatatctctgctctgatgttgactctgaccccaacctattttccagggaaaatatagctcaactccaggtcaccctcagtttggaggataacagttgaaggactcaccaataaggctaggtctcctttcggtatgtaaatgcggggacagggagataaggctggcttggcccagaggtcctgagtgcacttcagtttgctcagcagaggagctaaatcttgaggctggctgctgaatttgcttgtaccggtaaacagggcctgacctccctggaactgtcagatttcagatcatccccttagttaaaaccagactaggggtggggcgcggtggctcacgcctgtaatccctgcaccttgggaggccaaagtgggtggatcacttgcagtcagtagttcgagaccagtctggccaacatggtgaaaccccatctcttactaaaaatacaaaaaattagccaggtgtggtagcaggcacctgtaatcctagctactggggaggctgcggcagggagaattgcttgaacccaggaggcggaggttgcagtgagccaaaattgtgacactgcactccagcctgagagacagagtgagactccatctcaaaaaccaaaaacaaacaagcaaacaaacaaaaaaaaccagactggggagtggtggaggatgggtgagagaatgctggtgcacaggggtttatcaaagcatttttctttagccttcctgcaggacccagatgattctgagatttcttctttgtagcaacacagtgttaagctgaccattataaagacttaacgtttaggagaaccagcatttatagagtttaggggcttaggaatttgccagatgtggtacaaagtagttcaactagcagaggacttgtctctttcatgcaacctttttttttttgagactgattctcactgtcacctaagctggagtgcagtgtcatgatcatggctcactgcagccttgaactcctgaggcaggagaattgcttgaacacgggaggaggaggttgcagtgagttgagatcgtgccattgcactccagcctgggggacaaagcaagactccatcttggaaaaaaaaattcagatttctagcacctaccctctgagattcagattcagctggtttggcttgatgctagaaagccgcatttttaggaagcaccgcagatactggtgctccacgagactcactggttggttagaagtatagattctggagtcatgaagcctggttaagttcagtatttgctttgccacttatccactgtaaatccttggccaagttatttagcatctcttaatttcttcctctggcttgtatcttgtgagaactaaccaagataattcaaataaacatgtggtacactt

SEQ ID NO: 694 - DNA, 2779 bp, Homo sapiens
cacaggcatcaaggcaggcatcaatctcactttatagctaagaaggatgaggggacaaaaattaaaaagtcatgttctattcactgctatgtaaatcttgccttaagatcccacagcctggaaataaaagaactctaattcaaacttggttctaattgcaaactttatattccagttgggtcatggtgcctttaaatggtgtctctatgtcagtcatttaacatgcactttgttactaaatttatttttctaccacataaatcagatgtcattgtcttttaaaactttcaattggcaacagttgtgccctgtgataacattccttgacatctgggcccagcactttagcccttccctcatcattctcagtcccccttgtttgttaccattcaaaggaccttgccttccattactacttatgtttttgcttttattattattttaaactgacacacaattacacatatttatgatgtacatgatattttgatatgtttacaatatgtaatgatcaaattggggtaattagcatatccattaactcaaacatttatcattgcgttgggaactttcaaaatctgctcttcaagctatttgaaaatatacgataaattgttaattacactcaccgtatagagctatagaacactagaattactcctatcgagctgtacttttgtatccattaaccaacctctccctatccctgctccccctacccttcccatcctctactacctaccactattctatactcttctatgaaatcaacctttttagcttccacatgagggagtacatgtggtatttatctttctgtgcctggcttatttcacttaatgtcctccagttcatccatgttgctgcaaatgtaaggacttcattattttttatggctgaatagtattccattgtgtatatataccacattttctttatccattcatctattagtggacacttagggtgattccatattctggctattatgaatagtgcagcaataaacactggagtacaggtatctctttgacatactgatttcctttcctttggatatatacctactagtgggattgctggatcacatggtagttctatttttagttttttgaggaacttccataatagctgtactaattcatattcccaccaacagtgttcaggcactgtttacttatattaatcacaatgatcatgctaatatcctgtaatcctattattatccccatttaaagaagaggaaacaagctgaaagaaactgtcactttctgggatttataaagctaacagagctgggctataaaccgaaatctgccattacggtttcccaagcccatgttctttaatgccatgctcgcgcctcaactaaatacatttgcacccacacccatcctggcaccctgccctcctttaaacatggaggagttactgcggctactcctatcagggttctagattctaccccctcttgcatgcctcagttccctcatttataaaacagatcaccatttgacagatgacgatatctattatatctgtaaggtattacagggattagcttctgactgtaaaatgcttggcatggtctctggtacttgaaaaggacatgtgactgatacctattaataattatattaataattatgctgcccaactcctagtttttaaaaatcttctctctcttcatttaaatgctgtatgctgtttcttctgtgttccattactggaacactaagcatgtgggagttacttataccctgttgttcaaggtcatcgccaaggtctgattgcaaaaattcaaaaaattgcaaccttaggcataaatgggttaagtaaaaacaaagtaaaaaagcaaactacaaaaagatctgactttgatgctcttctctaggtatcattttctttcccttcacaactaaactccagagttatctacacacgttatttcattacttcttctttaaccttccttccattcaccttgaggctgttcagttattaattacttttcttattagtccattagccccttttcaagcccaatgttgcttgctcctattttggcaatgctaaccattctttcctgcttaaaatgcttcatgacactgtgctttctaagtgtccctttctcctctttggctggttcttttcagtctccttcaggggctgtacttcctttacctgatccctctcaattcttcttcagagttccaaatcctggctccccgttactctcagtaaataccatccctctggttgaacttaacctacgtattcgttctgtttttgttacacaaatatttaatgagcggctattacgtgacgggttctttttaataagcactggggataaaaacatgcatgactgctgcattagtggtctgattggaaagaatgcaaaatgtgcatggaatcatgaaagcatataatgaggtctggcctggctaatgtgatctgggaaggcttgaggatgtaatcaataagttgtcaatgaaaaaaataaataggagttaactaagtaaaatgggatagaaatgctacatagcatgtgcaaaaaggccctgtaacaagagaaaacgtggctttttaaaactttggaaagctagtgggacctaaacagagaatgaaggaaacaagctggagagtagaaagaccagccttgccagccacattgcagacttttaaaattagtaccgaacgcatttcaaaagtgtagaaaataaaaaactcaatagaaaggttattatataaactggaggaaattgcccaaaaattc

SEQ ID NO: 695 - DNA, 2777 bp, Homo sapiens
aggcaggtgaaaagacatttacaacagataaagggcatataaagaacaacaggaagaaacgagggaaatcttacggctcagccactgtcagggctggggggttctcggtgcaccctggaagcagctcccaccaccggggccacagagaaacccacacaagccccagacacgtggacaagaatactcagagcagcctggctctccacaacttctgaccaagaaccaccggaggcccagcagagcagaacggagcagtctgctgtgccgaggtgggtttctgcagcggacattattcggctatgaaaatgaacttgtggcagcccctctgcatgggcaaccttcatgccaagtgagcaacgtgagacttcaacaaacaccaagatccacgtacaaagctcaaaacaggcaaaactgagcatgtccaggacacgcacaggtggcaaagccataaagcaaaacgaggacatggtcacaggctgggatgtggctaacctcccaggtgacacctggggatggtaaggggctggccaggttccatttcacatgggtgcaacctaaactgcatacagctccttatagttacccacatgtccacaggcctcacgcacttttcttctgtgtcacattccacaacaaaagaacaccacacacaggattctggggaatcccacaggctggaagagccaggagcgtggcctcacctggggttgatctccagcgtgggctgcaggagctgtgcgcgctcctcctgggtcttggccagctgctgcatgcgcaggaagtggcgggcagcccccatctccagcacggtgaccatggcagggtgggtgtccagtcggagggtcacctgtgagcaaagcccggggttgagggtgatagaggttcccaatgtgagagggctggcaggatcttaccaggggtgaaggtcacccagaccacgaggtagcaggcggggtctcaaggactcccctggaccagcgctgctccctccccattacccactaacttgtgggccctgagctgatgccccacgcaaagatactgtgcccgaggggctccaccaccctggtgccccgctgctgcctccaggagctgcccgaatccatcgtcctctgctccatgccagcccaccctgcatgaggccccttcctccaagtgaccatgcatgggacgctcatttctcactctgagctagacaggttggtggggggagtcttagctctctgaagcccacccaaaacccccgactaagcacccaagtgagcatgtgagctcctgagggctggggtagcatgtcccttgtttggaacccccacgtcctcagccattgcagctcccactcaggatgctggtttttcagttctcagttcacacctgctctggagcagggctgggagaaagacacggccttcctgcctcagcggcactcccgagcaacacgtgccgagcagggacccacagggtctccacctgacaccaagggcttctgctgctgctggaaggacacccaacgggccaggtactgggagccaccagctggccagcctgttagggacactgcggccaagtggtggtccatccccgggaaagcctcaccttcacgttggtgacacgcgaccccagcacatttctcatccaggccatgagctcctccgtctccttctctgataggcactcggcggctgcggaagagcaggcgacagggagctcaggcctgcatcccaactccccggcttccatgggggccacgcagcatgcttccagctcccacctcctctcccaccaggatggagacacaagctagcaagatgcttttcatctaaaagtaaaacctcaaaggatgcttcaggttgcctgaggcccatacaacttggttagggctttaaaaaaatacacagcctctcaagaagctgggccagctccagaagccaccgtggcaggagcactggacagacccctgatatctaaaccaggaggcaccttcctccagtcaccagggtgctcccacaaggctcttctcgggggtggctgagcccaggtcaactgacgaaaacccaaaggaagccctcgctgcggggcaggagaggcgtgcggggagtggaaaccagccccacgcctagagagcaggggatgccgacctggggacctgtcctcaaacttctcctccttgtagtgatccacgactatgtccgtctccacagagatcagcttcttcttgtcaaactcacgaaggtgcagcagggtgagctcatcaaactgctcaaagcagaagagaacctgcaggtggccaagagcagctccatcagaccccgggggcctccagccaccacagaagaaaggatgagggcggcaggagggctgggggagccaagcgggccacactggggaacaccggggcagttggggttcctaggcctgcatgacagttactacgacacctgggtctaaggaaggctctgactgccttcaaggcagaagcactccacgcataaagaaatccacatgtggctgagtgcagtggctcacgcctgtaatcccagcactttgggaggccaaagcaggcagatcatgaggtcaggagttcgagaccaacatggtgaaatgccgtctctattaaaaatacaaaaatttgctgggtgtggtggtgtgcacctgtagtcccagctactcaggaggctgaggcaggagaatgacctgaacccaggaggccgaagttgcagtgagccgagatcgcaccactgcactctagcctgggcgagagagcaagactccatctc

SEQ ID NO: 696 - DNA, 1952 bp, Homo sapiens
gcatttctgcattcgaagaagaatctgagagaaacctgacgcagggagcatgggtatctggacctcaggcactgatatcttcctaagtctttgggagatttacgtgtctccaagaagccccggatggatggactttatccagcatttgggagtttgctgtttggttgctcttatttcagtgggcctcctgtctgtggccgcctgctggtttctgccatcaatcatagcggccgctgcctcccggattatcacgtgtgttctgctgtgttgctccaagcatgcacgatgttttattcttcttgtctttctctcttgtggcctgcgtgaaggcaggaatgctttgattgcagctggcacagggatcgtcatcttgggacacgtagaaaatatttttcacaactttaaaggtctcctagatggtatgacttgcaacctaagggcaaagagcttttccatacattttccacttttgaaaaaatatattgaggcaattcagtggatttatggccttgccactccactaagtgtatttgatgaccttgtttcttggaaccagaccctggcagtctctcttttcagtcccagccatgtcctggaggcacagctaaatgacagcaaaggggaagtcctgagcgtcttgtaccagatggcaacaaccacagaggtgttgtcctccctgggtcagaagctacttgcctttgcagggctttcgctcgtcctgcttggcactggcctcttcatgaagcgatttttgggcccttgtggttggaagtatgaaaacatctacatcaccagacaatttgttcagtttgatgaaagggagagacatcaacagaggccctgtgtgctcccgctgaataaggaggaaaggaggaagtatgtcatcatcccgactttctggccgactcctaaagaaaggaaaaacctggggctgtttttcctccccatacttatccatctctgcatctgggtgctgtttgcagctgtagattatctgctgtatcggctcattttctcagtgagcaagcagtttcaaagcttgccagggtttgaggttcacttgaaactgcacggagagaaacaaggaactcaagatattatccatgattcttcctttaatatatctgtgtttgaacccaactgtatcccaaaaccaaaattccttctatctgagacctgggttcctctcagtgttattcttttgatattagtgatgctgggactgttgtcctctatccttatgcaacttaaaatcctggtgtcagcatctttctaccccagcgtggagaggaagcgcatccaatatctgcatgcaaagctgcttaaaaaaagatcaaagcagccgctgggagaagtcaaaagacggctgagtctctatcttacaaagattcatttctggcttccagtcctgaaaatgattaggaagaagcaaatggacatggcaagtgcagacaagtcatgagagaccccgactactcctcagccacatcgcaccaacaattctcttcaggtctaggatggcagtcactattcatgccggataatagagaactatgtgacgcagtcctctcaggagtctgagtttacagagccaacttgcagcacctggttatgcctcctttcatctcaaagccaaagagctgccaggtaaatggttatgtggtctatgttccaaacaaaccacatgatcttgcctgtgtcacaatgtaacaagactctagctgggtcccctggtgatgagtttcagcatagaataatgttcaaggaaaagaaaacgaaaacagtttaaatctctaccacagcctcacaagcaaatgctaaggggaacatacatgtaaaaagccagcaaactatcttcaaactcttccgtccttaatgtcttccatggctattgcccccacaatggtctcttttctccctgctcccttattaaagaactctttctgaaaccc

SEQ ID NO: 697 - DNA, 2262 bp, Homo sapiens
tgagaattcagtacctccaccacctcctcctccaccaccacttccccctccacctcccaatcctatccgatccctcatgtccatgatccggaaacgatcccaccccagtggcagtggtgctaagaaagaaaaggcaactcaaccagaaacaactgaagaagtcacagatctaaagaggcaagcagttgaagagatgatggatagaattaaaaagggagttcatcttagacccgttaatcagacagccagaccgaagacaaagccagaatcttcgaaaggctgcgaaagtgcagtggatgaactaaaaggaatactggggacacttaacaaatccactagttcaagaagcttaaaatcccttgaccctgaaaacagtgaaactgagttagaaaggattttgcgtcgcagaaaggtgacagcagaagcagatagcagtagtccaactgggatattagccacctcagagtccaaatccatgccagtgttgggttctgtatccagtgtaacaaaaacagccttgaacaagaaaactctggaggcagaattcaacagcccgtcccccccaacacctgagccaggtgaagggccccgtaaattggaaggatgcacaagttccaaggttacgtttcagcctcccagtagcattggatgcaggaaaaaatacattgacggtgaaaaacaagccgaaccagttgtagttttagatcctgtttctacacatgaaccccaaaccaaagaccaggttgctgaaaaagatccaactcaacacaaggaggatgaaggcgaaattcaaccagaaaacaaagaagacagcattgaaaacgtgagagagacagacagctccaactgctgatccataaaccagaagcctgacatgtttggaagtccttttcaataagcacatgattagtgttgttatattggcaagggctgtagacattctgctctggtcactgtattcagaatacaggttcttttctggtgtcacttttgcaagtagcaactataaacataagtaagctgtttagcaaaacacacattcctagtaggttttggttttttgatctttataaagatgaggtttttttcctagttactgtattaagtatgacttcttttagaaggttacaaaaaaattcagatgttgatacctttttaggaaatgtgcataccactcatcaaatggaatgctgaaagtttgaggtgcttgtatataatcggataaacaaaactgatcaacccaatgtgattttaaaagcccccaaagaagcttctgttttgggtctgatcctcttgatggagaaactgcagcagcatggaaattgttgggtactgtggcatacaagttattttctacagtagactgagataaactgaaaactcaggagctggcatcaaactcgtagtcccatagtcagtgttaattacacacattgttaactattggatgaaaaatacatgctattgattgtgtccaaagcctcccgaggacctccgtggggatgctctggtagcctgaatacagaactgaggtgaaagtccaaaccttgaattttacagtagtaagttggtaaaccatgtgctctgtgctatgagttaattatgttttcccaaatactaatgtggcacaagtaccatattttatcagagttcttatgtacagtatggtgaagataagtgacaagcacacatttttcttgcttcactgctgttctatattacacaggtttgttgttgttttttttaaaaaagaaattaagcagtagttagtctctaaaaatacaatgtttcaggctaccacagtgaataaatagaaatgtaatcagggattaaaaaaaaaacttatgcagcttttcaaagttgattgtttcaaaattggtgtttatttaaaataagtggtaatgtacttgaatgcactttttatgacaatgattcagtaatggtaattttactattaaagaaagtgaaaggtttagttttgttagcatggctcagcatgtagctgtcaggtgtttttcacctaagggcaaaagaaaatgatagtaataattgcagtagttgtattgtattgtatttttgcacgcgtggtaagcataggcttgaagaggtgggtaggcaggtacatgtacttcctaaatttggagataattatctttctgtaagttcgttatgcttgactgtttccatgttctcccaataatgattttatagttacttatcactttactcatggagaattaaaacgtaatgtttttcaactgt

SEQ ID NO: 698 - DNA, 2082 bp, Homo sapiens
gagttggcgctgcgggccgggcgggggccgcggaagctgcgatgcggacagggcagcggcggtgacccgagctgccgcccgacatgaactcgctggagcaggcggaagatctcaaggcttttgagaggagacttactgaatatattcattgtttgcaacctgctactggacgctggagaatgcttcttatagtggtatctgtctgtacagctactggtgcctggaactggttaatagaccctgagacacaaaaggtgtccttcttcacatcattatggaatcacccatttttcaccattagctgtatcactctaataggcttgttctttgctggaatacacaagagagtagttgcaccatcaattatagctgctcgatgtcgaacggtattagcagaatacaatatgtcttgtgatgatacaggaaaactaattttgaaacctaggcctcatgttcaatgacaatcttcactcattgttatgggacttaaaatagcctttcttcgaataagtgatacagcaaaaagccataaaggattccttttgcggttggatatgtaaaggtcatagcagcaactgacaagaagtgtgcaatatttacctggattatcttgatgatggtgactcattatcagtgctttggtacttttgattacctgtgtttcagtattagtgtcactttagtacttcagatcctgcaaatatttttgcagatgaagtatgtatgtatgttactaagttaaacttagaaacagaacctcattcagtttttataatgtatttttgcaaactactgtaaatagcaaatcaatgccaatgttaaacaaagaggaaaacgttgtgtggactttgttctcttgcaccggtatttcaggaacatctgcttgccatccccacagctctttaaaactggctattatgtgtgcctttcattcttacatttctaatcatactgcaggaaaaacattggattcagcttagactgaggaaaactctccattatgttgtaagaaattatagatgttttgagagacactttttgttaaaccagatattgaactccagcaactattgtggttatatttttagttcattgttctcatttaatgctaaatatcctttatattgctttaataattttcttttttttttttttttttttagacggagtctcgctctgttgccaggctggagggcagtggcacgatcttggctttctgcaacctctgcctcccaggttcaagcgattctcctgcttcagccttccgagtagctgggactacaggcgcatgccaccatgcccagctaatttttttgtatttttagtagagacggggtttcaccacgttggccaggatggtttcgatctcctgacctcgtgatcctcctgcctcatcctcccaaaatgctgggattacaggcataagccaccgtgcctggcctctttaataatttttaaaataccctaaaggcttgtgaatatacaagtctactgataaattatgtattgtctgggaatttgatagtcattgttttagataactggattttacgctgtggtagacaggctgtgacactagtgttgcacaggtgtaattggtcatcctatgccttcaccagaataacttgggagtggtgcctgaaactagagtctacaattctcactgtttagagagtgttaatgacatactgtgtatgcataatagccgcatgtactataatagcccttaaaattaaactattgggattgctgtaaatattttaaagtactggaggtgccttttacctgtttattagattttgaaaaggtttaaattatttcatgagcaatcttttaaatttcatttaacataaagctgaaaattcaataacaggataaaaaagctttttaacaaggctgccatttaacttaaatgtgttcatcttagctttcacttgtataaaatttgattctttgaactgcagcaataaaaccctcagctcctaagaagtcttaagagggtattctatatattctgctttgttttattttctgtaaattttgtaggtaaatatgtgcattaaaaataaatactttatatat

SEQ ID NO: 699 - DNA, 2433 bp, Homo sapiens
ttttttcagccaaaatatcagaggaagacaagagttccacaagagccatttgcttttcgggtaggactctgaggaggagttggctccccagccctcgtggaagcactcggcagcctcctggcttttcctgatctccatagggagcagatggccagagctcggagggcagttgtagggagcgttagagatgtgagcactgcagccacgaacctcttttattttaccgacttctgcatcttccttcagccaacccactgcttctgctgtccagaggtttccagctcaaattacttaagtgagagctttttcatggtgaaaggcgcagccctcttcttacaacagggaagcagccctcaaggccagcggagtcttcagcacccccacaagcatgcaggtgatctgcctcaacatcttcaggtgatgatcaaccttctgcgttgcgaagacagaatcaagctggcagtgcgcctggagagcgcctgggcggaccgggtccggtacatggtggtggtgtacagcagcgggcgccaggacaccgaggagaatatcttgctgggagtggacttttccagtaaggaaagtaaaagctgcaccattgggatggttctccgactgtggagcgacacgaaaatccaccttgatggagatggtgggttcagcgtgagcacagcaggaaggatgcacatatttaagcctgtgtctgtccaggccatgtggtctgccctgcaggtgcttcacaaggcctgcgaagtggcccggaggcacaactacttccccgggggtgtagctctcatctgggctacctactatgagagctgcatcagctccgagcagagctgcatcaacgagtggaacgccatgcaggacctggagtctacgcggcccgactcccccgcgctatttgtggacaagcccactgaaggggaaaggaccgagcgcctcatcaaagccaagctccgaagcatcatgatgagccaggatctagaaaatgtgacttccaaagagattcgtaatgaattagagaaacagatgaattgtaacttgaaggaactcaaggaatttatagacaatgagatgctacttatcttgggacagatggacaagccctcccttatcttcgatcatctttatctcggctctgaatggaatgcatccaatctggaggaactgcagggctcaggggttgattacattttaaatgttaccagagaaatcgataatttttttcctggcttatttgcatatcataacatccgagtctacgatgaagagaccacagacctcctcgcccactggaatgaagcgtatcattttataaacaaagcgaagaggaaccattccaagtgcctggtgcattgcaaaatgggcgtgagtcgctcggcctccacagtcatagcctatgcaatgaaggaattcggctggcctctggaaaaagcatataactatgtaaagcagaagcgcagcatcacgcgccccaacgcgggctttatgaggcagctgtctgagtatgaaggcatcttggatgcaagcaaacagcggcacaacaagctgtggcgtcagcagacagacagcagcctccagcagcctgtggatgaccctgcaggacctggcgacttcttgccagagaccccagatggcaccccggaaagccagctgcccttcttggatgatgccgcccagcccggcttagggccccccctcccctgctgtttccggcgactctcagacccccttctgccttcccctgaggatgaaactggcagcttggtccacctggaggatccggagagggaggctctgttggaggaagctgctccacctgcagaggtgcacaggccggccagacagccccagcaaggttccggactctgtgagaaggatgtgaagaagaaactagagtttgggagtcccaaaggtcggagcggctccttgctgcaggtggaggagacggaaagggaggagggcctgggagcagggaggtgggggcagcttccaacccagctcgatcaaaacctgctcaactcggagaacctaaacaacaacagcaagaggagctgtcccaacggcatggaggtaggcagagcccggcctgcagggtggcacaccccatcccttccatcccactctaattggcctacctcagcctctgtagtagggactacaggcacccgccaccacacccagctgatttttttctattgtctcctctgggcccccagctcccatctccagggacctgagggttctttcacagggtgattctgctggtgggtacgtagtgcataccttatatagcaaattgagaatctgttgggaataacacatatctctgcacaccatcttcaccccatgtaccttattcataccctgggcagggcttccaactcaatttctttttgtgtatgtaaaattaaaacatataatttatcagcc

SEQ ID NO: 700 - DNA, 2884 bp, Homo sapiens
atacatgacactcaaattatttattgtctattttgctagtctataaaatcaataatgtaaactctgtgttggtcatgtgacttgttgctgtcaaattcgttccttaccattctctttctttgttctgaatcaccagagaatgacattacaacattttccttttttttttctttttttttttttttctgatatggagtctcactctattgaccaggctagagtgcagtggcacaatctcagctcactgaaacctccacctccctggttcaagcgatcctcctgcctcagcctccagagtagctgggattacaggtatgcaccaccacgcctggctaatttttgtatttttagtagagatggggtttcaccatgttggccaggctggtctcaaactcctcaggtgatccacatgcctttgcctcccaaagtgctgggattataggcatgaaccactgtgcccagccacattacaacattttctaagagcccttgctctttggcctcctggcagatttgccaatgagaaggattgattgacaactggggggcagaagaaggggaaaccttggagtaggttccccttgttctctctctgacttggatggctcccacagtgtcttcatctcttctgtggctccaactcccaatgggctggcaccagcatcatttcagctctcggctctggcaactacacctcctctcattatacctccagccctagaagtgatggtggctttctttccttagaatcattagattgattccaattcccttatttgaatttttagatttcccctccactccccatctgtttgaccaattaaattcaattccctccatttgtaagactcagaagtatttctattttattgaccagtctctggctatattactcttctattgttgcataacaagttaccaaaaacttagaggcttagaatgatactattttttatcactcagtttctgctggtaaaaaatctagatgggctttgctgggtattctcctccaggtctgagaagaataaaatcaaggtgtttgctggacttggctcttatttgacagctttggaaaagaatctatgttcaacctcattcagattgctgaattcacatattttctcaatgggataaggctgagattctcatttccttgctgatgtttgctttgtgatgttagaggcttctcacactctttctcacacggtttcctcttccattctcaaagcaacaaccacatgttgagtctctcatgctctaaatctctctgaccctacttctaccaccactgagagaaagcactctgcttttagggattcatatgattatgtcggggctgcccagataaatccaagatgatctattttgaagtaaactatgccatgtaacataattatgggagtgatggtatgtcaccataatcacacgtgccaggggtaaggctagaacaggacatctctgggtggccattatagaaatcagcctatcccactgacaaatacaagaagggactcaatttttcttattagcaataatatttcagagtatactgtatagctctgcctgtgttctaagtagctatggtaaatgatgaaatagataaatggatatttccaaaagagtgtctgaactttccaaggctcataaaatccaacacattatatatatatatagttttgtcagaggacctgaattatacaacctaatatgacatatgaaactcacttgaattaagataataattaaatttaaaatcatatctcaaaagatctcagaaagctggaaaaaacttgctttaaaacaaatttaaaagggatgaatataaattcctgaatttagattcctaaactatctttacacacaaggaaataaaccctaccagtagcacatataaaaattagttctcaagttcaatgggtatcagcagtataaaatagctgctcttgaaactatttaaggttaaattaaagaagtataatgttaggctccaggcaggagatagctttgctttatgcattctggcaaaaccatgccaggtttcagatagtgcaatttaaaggggatttggacaaatataaacagatcaagagaggaaaaatcatgttatgtgtggtctccaaattatgccatatgagggaatttagtctgaaatgactagactcaggggacaaacatgaaatatgtgaattatcaggacatgaactgggtcagatgactcagtgtaacaactatcttaaagctggtggaggggaaatacagactgactgcttaataggcacagatttcattttgggttgatggaaaagttctggaaatagtgatgatggttgcacaacattgtgaatgtgtttaatgccactgaaatatatactttaaaactgtaaaagtcatttctgttgcatatactttactgcaattaaaaaatggttaaatgataaatttgacaataggtgtattttgccaaaataaaaattagtgtaactacctcaataaggctgctcaaatctgactctgcatcagaaccacctggaaagacttttacaaaaatgttcctgacactttacactgcagagtcctattcagaaaattaagggtgatggttaataatccatctatttatcagctgttgattggatgcctgatttgctcctgacactctgctgtcactggcctggaacaaggaccagcatttgggaaccattaacctggaagcttaagttattcctattaatgcagacattcaggcggtgacattggaattgcaattccgtattaaaaagtgatgagtccagagacctattttttcttgtccaactctcaaaagtatttgaattgataacattgcaagaaatcaatcacaggtttattgtgtatcttgaccccc

SEQ ID NO: 701 - DNA, 1960 bp, Homo sapiens
cttccttatttatgagtctgccggcgctcgcctgcttcctccgaagacttcagggagagtctgcgagctgccgtccccgcgtgtgaggcacagaagggctggatgtcagaaccgcataattattcattaaactacaaactttttttaacccaaagaatatcggtgatttttgtccactgcgaggagaagaagagagagcccagggctcatgaaatgcagcagaatccttatttataaacaggccgcggtagtgatatatgcaaccccagtctactaagtgagttttctatcctatggatatcggtcttgagagttgagattggagagcagcgccgtctgtactgggtcctgcagcctctgtcctttcaatgcctggttttttctgtgactgctggccttccctggagatcagagcgctcctgtatgccatgggctgtattcagagcatcggaggcaaagccagagtcttccgggaagggatcacggtgattgatgtgaaagcctccatcgaccccgtccccactagcatcgatgagtcctccagcgtggtgctccgctaccggacaccccacttccgggcctcggcccaggtggtcatgccgcccatccccaagaaggagacttgggtagttggctggatccaggcgtgcagccacatggagttctacaaccagtacggcgagcagggcatgtccagctgggagctccccgacctccaggagggcaagatccaagccatcagcgactcggacggggtgaactacccctggtacggcaacaccacagagacctgcaccatcgtgggccccaccaagagggactccaagttcatcatcagcatgaatgacaacttttaccccagcgtcacatgggccgtgcccgtcagcgagagcaacgtggccaagctcaccaacatctaccgggaccagagcttcaccacctggctggtggccaccaacacctccaccaacgacatgatcatcctgcagacgctgcactggcgcatgcagctcagcatcgaggtgaaccccaaccggcccctgggccagcgcgcccggctgcgggagcccatcgcccaggaccagcccaaaatcctgagcaagaatgagcccatcccgcccagcgccctggtcaagcccaatgccaacgatgcccaggtcctcatgtggcggcccaagtatgggcagccgctggtggtgatcccgcccaagcaccggtgacagccaggaccacccgctaggttagactcacaaataataataccgctgaaaacaaaactcagactcactcttcagtcattcagcaagatacaaccattctaccctctccagcgggcggatctcactgtgctgatgcccccgggaaggcctccccggctctcggcacctgcttcctttcagggagaggggagatctaagcaggacagacagaccccacgtgcgccctcagggtgacctctggtctccttgcctctcctttttctcagtttcagtcgctcacttgtaacagattccctgaaacactgctttttccgttttttaaaaaaactcctcttttgggggctcaggggcaggaggagggggagctgattaggagggaagctccagcccccgatcaaagagacagatccacactgctgccgatttgtggcgctggccggccttccccccaggtccctccgccctctgtcatgcggccttatgtagacttgctttgccaaacttttgccttaagctgaattgaaaggaagaaaaccaatcggagaaagaaagcaggatctcttttctaccggacttttcctcttctgccagaggtggagggagggttggggtcgcccgcgagagtctcttgagcccttcttcccggttgtcttgggagaagggtgaggatgggcatttagacccgaaaccagctgctcactctttctttttggcagaaataaaaccacaggtagattctg

SEQ ID NO: 702 - DNA, 2456 bp, Homo sapiens
cgaaagacagccctagtggtggggtactagagttggaggaacaagtgaactctgtggttttccttttaggggaatgtttgtacattctgacagtctgattggccttctgtttctcatgcttgctaactcactagtgctttcaaagagagcctgaatttaataggtatggtctaacacagtttgaataacctttgtgaaatatgagagaaaatatctaaagcaaaaaattaagctgccacctaagggacatatgaattattacatcttctgtgatgcctcttttcatcaatattgagagactgctaatgtgtatcattcagattgctaatctgccagcatgttctaccagcatttcagataatacagaatatggttctagcaaaagtttggtctttattttttcaattagaatcacaggaaaagacatattttggttgataataggttatttcatttgggggactaataattctgatatatattttaggatttctttaacaccactctaggtaatgtttgcatatgtatctcactgggaaatgaaagactatcaaggtgttcacttgatagttagaaccaagggtgaaacagtctttgctttattaaaaaaaagtctaatgttctattttgcttttgatattttgcctttgattaacatcctggaaaccaacacattgaatttccagtattgaacatagtgaccaaagtaattttctttttatatgtaaatcaagtcataagaaccagtggttataatgctttcctgggggccatcctttgctgttacacccttaacttccatcacaggaaacatgacagctgccctacaggcagctctgaagaacccccctatcaacaccaagagtcaggcagtgaaggaccgggcaggcagcattgtcttgaaggtgctcatctcttttaaagctaatgatatagaaaaggcagttcaatctctggacaagaatggtgtggatctcctaatgaagtatatttataaaggatttgagagcccgtctgacaatagcagtgctatgttactgcaatggcatgaacaggcacttgctgctggaggagtagggtccattgttcgtgtcttgactgcaagaaaaactgtgtagtctggcaggaagtggattatctgcctcgggagtgggaattgctggtacaaagaccaaaacaaccaaatgccaccgctgccctgtgggtagcatctgtttctctcagctttgccttcttgctttttcatatctgtaaagaaaaaaattacatatcagttgtcctttaatgaaaattgggataatatagaagaaattgtgttaaaatagaagtgtttcatcctttcaaaaccatttcagtgatgtttataccaatctgtatatagtataatttacactcaagtttaattgtgcaacttttaacccctgttggctggttttttgttctgttttgttttgtattatttttaactaatactgagagatttggtcagaatttgaggccagtttcctagctcattgctagtcaggaaatgatatttataaaaaatatgagagactggcagctattaacattgcaaaactggaccatatttcccttatttaataagcaaaatatgtttttggaataagtggtgggtgaataccactgccaagttatagctttgtttttgcttgcctcctgattatctgtactgtgggtttaagtatgctactttctctcagcatccaataatcatggcccctcaatttatttgtggtcacccagggttcagagcaagaagtcttgctttatacaaatgtatccataaaatatcagagcttgttgggcatgaacatcaaacttttgttccactaatatggctctgtttggaaaaaactgcaaatcagaaagaatgatttgcagaaagaaagaaaaactatggtgtaatttaaactctgggcagcctctgaatgaaatgctactttctttagaaatataatagctgccttagacattatgaggtatacaactagtatttaagataccatttaatatgccccgtaaatgtcttcagtgttcttcagggtagttggaatctcaaaagatttggttcagatccaaacaaatacacattctgtgttttagctcagtgttttctaaaaaaagaaactgccacacagcaaaaaattgtttactttgttggacaaaccaaatcagttctcaaaaaatgaccggtgcttataaaaagttataaatatcgagtagctctaaaacaaaccacctgaccaagagggaagtgagcttgtgcttagtatttacattggatgccagttttgtaatcactgacttatgtgcaaactggtgcagaaattctataaactctttgctgtttttgatacctgctttttgtttcattttgttttgttttgtaaaaatgataaaacttcagaaaataaaatgtcagtgttgaataattt

SEQ ID NO: 703 - DNA, 2735 bp, Homo sapiens
catctggctgctggcctgcttggcgtgggttctcccgacaggctcatttgtgagaactaaaatagatactacggagaacttgctcaacacagaggtgcacagctcgccagcgcagcgctggtccatgcaggtgccacccgaggtgagcgcggaggcaggcgacgcggcagtgctgccctgcaccttcacgcacccgcaccgccactacgacgggccgctgacgacctctcgctgcgcgtcgagcgcctcgccctggctgacgaccgccgctacttctgccgcgtcgagttcgccggcgacgtccatgaccgctacgagagccgccacggcgtccggctgcacgtgacagccgcgccgcggatcgtcaacatctcggtgctgcccagtccggctcacgccttccgcgcgctctgcactgccgaaggggagccgccgcccgccctcgcctggtccggcccggccctgggcaacagcttggcagccgtgcggagcccgcgtgagggtcacggccacctagtgaccgccgaactgcccgcactgacccatgacggccgctacacgtgtacggccgccaacagcctgggccgctccgaggccagcgtctacctgttccgcttccatggcgccagcggggcctcgacggtcgccctcctgctcggcgctctcggcttcaaggcgctgctgctgctcggggtcctggccgcccgcgctgcccgccgccgcccagagcatctggacaccccggacaccccaccacggtcccaggcccaggagtccaattatgaaaatttgagccagatgaacccccggagcccaccagccaccatgtgctcaccgtgaggagtccctcagccaccaacatccatttcagcactgtaaagaacaaaggccagtgcgaggcttggctggcacagccagtcctggttctcgggcaccttggcagcccccagctgggtggctcctcccctgctcaaggtcaagaccctgctcaaggaggctcatctggcctcctatgtggacaaccatttcggagctccctgatatttttgccagcatttcgtaaatgtgcatacgtctgtgtgtgtgtgtgtgtgtgagagagagagagagagagtacacgcattagcttgagcgtgaaacttccagaaatgttcccttgccctttcttacctagaacacctgctatagtaaagcagacaggaaactgtttacagggcctggaggcccagtcttgtcctcctctgtcaccgacttgctgtgtggacctgggacactctcttcacttctctgggtctcaattcatttactgttgaacacggacaatcatattcttccctcctggctgggaggactacaaagatctgaggaaataatggatatgaaggggctttggaaagtacaaagccatcttctcatgaggggcatgacagaaccctctttgcagagtgacctttggacgtgcagtcagttcttggagaagtgtggcccctgcagcagtgtcacggagaacacagagttccagagagcaagcctggggcaggggctgtgcaaacgtgtggtcagaggaacatcaaatcctggagacttggtggcagggagaggcctggggcctttaccccatgccccctgggatctccactgtgactgtcccacaccctctgcccaactcttgccccatcagctgccctgcattgccttgagctgggacccctaggaaatggaaaccaggctcccctctctcaaggtatctgggaaccactgtctcaggagctgaagccgggagacctgaggggaggtctggccggagagtccgtgcgtaaagcagctacagctctgacctctctgacctgcagcctctcagggcgtgcgaagtccaaacgcactggcaacttcaccccctttgccctaacgcgggcaggctgacttggaggggtgcttccctatttacacctcagggtgaatttgttgatcaccttagctcctgtggtccttggggcttagggagaggagggaggcatgcctgggtcccaggtaagctggcaagaggaaagggccacaggctaggggaataacgaggccatgaacaagacatctcaccccagttacaatggcttttatccaaaagacaggcaatgacaaatgctgatgagaaagtggagaaagaggaatccccatatactattggtgggaatgtaaattagtatagccactatggagaacagtacagtttcctcaaaaaactaaaaataggctgggcgtggtggctcatgcctgtaatcccagcaccctgggaggccgaggcaggtggatcacttgaggtcaggagttcgagaccagcctagctaacatggtaaaactctgtctctactaaaaatacaaaaattagctgggcgtgctggcacgtgcctatagtcccagcaacttgggaggctgaggcagaagtattgcttgaacccaggaggcagaggttgcagtgagctgagatcaccccactgtcctccagcctgggcaacagagagactgtctccaaagaaaaaaaaagaaatagaactaccatatgatccagtaatcccactgctgggtatctgtcagcaaggaaatcagtatattgaaaagataccagtactcccatgtttactgcagcactatttgcaatagccaagatatggaatcagcctaagtgtccatccacgaatgaatgaagaaaatgaacacacaatgaaatattcagccat

SEQ ID NO: 704 - DNA, 2724 bp, Homo sapiens
ctgccacaccttttttcgtttttccttttggaacataggaaatacattttttaaatacctgtcttagtttcttttgtgctgctatagcagaatacctgagactgagtaatttattcagagtagaattttatttcatgcagttctggagtctgggaagttcaagattaaggtgctggcagggttggttgtctggtgagggctgcattttctggagggtaggcatgctgtgttctcacgtggcaggaggaagggcaacggagaacgaactgcctcctgtaggcccttttctaagggcacctaatccattcaggagggtggaacctcatggcctaatcacctcttaaaaactccacctcttaatacttatcacagtggcaacacctgaattttggagaggacgtattcaaaccatagcaaccacctttgtcttgagtttcaagtgtacaacatacaattagtctggccttttaaaaatccacttacctaatccattttggttggttatcaacttgagtgtttttgtaataagttttatttctaagtttatttttgtgtcccctttttcctacaacattgactcttcccttcttgtaccttctaataatcagaaatttatacctttttcagaatacaaatgattcagtgtttaaatacttctctagtcacagttttttccatgtctcccatctgtttacttattttcactaattcagcccaaaaatgtttactgaacacataccatgttcaggtactctctctgggttacagactcaggatgcaaataataatacaacttataatatgtataaggatgtatcaggatgcaaattataaaataataatacaactacaggctcatgtagacatcaggctttataaacaaaactggatggaatttgctttatttttacccttttcttcccacctttatataatcaatagtaatttttaactttttataaaattataaaattttataaatttataaaagtaaatttataaaagtaattataacttttttatcattttaatggcatatgtaatttattgcttatttcagcctcacagattcttggcacttcctctgtcattctactaatattaataaatattttattttcccatttcagtgttaagagaaatgaagtgttctctgcaactagcaaactcccttactcctttagaaaaatcacagtgctatgaatgtcagacaggcatttctctggtcactcttgttttcccttagatgtgaaagcttcctagggtctggattccaccagaagtaaacctgtagtgactcctggtttagccaggaggaaggaagtctgtgtgccagttttagggaacagcttgtatatgacagctctcagaacttcaagtctcatgaaattccaaaacaggtttagatggttgccaactctttgacatgttaaagacattgagggtggggcaatgatcttttgatactaccgtgatttcttataaagaagattgtagtaggcatacaatctcagactacagaaggtttttctctagtaaggaaccacctcacattgacacacatacacatattcactgtatctgtcctagtttctctcatttttctgaggaccaatgataagctggctccatactgaacagatactgtccataggctggtgtgtggggagctctgctcgggtcctgaagccttctctttcctagtgtggcctttacaaggtctggagctctttctcccatttgtgattttcctgggtgtcacagttactccaagctggcttcctttcctaaaagtcaagagtggcttcaggccactctccagattggtcatgtggtgtgcatgctcattgaattcacatcagtagtaacccagatagcatacaatttaggaaagtcaatctcttggtcaactagcacagtaattaatttaaaggcacacaaataacttcgggagtccatctgctactgctgtcatttattggaatggctcataatttggctgtctctctctattccatcctgttgaacaatcctgactgtacacattctctttcagcggtcttgcgagtggctggttccctgcagaagagcacagaagtgatgaaggccatgcaaagtcttgtgaagattccagagattcaggccaccatgagggagttgtccaaagaaatgatgaaggctgggatcatagaggagatgttagaggacacttttgaaagcatggacgatcaggaagaaatggaggaagaagcagaaatggaaattgacagaattctctttgaaattacagcaggtatgaccgtgagatccatcctttctcctctctttttatggccattcttccttcattcactaaattagctagtagctttttctttaggcattaactcccttctacatttttaacgttttacactgtgcagcttatttcttgaaaagtaagcacaatatctataaccatcttttaaaaaacacaattcttaaaatttttagagtttgcatgattttaaaggaagatactgctctcatatactgctgttgggattttaaactggtgtagactttcttgaaagcaatttggccatagccattcaaaagcccttgccttcgccaagtgcgatggctcacgcctgttatcccagcactttgggaggctcaggtgggggatcgcttgagcccaggagtttgagaccagcctgggcaaccatagcaagaccgcatctc

SEQ ID NO: 705 - DNA, 3546 bp, Homo sapiens
ttatgaaggccctgggagcagcgttaagggctccaggatccagctctctttgcatttggtctgtcggaagctgtcctcgtgctttcctggaccgggagagtcccggtcccctcgggagggactccaccgcctctcacactccgatttctgctgctctgctgccccgcagtcttttccctttatttgcttccccctcctcccctcggcctccaggaagccaccgtggccggccaagcacaagctcacccactttggagcagcatttctcctccccagaggacctcgaaggctgcaacggccctgccccaagccccagaaaaagaaactcttggagggagtctgcgggcttctctgagaaggggcgcagcctgacacctgtgctgtccctgcagtctctaggcctgtctgagctgctcccgtgaccgtgtcctgagtggccacctcctccttgggagggaggccgcggcaggtactctccctttgctgcttgctggcggccttgctagggctagaaagttttctcagcgttgggggaggggctagcgttcttgtccaaagcactcatcctgctgcagggaagggagctgtacggaggctggaagctgcagggttaggcccgagagagcttttgacaagcctggctcttcctgcttcccacctttttggctgaatacctttgggtcctggaggctgccaagggcgcttcgccttgagcaggtcccggagaggctcagcctgcccctcctgggggccagcctccttgcctctgctctgacctcagcagctacacctaaccccaccgcaccctacccagtgtcgatatccacaacccagcccccaggcctgcactttggagatttctggatccttccctgggagggagaggtctcctaactcgattggacaggagccttcattccttgactcgtgtcatttgggagctatttatttattcttagtatttaatttttaacatcctctcagggaccaggggcctcctgcttttcagaggcccgagtgcatttatcccaaaacgaggcatcttgacatcccctatccccaccccctaaattcccaaggccctaaggtccctcacctggttgctctggaagctcttgctgataggaatgatagcaacactgaaagagcgtgggaaggtggagggtgtcaccagacccacacagagcaagggagattaaggcagttcttgctgccccttctctggctgtgctttgcctgagggaagagttggcaagaggccagaactctagtttggtttatggggcctggattctggcttgaagaagccatatttggcatgggtgaagtgaaagggccaggaggttctggaggccccttcacttccagtcccatagcggggctcagctatttttctgatcttattcaactttagttgtgcaaaagaaattctaagtgaatgcgcgtatgacaggtcaacgtattaggaaggagccagaaagtattcatactgctactccttatgagatagccaagaagcatcatgtcagtaactgggagtggagagggagttttgttttgaaactatgcaggtatttttcagcatccatttgtacattagtatggttctacaggaccccagctgtggaagtaacaaatttcttctccctccagactcttggatgactacctagatccccagcttaccggttagtttcctccacaggcttccatgagctcagtgtcccaagacagcaaaaatctggtataccctgtagaagcaggggggtagcaaatttaggctctcttcgaaattacttgtacaatacgagtgccttcgcagcttagccccaaagtgctacttatgtttcccaaggtcttttctattcaaatcatatttggtttcaggcccctttatgggcatacggtaacagaaacctccatcattcatatgagacccttttgtcagtggtaacatcttgtacttggaaaaaattttttttttttttttttttgagacagagtctcattctgtcgcccaggctggagtgcagtggtgtgatcttggctcactgcaacctccgcctcttgggttaaaagaattctcctgcctcagcctcctgagtagctgggattataggcacacaccaccacacccagctaatctttttgtatttttttttttagtagagacagggtttcgccatgtcggccaggctggtcttgaactcctgacctcaggtggtccacccgcctcggcctcccaaagtgctggcattacaggcgtgaaccaccgtgcctggccggaagtctttaaaaaataaagtgattctactcttctaagcttacagagaccagaccaggtgaatgtaactggggaaaatcaagatggtacctctctgcattatcccgccagacactgtattttatgcattcatgtctaggatacagtgtgaaaattaaaaagtttagagggcagatgcaattgtggcaagtgacctgccaataaagcaggtgcagctatagaagctggcataggtatatccttaatggtgctttctccctgggcttgtctttttgttgtttttttccccctatattcagagctccttgagaagtgataaacacctccagctttctaacatcctccccacaccatctcaccatatccatctcccagcatccatctgcattcagctaagggcgggaaactgacctagtgcctgtgttgcagaccatttctgaggtctccaccatccaaggaggcacagccgtcattactgtcctccatgccttcagcagcccccctcacagctaaggtacataccaccccttctgccgcgcctccacccctggcaccaaggtcttctgctgcttatgtctaaagggatcacctatatttaactgcctcagtgacctaacctctttcttctcatgtgccagatgttaagatgaaggaggaatacaacacatactcaagcctcagcctgtttagttgttttcactggggctcgcttttctgggacggtatttattatcagactggcaagcctaactccataggtttacaggaagtagggatatttttataaaacaattgtgtcctccccacattttgctatgttaatatttgcttctaacaatttgcagctgtttcactttttcctcatttgtctctaagttgaaggctttgttggaggggacagagcacaggaacagccttgacagtctgtaattattgtacagatattttaatagcatataaataagtatattccttttattttgaaacaaaaatgatcagacactgccttttgtgtgtttgctgcctgtggcatccttttttaaaaagactgttacatattaaaatagtgtacatatataaatattacctcttttgctgtacagttgtgatagagactgaagattttattttttgtgtgctttttataagaaaaaaattaatacactaaagaatcttgctgatgtgattgtaatgtacctatgtaacttatttacttttgaatgttcttctgtatctttaaaccttttattaaataaggtttt

SEQ ID NO: 706 - DNA, 1877 bp, Homo sapiens
catttcagaagcggcttgagctggtctgagctataataataaacactggcggtggaggcgagggcgaccacagggctgaggtcagggctaggattccggtgtctctacgtaggttgcttgaatggggggcaccctggcatggacgctgctgttgccgctgctgctgcgggagtcagacagcctagaaccgtcgtgcaccgtgtcctccgcggatgtggactggaacgcggagttcagtgtcacgtgcctgaatttcagtggcctcagcctgagcctgcctcacaaccagtctctgcgggccagcaacgtgattctccttgacctgtctgggaacggcctgcgagagcttccagtgaccttctttgcccacctgcagaagcttgaggtcctgaacgtgctacgcagccccttgtctcgtgtggatggggcgctggccgcccgctgtgaccttgacctgcaggccgactgcaactgtgccctggagtcctggcacgacatccgccgagacaactgctctggccagaagcctctgctctgctgggacacaaccagctcccagcacaacctctctgccttcctggaggtcagctgcgcccctggcctggcctctgcaactatcggggcagtggtggtcagcgggtgcctgcttcttggacttgccatcgctggccctgtgctggcctggagactctggcgatgccgagtggccagaagccgggagctgaacaaaccctgggctgctcaggatgggcccaagcccggtttaggcttgcagccacggtacggcagccggagcgcccccaagccccaagtggccgtgccatcctgcccctccactcccgactatgagaacatgtttgtgggccagccagcagccgagcaccagtgggatgaacaaggggctcacccttcagaggacaatgacttttacatcaactacaaggacatcgacctggcttcccagcctgtctactgtaacctgcagtcactgggccaggccccaatggatgaagaggagtacgtgatccccgggcactgagcctaagatgtcctaacctccacccagaaccccttcagtccctgctgggtgactcagggcgtcctaacgcctccatggcctcagttttcccatctgaagaatgggtacaggaaaggattgtccttgaggccccaggaagctctgccgccccctccctgtccctcatgccgctcctcagctccctcagctcctagagggggaagaggagagacccccaacaaggggacaggacggtcactgtgccaatcctgtcatcaccctcctgtggatgtacaggcagtgctcaataaatgcttcgaggctgatgaggctgctggctcagggtgcgtgggttcctcaaggtggggatttctgagttctaagaccaagtctccatctgagactcccaaattgctccccacctcccatccctgtttttttttgttgttgttgtttgtttgtttgtttttgaaactgagtgtcactctgtcacccaggctggagtgcaatgctgcggtctcagctcactgcaacctccgcctcctgggttcaagtgattctcctgcctcagcctcctgagtagctgggattacagcacccgccaccatgccgagctaatttttgtatttataatagagatggggtttcgccatgttggccaggctggtctcgaactcctgacctcaagcgatctgcccgcctcggcctcctgaagtgctgggattacaggcgtggccactgcgcccaggcacattcctcccttctgcccctctcagggccccttcccaggtccctgatctccaggcttggcctccagagcagcccacaccaaccccaaaataaaaaaatgtatatattc

SEQ ID NO: 707 - DNA, 2791 bp, Homo sapiens
tttctctctgtcgccaggctggagtgcagtggcatgatctcggcttactacgacctctgcctcctggattcaagcttttcgcctgcctcagcctcctgagtaactgggactactggcactcaccaccatgcccggctaatttttgtgtgtgtgtgtattttagtagagatggggtttcaccatgttggtcaggagggtcttgagaggtgacaacatgccagcagccctcgcttgctctcggcacctcctcaggccatggcgtccactctggccacgcttgaggagcccttcagcccactgctgcactgtgggagcccctctctgggctggctgaggccagagccggctccctctgcttgtggggagatgtggagggagatgcgcgggtgggaaccggggctgcgcactgcactcgcaggccagtgtgagttccaggtgagcccaggagtgtcggccctgggcagtgaggggcttagcacctgggccaacagctgcggagggtgcaccgggtcccccaacactgccagcccacccacgtcgtgcttgaattcttgccgggtctcagccaccttcccgccaggcagggctcgggacctgcaacccaccatgcctgagccccgcactccccccccacccccgcccccaccaaatgggctcctgccaggcctgagcctcccctacgggcaccgccccctgctctgcggcacctgctcccatcaactgcccaagggctgaggagtgtgggcgcgggactggccgcagctccacctgcggccctggcgagggatccactaggtgaagccagatgggctcctgagtcagttggggacttggagaacttttatatctagctggaggattgtaaatgcaccaatcagcactctgtgtctagcttggggtttgtaaatgcaccaattagcactctgtgtctagctaaaggtttgtaaatgcaccaatcagtgatctgtgtctagctaatctggtggggtcttggagaacttttatgtctagctggaggattgtaaatgcaccaatcagcactctgtgtctagctcagggattgtaaacacaccaatcagcaccctgtcaaaatggatcagtcagccctctgtaaaatggaccaatcatcaggatgtgggtgaggccagataagggaataaaagcaggctaccgcagccagcagcagcaacctgcttgcatccccttccgtactttgtttgtgaaagctttgttctttcactctttgcaataaatcttgctgctgctcactctttgggtccacactgcctttatgagctgtaacaatcaccgcgaagatctgcagcttcacttctgaggccagcgagaccacgaacccaccaggaggaatgaacaactccagacacaccgccttaagagctgtaacactcactgcgaaggtctgcagcttcactcctgaaaccagccagaccacgaacccaccagaaggaagtccgaacacatctgaacatcagaaggaacaaactccgaacacacgacctgtaagaactgtaacactcactgcgagggtccatggcttcatcttgaagtcagtgagaccaagaacccaccaatttcagacacagtcttgatttgccgaccttgtgatctgcccaccttggcctcccaaagtgctgggattgcaggcataagccactgtgcctggccaccacctgctttcttctattaaaatcttagcataaaacaaaggaaatagaaacaaaaattccaactctttttgtcagaggtagatctcatcagttaccttaaaccataaaatctgaaacagaaagcatatgatacagtaacttagtaccagaagggcaaaaccaaagcacctgcagaggagacgacagtgatatcaggaggttgaaggaggaagggaggcatggtgctaaaaacagatgatcagctgaaagtctgtgaaaggaccagctgaactcccaggtcttcacctcactccagctggacagcaatgttccccaactccacgagatgaggggtttgttctctgaaaaaattggaactacagagaatctagaccaggactcggggacagtggagggtagagttaactgaatgtctggtctgatcttagagcagcaggcaaaacaaatgtcaaaaaaaaagtgctttgaataagaacaaataagacttttaaatatcagtactcaaattgatagcagggtttgcagaatgtttgcttttttttttttgtccaaacgttgtgatttgaagtgacaaagtttgggtcctattctctttgaatgtttggcccttatatttatatttataaataagtgtaccactggatcatgataaataacaaagtttcaatgtagagtattagtttttgtcttccctttcgtcagtgaagaagacagaatcctgaatgttattttcttctgaaagttagaggagacatcaaaagttgaaatttagcaggcatatttttcagattttaattactagaaaaaatattatttttaggattcaatgactattattgactatgtaactaataaatgttattatggtacttttagattaaaagtctattccaaattgcattttgatttttcagatgttctaaattctagtgtgtaaatattataaaagtattgacattttgaagtgggtggagttccgtcgcctctctttggattagcttctaaaacttaatgaaatagaaagtaagtgtcttttcccactgaaaaaaaggttacattttattccttattgtacggagacccaaataaaatagacaaatcag

SEQ ID NO: 708 - DNA, 2828 bp, Homo sapiens
gcttcttgctttgcccacctccactctaattcccatccattaggaggagaggggtgctgggccttggaccttctcccttgcttagaagtgccagcctcttttaggctgtggttagtggccattgtcccatgccttgaaattgacccagaacccactttccactgatgtgtctcttggatttcttccaggtgatagatacaaagtgtatgtctctgtgtgtgtagtgttgttttctcgtgtccaccctgtggccctttgcaatgggtaggagatctggggaggccctgccccctacaccatacttatcaccaccctcctcttttctgcctggatttgtgaccatgaattcccaggaagagctgggcccctgggagctgcccaggtactccccttgaagggagaatctcacccaggatcttcctcaatactgctcctctcttctcagctcagggagaggaggggatccattctctaaggaccaaactgcaccctttcttgggtgagtgagcatttctacctccgtgctttcaacttttgttgcatcatgcactgatgctgcttgcaaaaaatgaagacaaaatactcagaagttgcatttgccatggccactggctccagctggggtttggtgccagtgttattacagggtctgcggagtatcagccattggcttggcctctctctgttcctccctctgcacctagaactcttatccttcctgtggtttggtgccgactgggtcggatctgggcttagagtaatagctttggtgggtttcctggatggatgtgaagttgggcctcccatgggcccaagggagtaggaagccccattccccacctgtccctcctctaggaagtgtagatcagaaagtgaggtggtgacctcccacctctggtctggttaagagtctcactagggccaaggcaggctgcagaactttccctcttcctctcattgagggtgatgacaagagacatccggggactgtgcacttacagtcggtgtggaatgtcactcttgcagtctttgaggcaggataagtatttttacatattttaagggtgcaggaggacagcagctaacaaggccaggaaatactcacttccctccaccctcaacaggatgtggtgggggtgaaacttgaagaatttttgtttccccttctcccttcttacgtttgggaagttttatgtagtgtaacaaactctagacgagttaccagaagatgtggattctagttctgattctgtcactcattggctttgagtgacatatttttatttcctgggcctgttttctcacattaaaaaagtagaagttagatgagtgatctctaaggttgaaggtaatttcagctctcacattcttttgagtttgtggctcttgaaagccctggtcctgatgctccctgtaaaggtggctgggagagaagccagccaggctgcacttgcagaacattccctgctctgtactgggtgtgtgaagccccagcagagaaggccggagggagggcttgggtgcctgggctgggtgtggggcagggcctggcacagctgcagagtgcacagggagggtcagaagtgccaagtcactggccgttaactcagcacccaggccaagcccccgcctcccacttgaagccccctcttacaactgttttgggggcttggagcagaagacacccttgtagacagacataagaggggcagaaggcttgaccagagttctcttgagcctcctcatgctctcagagcagggaacagcgggggaaaatgtttacactccatgcacaatctgtgcttccagtccctcaccctatgtggcccaatagctggctggatttcacacttaattggtatttttttctgccttcttcccctgcccccactgactcctctcctctccctttgattgtactcaaggttctggggcctgggccctgggtgggtaccaacagctgctcgctgttcccatgtcctctctccagctttgctgtgtttctctgctacctaatctcagtgactgtgaaaggacattgtgcctgagccatggccagccgctggctggccccctgatctgccccccttctattgtttggatggccatctcctgctgggcctccctgactgtaaaatctctgtactgtttgttaggtttttggtgggaggctgtgataagttccaatgagctgccacttccctggatatgtcaagaagctgatggcaacttggccaattctggcagatatcaggcccccagttcagccccagtcaccctcttttacacatgtgggtcaaccactgtgtgctcagagggtcagtcccttcctctgctgtgtttttcttgagtccttgcactcacttcccctgccccagtcacgatgacccctaaagcttcctttgcccttgctttctagggcatccctagtgaaggggcaaacctgagatttctccgtggacctgacagccaaggcagggcactgtctcctgaggccagtgccagcacgtgcatggttcacagaaaaggatcctgggctcagaatctcgagaactgcctgctcctaacaattcagcaagtcaggggcttcctctctgttagtccccaaatccttacttattttaaaaagactagaccctctctaaagactgttccattttaacatgtcctgattctgcatccgtgggttttgtgaaagagagctagctggcggttagagcctggaagaaggagggaagtggcacctcactagcatttatcacttttttccttctctttttaaaaataaaaccagactctgttctgaaaataaaaaacttgagacttgt

SEQ ID NO: 709 - DNA, 3128 bp, Homo sapiens
tctgcctgatgataacctattccttctttttcaaaagtttcagtctgtgctcagagcaaggtcttctcctttctacagtactcacattcgggcccacacacccctccccggacccctctcggcagcaaatgccagagctgatacattagttactcccgtttttacagatgcagaaaattttcatgctttaactcacgtcaatgctgcgggactccgaaacaagttcccccttacatggaagcaagctaaaactactgtgcgtcgctgtcctacttgtcaagtgttaattttaccaccactgtcttcaggagttaaccctagaggactttcacagaatgctctttggcaaatggatgtgactcattatcctccttttggcaagctttcttttatacatgtaactattgataccttttctcattttatttgggccacttgtgaaacgggcgagagtacagctcatggtaaacgacatgtgccttcctgtttctcggttatgggctgttctgagaaactaaaaactgataacggccccgcctacactagtgctgcttttaaaaagtttcctcagacatgggcaattactcacacaacgggcattccctataactctggagaacaggccttggttgaacgagccaataaaacactcaaagatcaacttcgtaaacaggatactaaatcaaagggagatgctattactcctcatgcccaattaaatctggctcttttcacactaaatttcttaaacttaacaagaaatcaacctttcacagccgcagaacaacatttcactggaaataaatttgatccacaaaaaggaatgcgggtatggtggaaggacgtaaaaactaacacatgggaattaggcacggtcataacttggggtaggggttttgtttgtgtttccccaggaaaagaactacagcctgtgtgggtcccctcccgacaattaaaattgcaccataactccaaagatgaaacgctcccagaaagaaaaggcaaagacccatcggaaacaaaagagcaactttcaccgcctgatacatacacttcatgacatccacattgagacaaaatctcgccgtgtgacctacaacacctctcgttcaaccccacctacttggggtcgaatacagattttatctcatcaaacagaaaaattcttaacagaaaaaggaatcccaaaaatgactggtaatataattctggctgcctttatggtagtcagtgcagcggtaagtataccaccggtcggggcaactcaaaattatacttattgggcatatgttccttttccccttctaattcggtctgtctcctggagggactctccagtagaagtttacactaataatagtgcattcatgccgatccctaatgatgatcggtttccagctcaaccggaagaagaaggtatgcactttaatctgtcaattggctataaatatccaccattatgtattgggaagtcgcctggttgtttagcttattcttaacagaattggatgtggactgtaccgtcctttacaaatgattcttatcaagtatataatgtgttcagtactaactcttttcaacttctcactgtcaaacgtaccccacatgaggcatggagagttcctctcactaccaaaactaataaaacaaaaggactgccggactgtccaaagaaacctacaaatgggccttttatagtgacttcaattttatgggataattgtaatgctcccaaggctgttgtactccaaactctagccatgggtattgttattgattgggctccaaaaggacattattggcaagattgctccagcaaaaataccttatgctcggagtttatttattccttagattatatagagcatgggtggcagtcttacacgatgagacaacgggtgtctccttacccatttaaatggatggacacaggtattgctcctcctagaccaaaaattattcatcccttttttaccccagaacatcctgaactatggaaattagctgcagctttgtcgggaataaagatatggaacactacctatcagctccttcgtactaaaaccaaaacacccacattcaacatcacccttatttctgaatgggtgatacccattaggagctgtgtcaaacccccttacatgctgttggttggaaatataattatgatgcctgatgcacaaactatagaatgtcataactgtaagctgttcacttgcattgatgcaacttttaatcccactacaagtattctcttggtaagggctagggagggggtatggataccagtttctctacatcgtccatgggagtcttccccctctattcacatagtcaatgaagttcttaaagacatcctcaaaagaacaaagagatttatttttactcttattgcagtccttgcaggactacttgcggttactgcaacagcagcaactgctggagttgccatccgcagttctgttcaaactgctcactatgttgaagcatgccagaaaaattcctccagactttggaattctcaggcgcaaattgatcaaaaattagctaatcagattaatgatctccgccaaagtgtaacctggctgggagatagagttatgaacttgcaacaccgtatgcaattacagtgtgattggaatacttctgattattgcataacgccttatgcttataatcaagatcaacatagctgggaaaatgtctcaagacatttaaaagcctgggatgataacttaaccttggatatttcacaacttaaagagcaaatctttgaggcttcacaagcccatttatccacagttcctggctcacacatttttgaaggcataactaaacaattacctgattttaatcccttcaaatggctcaaacccgtcagaggatcattgttgttactggcattattaatattggtatgcttatgttgtctccttttagtctgcagatgcctctaaggagtccgaaaccaagtccgaagtcaacaacaagcaatgatggcgatggcgattctagttaataaaaaggggggagatgtgggcggcaagccacccaggcaccgaggcaagagacagaggacacgagctgttccagtataataaaatataaaacaagaatagttataccag

SEQ ID NO: 710 - DNA, 3265 bp, Homo sapiens
agggaagaacctggctgagacgcacctgcaactgtttggagctggtgaccttgggcccagcacaccctcgctgctggtggacacagcccctcacgagcagctgcgaggccctcgggcagtggcatgggcgccgtcgcttcctgctaaccccacatcctcatttcccacgcttctccttccaccttccatgatcactgggacctactgcctcaggaaccgcctcagagggacagagggaagcagaccacccttttcttcagagagttcatggcccagggagggaacgctggccggggacgatcacaaagcctctctggtgcccggccagcgacagggaccctcggggctgcggggggagaggacgcccctgccctggccgcacagggttgggttagaggtgagctggggccggagaagccacgggagccatgtggcgccttctcaggaggtgctcccgcagcttcgcctcctctcgtcttccgtgtgcagggagggaccagccgagtgacagctgggagcaaaactggtcacctcccctcgggctctgggcaactgtcaacctgcagctttgagtctctccccctggaatcttctatctggggtatgataatgttattacatacgttggttatttacagcacaacatgaaaaggcaatttgtaaggactggtccgtctaatcagggcgaatcaccagtcttctgaggcatcgtattgagtttagtttccgactgattgctaaatgccttcacgctgcgtggatattgcccagctctgcctcccttgctgcaggtgccctgtggatgctgagcttccacggaggggctgctgccccctctgcccccacagctcagctcgagttcaccagtggggaaggccgagggcctgtggaacgagggctccgttcccccaccgcaaggagtgaacggcaccgaggttcccgccgccgagccgcagcgctgtgcaagcccccgatgggcgacggacaccaggccccagcccaacgcgcttcctttggctcctcctgaactggggggggggcctcgcacccgccttgccagggccctggcatctgtctcactggcctttctcacctggtattccagtgaggagggtgcttcagttttactccctttgagaggcaagatcttctcaacccacaagaagaggcgaccaggtcctgggtgactgtcgaataagcctggtccaactgggaacaagtcttctgggccctaatttcccacatggtgttcttgtctgacaaaatcacagccttccacgttcaagaatcttcattcatctctctctttcagcgaatgttccctaagctctcccatcactgagcactgctgccaacagcccagctgcatgctaccactttggtttgatggagagaagggctcagaacctcgtgcaagtgggaggcaagcacaagtacaaaggcatcttccggagccaaggtgggggcgcagagggcctgtctcagtgagatcccactgtcttccagggtttgccaccgcagcagtaagccctggagtggccccacaccctaagatccacgggggaaaaggtggatgtctcagcatgggtttgtaacattgttctcttaaataagcagaggatgcagaattaggagcaagcattccgaggggtggccagctgtggcttccgaggggcacctgacctcccatctgccttctgagcaccagctgccccaggtgaggtgtgtggagttccacagctacgatgagccgtcgccatggagaacagcagctcacgactgctttgatttaaattgaattaaggtgaaaatgaatcagggcataactctcttctttcagccagacgtctttctgaaccggtgtatatatgacttaaaaaagtcacgagggttttgggcccagggatcaggcaggaaggaaaggcagtgccgtgcaaggaggggtgggttagaaattgtatccagaaccgctgtggcttgtactgaaggaagaaacttcgtagttctgcttctatttctaccacaacaccaaggaaggtgtgtggggtggggagcaggtacacacaggtccttggtattaccagtggtccaggattgtataattccgcttattctacccatcccacagcctgaccctgactcaagtcctgcagccccttggtgccctgagccccctcccctgcctgttcctaagcaatcaatcaccctaagaccccgttctaggtttcagcagatgatgacgagttaatcagacaaataagccatggggtaggcaggggttgtgggtgctgcttcctggtccctctggcaaaccagaagggagctgcctccctgcggtccccaccctgtctccaagcttcccagcagagccccacatccagcaactgggcccagctttaaccagacggaggagcagcctgacgtcctgccagccccagagacagatgtgggcacaggaagggaaggcagggaggagaggaagccaataaaaagtgttagcatccgtcagggtgaccctttgcagaacctgcgtcagcctgaggacgcagggaaaggctgcgcgggagaagccgctgttagcatctgccagggtgaccctttacagaaactgcgtcagcctgaggacgcagggacaggctgtgcggagaagccgctgttagcatccgtcagggtgaccctttacagaaactgcgtcagcctgaggacgcagggacaggctgtgcggagaagccgctggcctttgccgcttgaaagctgggtccctgcggcctcctcaccccagggctccctcagagaaattctcatagaacccctaagcaatacgcggggaaagaacggatgccacccggaagcatgccgaggaagagtccattcatgggaacttccagagccggtcacagaggccagatccacgatcagctgcatggcaggggcttgcccgcaggaccggaaccttgtggaagatactacattcaacacagacgtactgtgtgcctcctgcgtgtgaggcctggtgctcatggcgcgtgtccttgcatgcaaaattctactcttcatcttgacgtttctagacattcagctgttcctcaggaaacgatttaccttccctctgccttttctgtaaaatgcatggactgaggaattactaatgcataacactttgtttgctggataccaagtagacgcactcttaccatatacagggctgtatctaggcagccagttattagaataaaaacagaatactatgttcatccgctcagat

SEQ ID NO: 711 - DNA, 2585 bp, Homo sapiens
atttctggactcaagcaatcctcctgcctcagcctcctaaagtgctggaattacaggtgtgagccactgtgcttggcccatgactggaatttttgagtagttttctttcttggtaacagcagctgttttgtactagtccatacatcttgtgagctccatcagttccataccaaaaaaaaacttagtagtaggttgtgaggcaacctgttttgggtggagagataatcagtaccctctcttcctgtccccctgagcctgaagcctggcatcccagtatgtggtttttttaccacgtggtctacaagaacccatggacccacagggccgagcctcccttccttgtgagacagaggggcactgatatgtctaggactgacagatcttcctgtggagatggggggaaatgtcattaggtgtggccattgggcttcagcctcagctctgcctggttcaaaccgctttgctttgcactgggtattttgagttctgtgcatccccatctgttacatgcacagccaacaaaagaacactgtgcttgggcacacacttttttcccccttttaataattgtttttagagcttttagtcttggggcagattttgaagctgtgtgtgggagacagtcacagatgggacagtacagtttcctcacttaatgcttctgttccagcataaaaatatcagagggacttcagtttttgtttaactcaggatgaatttcctggctggatactatcctagaattttccgtataattaaaacattaaacagtttcatgccagtggaagaaatttgcctctgcgttggcatttcttcattgtgggtggttggaagcctgtttagaggcggggttctggaggtactggttgtctttttagttgttcagcttgtgtgtggactggtgcccttattgctgaagagggggtggtacctggaaatggaggacaacctcacttcagctgcagggcagagacttggagtgctctcatccctttgggtgtttcccagtgcagtgatattgttttgaaaacggtgtggggaaagagatcactttttgaaaatacctcatgtttgtttgaagcagaagaatatcgtgatccattccttttcccagcaaaattcctttagtttttctcccaagttgagacatccactcctgcctgtctagcagtctggggagcgagtggggaggtacctgctggggtcagggctgaaggaggggcctggaggccgaggcaggggcctggggctcccagagacaagcaaggctgcagtgactccaggctgctcctgtcccagttcccaggactctagctaggtcctgttgcatctaatcgttctcatttttttagcttttagaattatctcttgaacacctattttgtttcagacacaaacagaggtagacataaagaaatgtgttacttttcctttgttgagctctttatctcagctggggagataggttgattggatctttgaaaagtagaagtttaatattagttgaaataattcattattgcataactttctattttgatataatttcaggcttatgtaagttgcaagaatagtacaaagagctcttgtgtgtcctcctcccagattcactaagtgtttacatttgtggaataattaatttttaattaactttgttaggccagtccctgagacgaataggaccttgtccctggatgaggtgtaccttattgactcgggtgctcaatacaaggatggcaccacagatgtgacgcggacaatgcattttgggacccctacagcctacgagaaggaatgcttcacatatgtcctcaagggccacatagctgtgagtgcagccgttttcccgactggaaccaaagagcccgggtactatgaagatggggcttttggaattcgcattgagaatgttgtccttgtggttcctgtgaagaccaagtataattttaataaccggggaagcctgacctttgaacctctaacattggttccaattcagaccaaaatgatagatgtggattctcttacagacaaagagtgcgactggctcaacaattaccacctgacctgcagggatgtgattgggaaggaattgcagaaacagggccgccaggaagctctcgagtggctcatcagagagacgcaacccatctccaaacagcattaataaatacctccccggttttgtttttgtaaaatgctctggaggaaggaagaaacgtggcagatccctgacatctttcccctttcctttccttcttccctacctcccctttttactttagactttaagaagaacagaaaatcttcttatcctctttgatattttattgcaaacactcagtcttttatgattttttaattgttgagaacaagccgagaataaaattgctgcaccagaaggagggtccctccaaagttgaacacttggtgaaaggaagatgccccgacttctttggccagtgatggggaatcagtgagtgctccatgatggtcgtgttccaggtgctagtacatcattcatgatcaccttaatgctcatgagactatatttatgatcagtgaataaaaatgtcagaactgtg

SEQ ID NO: 712 - DNA, 2550 bp, Homo sapiens
aattccagtaatttaagctgtatgttatcctatttgtaacttattacattttcaaaaaaaaaaaaagaactggatttacctttaagaaacatgtcagctttttgtgcctacaatgaatttgtaaagcataaggaatgatttaggtttaaaaaagttgctgttgagtcatctcaaagtaagtgatggaaatcgattcatattcaagtatttacagcattttatttatattaatccttttttttttttaatctaaactgcaggtgcgtgaccatggcccactgcagccctgaccccccttcggcccatgctattcctcctgtcccaacctgggaggtcctagcctgggagatcaaggctacagtgagccgcgacccatcgcacacctgcactccagtcctggtgcaacagatggtgatcctttcagggagagagagagagagagaggagaagacagagagattaaagaaaaatatgttcactcccacttatgtgtttattgttattattgtttgttgttatttctttgttattgttgtgtttactgtttatttattttgaggcagggtcttgctctgtctcccaggctcactgcagcctcaacgttttgagctgaagtgatcctctcgcctctgtttccccaccccatttgtattaatccttcatacaattagtgtttctactaatgtagattattgaaaattagatattgaattaaagctaatatatgagaagttatattgacaaagaaattgttacatatataatttccagaatagtaactcaggagttcaaagtcttccattttacttgagaaaaatgaatagtaaatgtctctaaacaggcagcatacagattcagtgaaaagtttgaattgtgagcaatgacatcactgaattgctttggatataatttagcttttaataactacacattagttataattctgtgcagttttaatttataacactagatggcacctgttatataattcagttttaaattgtagttcaaactacctaaaacgttttttatttttgtgcttaataatagtacttctatgctttaaacaaacaaaaaatatgtttttctgttattttgaagacaaaattatttttgcttggttgcattcttggacagacagctctggcatccgatgaagtgatcttagttgtctgctcatttatttatctgcttttagcaagaaatcacataacttttatttctaagagacagttgttaggcagttgttgcaaatagatgatgtagctgtacattttaaatgtatgctctggaatgagtcactttttttccctgagcctcagtgtcctcatttgccaaataaagatgcttcctaactgattcctgatgactttttgaaagtgaattaggataattgcatcttaaggtactttagacactatgagtttatatataggcaagatattcattcattcataaactattgcctacactttgaaattttcattttttgaagttgacttacagaggttcatgtctgagttactgaccttcttaaagcctcatcttcagccctctctgcaattacacaatccgtgcaaatggctgtctcgggttttcatagaacaagacgatgacatgctggaggctgccaaggcatcactgggcatctacttaacactgaccagaggatgtgaagccactgaaagcttgactcagggaaaagaaatgtgggaccatcacacacatgaaaatggctataatcctcactgtattttcttgttcttcttgaaaaatataggatttgattccacagttcttcttgactttttgatttcatcagaaacctgttttcttgaatattttgttagatatttaaaattactgcaaaaggactgggataattttttcaccatttgcaataactttgatgcaactgaatctaaatatgacataagtatttgtggctgtgtcccctcacttgtccaagaccaaagctccaaccaaacaataccccatcgtttgactgctcctcatagtcacagagatgtgtgtgctcggcactcctgggcttccgatgctccctctgaaccactgaaagctgtgatgtccaagggggctcacaccatgtgtgcttctagtctgtcttccccccgggcctctcaaagtctggtagattacgacagctctgacgattctgacgtggaatccacagagcagtgtttagctaacagtaaacagacatctttacaccagcaagcaactaaggagattcaggatgcagctgggacaagcagggataaaaaagaatttagccttgagcctccatcaaggcctctggttctgaaagaatttgatactgccttctcctttgattgtgaagtagccccaaatgatgtcgtctctgaagtgggaatattttacagaatagtaaaatgcttccaggaactacaagatgccatctgccgtttgcaaaagaaaaatcttttcccatataatccaactgcacttttgaagttgttaaaatacatagaggtgataagtaataaaactatgaacactttgtaaaac

SEQ ID NO: 713 - DNA, 3509 bp, Homo sapiens
agttaaaccctggtgttcctgacacaaacttcaggaaaggattttgcacttgtgcagaccgggcgagcagagtaagtagcagtctcactgtgtcgcccaggctggagtgcaagtggcatgatcttggctcacaactgcaacctccgtctcccgggttcaaacgattctcctacctcagcctcccgaatatctgggattacaggtgcccaccaccatgcctggataatttttaaaaatatttttagtagagacagggtttcaccaaccaggccaggctgctcttgaactcctgacctcaggtaatccacccgccttggcctcccaaaatgctgggattacaggtgtgagccaccgcgcctgaccaactttagcttttcaaaatctgtcttcgtagacgataatggaaatatctaccaaagctaaatattcacctaccccatgacccagcaattttactcctaggtatatataccaaaaaaaatgagtgttctgtgtccactagagatatgtgccaaagtgttcataatagatccaaactggaaacagctcaaatgtccatcaatagcagaaagataaacaaatgttgggatgttcagagcttgaaatatgacacaatataaaaggacaaactattaaaactcacaacagcatggataaatcttacagacataattattgagcaaaagataccagaaacacaaaagtatatactgtctgattcctttaaataaaggttaagatgattctccctcctgcagccttgtgaagaaggtgcctttcttccccttcgccttctgccatgattgtaagtttcctgaggcctccccagccatgttgaattctcattgtccctgataaaatagcaccctctcttcctctgctcttccacccttttcctcttccgctgtgcaactgaagactgggaaagaatgacatgcaaaataagaggttttggattcagcgtaggactaactactggatgctacttacagaaaactttatatttgtgctgaaaaatcttgttatctaggtgaaagccaatgctatcctaatgacaaaattgttggggaaataaatttataagagactttatttaaagaaataaaagaaaaaataataaagcttaagacaaaaaactaatccattttggtagacatcagcacttacctctgagaaggaaaatggttactgatggggaagtgggaggcataagggaatcttctgggtgatgaaaatgttctatttcttgatctgaattgtagttacttgggtttagacatatgcttaaaaatcgtcaagttatgtgtttaaaacatgtgcaccttacagtatataagccacacttcaatttttttaaaggtccccacaacattgttgttttcaaggaagtacaggaaatatcttttactctgtgttaattcagggaagttatctccataagtgctttacaaaataatcttcataatatagtagcaccattaagtaggcattattatctctgtatcacaaatgcacaatatgagagtcagagaggttaagttattttccaaagtcacacagctaatcaatggcaaagctaggattttttttttcttttttgagacagagtcttgctctgtcacccaggcttgagtgcagtggtgtgatttcagctcactgcaaccttcgcctcccagcttcaagcgattctcatgcctcagcctcccaggtagctgggatttcaggtgtgcaaccaccacacccagttaatttttgtatttttggtagagatagggtttcacatgttggccaagctggtcttgaactcttgacctcaagtgatccacctgtctcagccttcccaagtgctgggattacaggtgtgagccatcacactcggccaaagctaggatttgaatataagtttgtctgaccctcaaaacccatgctccttcctctgtgttagccaacttcctgcatagccaacttcccagggtcatggaaagaatcattaacgcaacccaggaatgctctcccggagtgtggctatatctagagaaattgtggaaagaggccaggcacggtggctcactcctgtaattccagcactttgggaggccaaggtgggagaatcatctgaggccaagagttcaagaccaacttggacaacatagtgagaaccctttctctattcaaaaaaaagaaagaaagaaagaatttgcctaaatagaacagaaaaggctgtatgtgcaagacagttactgcaggttttataatagtaaaaagctagaaaaaaactaattattcaacagtacataattaagcaaattaaaatacatatattcaataggatattaagcagccattaaaagtcatacttaagaaagcttatgatataattttcactgaggtaaaactgaataaaagttgcatgtactttaagaatacaaccacgaaaaacaaagctttttaaacttatgcacagagaaaggaaaggccagaaagtgtttgtatgtaaagaccattagtatgtgttgtctgtgatttttttcagctgtgttttgtagcttttccttgtagaggtctttcacctccttggttaggtatattcctaagtatctttttttttgcagctatcgtaaaaggggttgcattattgatttgattctcagtttggtcgctgttggtgtatagaagagctactgatttgtgtatattaattttgtatccagaaaactttcctgaattcttttatcagttataggagctttctggaggagtccttagggttttctaggtaaacaatcatatcatcagcaaacagcgacagtttgacttcttctttaccaatttggatgccctgtatttcattctcttgtctgattgctcaggccaggacttccaatactatgttgaggaggagctcatggataggtagaatcaatattgtgaaaatgaccatactgctaaaagcaatctacaaattcaacacaattcccatcaaaataccaccatcattcttcacagaattagagaaaacaattctaaaattcatatggaaccaaaaaagagcccacatatccaaagcaatactaagcaaaaagaacaaatctggaggcatcacattacctgatttcaaactatgctataaggccatagtcaccaaaacagcatggtactggtataaaaacaggcacatagaccaatggaacagaaaagagaactcagaaataaacccaaatacttacagccaattgatctttgacaaagcaaacaaaaacataaagtggggaaaggacatccttttcaacaaatggtgctgggataattggctagccacatacaggagaatgaaactggatcctcatctctcaccttatacaaaaatcaactcaagatggattaaggacttaatctaagacctgaaactacaaaaattctagaagatatcattggaaaaaaccttcacaatctatatgtctgacaaaggactaatatccagaatctataaggagctcaaacaaattagc

SEQ ID NO: 714 - DNA, 2093 bp, Homo sapiens
tttcccaaagccacatagctagtgatgcctctgataatttgaatcctgttaataatcttccttgttccttccttggtggtgagagtttaacccctccttcagatcctttcgtagaacttaaatattctagagagggttgtcgtctaaagtcattcatgtgcaatgtagtaactcaccacgtcctcattaaaatgagaactcattgttacatggacacattgcaggggaaaaaagagaaatgagaacctgttcagtcaatattaactggatgctgaccacatgccattccaggtgcccgagatacagcaacctacagaacagatgtggtccctggtccctgcccttggggagcttatgttgtgagggagacaatcaatggtcaatatgtgctaggaaaggtgtcctgaaagagaaaagtaaggggcagccttacttgggcacagtggtgtgggcaaaatggcatggggagcccagcctccgagcaggcgatggtgagctgagatgggcagactggctgggaggccctgctcactgcaggagggccccattcttccagggattgccaagtcggactgaattgccaccatgtatgaagtttacgcttagactgcccaacacagtggccctgggcacgtgactgatctttcagaaatagtatttgagcagctaagaggcaagagttgtgaccccaaagttcagacgaagataaaaaccaccctcggtggctgtggggtgtccagtagcccagggcccttgagctctgtccctgtcatgcgtcagaggacatcagtgctctacctctgccaaaggttacagagcagagctcagccagtcctgccccaggagaataaaggaaccctttgacagcctgccaaaggcggcatattctgtggatctgatccctgtggggaaacgggctcctcacacgggagccatgagtgtctgttcacaccaccaagtatccatggctctcagccaggaagggtccaactgccgacttcagcagcgtgctggaggaccataatattaaggcttgctcagggcccccgagcaggacagggagccctgccctgggcctgcctcaaccctgggctgggcctgtgagctgagcaaagcctttaagaaagggtacactctgtcgtttttcttctttgtgaaaactcctgctttctactctggaactcaacctctttctttgccaagagcttgtttgctgtcaatattgttctgctcagactaattactggtttctgtatgtcgatggatatgaaactgttacctgtatttcggttgggctttgggaccatcctactggtcctgtcttaggaactcaagtgggttttttctactatttgaagtgacttgatattgttatcagtttcttctcaaatagcctggtaaacagcctcctggttggggctgtagcattccccgccttccctctctgtaccctctactcactcctttccatctctccacagcgtcttcctccacttgatgaaggtggacccagactccacctggttcctcctgaacgagctttactgccccgtgcagttcacacctccccaccccagcccccaccctgtgcagctgcacggggccagcgggcagcagaacccctacacgaccaacgtgctccagctgctcaaggagctgcagtgaccctgctcccccaccacagaggccaccgatccctcccctactgccagctagaagctgggctgaccccaccccggccataggcggtggcagcggcagcagagaaggtgaattagttagccaatcgatttataaattgatcgatcacacaactgcttagaaatggattgaaggaaagtagctgactattatttatgtttcataccttgtgttttcaagtgacattgtctggtggctctaagggtttaaccccttagcctaccatctctatagccccagctccctcacaggccacacacacacacacacaagaggtcagttcccctccatctgcatacacctccctgtcttcaaataatgagatggaactaatttgttttacctaacctgatctttgggaaacaaacggaaataaagacacttcttggatg

SEQ ID NO: 715 - DNA, 2482 bp, Homo sapiens
agaatcgctggggtggcagagccgccagcgaggctggggatgggggcgccgctgctctctcccggctggggagccggggctgccggccggcgctggtggatgctgctggcgcccctgctgccggcgctgctgctggtgcggcccgcgggggccctggtggaggggctctactgcggcacgcgggactgctacgaggtgctgggcgtgagccgctcggcgggcaaggcggagatcgcgcgggcctaccgccagctggcccggcgctaccaccctgaccgctaccggccccagcccggagacgagggccccgggcggacgccgcagagcgccgaggaggctttcctgctggtggcaaccgcctacgagacactcaagtcctcctgcatatgcccaagaggattgggagtggaatggacaccagcagaagcaccacagttattcctgtagagattagaaacaaggagcttattgccctgcttgtcaaggctcaggacagacaggaggaagaaacaagtataaaggttttggttttggaaagaagttggaatctccagaccctgggaccttaagatccacaaaattgctgaaagaaaaagtactaccttattgaaaggatgaagaaacacgaaaagattatgattacatgctggatcatccagaagagtactacagccattactaccactactatagcaggcgcttggcccctaaggtggatgttagagtagtgattttggtcagcgtgtgtgctatttcggtgtttcagtttttcagctggtggaatagctacaataaggcaatcagctacctagccacagtgcccaagtaccgtatccaagctacagagattgccaagcagcagggactgctcaaaaaagccaaagaaaaaggcaaaaacaaaaagtccaaagaagaaattcgtgacgaggaggagaacatcataaagaacattataaaaagtaaaatagatataaagggtggctatcagaaaccccaaatctgtgatcttctcctgtttcaaattatcttagctccttttcacctatgctcatatatagtttggtattgtcggtggatctataattttaacatcaaaggcaaagaatatggagaggaagagagattatacattatacgtaaatctatgaagatgtcaaagtctcaatttgatagtctagaagatcatcagaaagaaacttttcttaaacgagagctctggatcaaggagaattatgaggtctacaagcaagaacaagaggaagaattaaagaaaaagttggcaaatgaccccagatggaagagatacaggagatggatgaagaatgaagggcctgggcggttaacatttgtggatgactgaagattgatggaatgctactatgccaaaccttaattgtgatattattttcataactgaattattttagaaatgtatcaattgactgctgctcagcagtaactaaaattcctcaagtatttgattaaacagaataatgtcaaaatttaaaccttcccttaaaactttatacataagacatttatgattgttcaatttttataatctatttgtggattttgttaaaagatttcacatgaagatttattagttgccatttaaaatttttatatgtttagttaaaagatttgacatgaaaatttattagataccatttaaaaattttatgtgttatgtgtttattctttgagaatgttaccttactgtttgtaatagtgctacatttttctgctttcatggcctctgtattttcacaaaacaccaaaaacagcatttaattatattatcatgagtgtgtttctggacacaaacttctgcagtagaatgacctaacatgtcgttttcattgcagtcattataggattgaaatacgttcaaaataacctctctaggaaagtcttctgctagaatttctcccctctattcattataatattctttgtttttaaagccagtcaaatataatagtcttaataagatcagaaactctccaggagagtgagtctaccctcacgtccttgtaggatgatcttgattatagtcttattataggactataactgtattctcaacatttctccagaaaggaccttgtaaaaaggtcttttgtaccacagtattggttttttcccctctctcgtcacttaaaaaaaaaaatagcaaggcagaaatagtgtattgaaaagttgttcatctattatgaagtccttgagtggtgaaaaatccgttgtacatgagaacatttctatgcatttaagccagaaacgaggtacatggctgtgtgctcttctgtcaaccaatgaaatgtgttttcacatgtgtggcagtgcaagtaaataacacattatttgactgaatcaggcatgatactgcaccaaagtgttggtacatattcacggtagtaaatcagtacccctgttaaaggatttatcccattgcttcatattaataaaatggttacaatat

SEQ ID NO: 716 - DNA, 3357 bp, Homo sapiens
tatacctcgcagaatgtcctcaccaagagctacctctcaaaccgaaccaactccagggtgcagagcattggaggggttcctttttacccaggcatcaccctccaggcctggcagcagggtatcaccaaccacctggtggccatcgaccgctctggcctgccgctgcatttcttcatcaaccccaacatgctacctgacttgccaggccccctggtgaagaaggtgtcaaagacagtggaaactgctgtgaagcgctattatacattcaacacctaccctggctgcacagatctcaattctcccaacttcaattttcaggccaacacggatgatggctcctgcgaggggaaaatgaccaacttctctttcggtggggtttatcaggaatgcactcagctctcagggaatagggatgtcctcctctgccaaaagttggagcagaagaatccactcactggtgatttctcctgcccctctggctactccccggtgcacctgttatcccagatccacgaggagggttacaaccacctggagtgtcatcgaaagtgcactctcctcgtcttctgcaagaccgtgtgtgaagatgtgttccaggtggcaaaagctgaatttagggctttttggtgtgtggccagcagccaagtacctgaaaactcaggactgctttttgggggcctcttcagcagcaagagcataaaccccatgacaaatgcacagtcatgcccagccggctactttccactgagactctttgaaaacctcaaggtatgtgtttctcaggactatgagttgggaagcaggtttgcggtcccctttggcgggttctttagctgcacagttgggaaccccctggtagatcctgctatatccagagatttaggggcaccgtctctgaaaaagtgccccgggggcttcagccagcacccagccctcatcagcgatggatgccaagtgtcctattgcgtcaaatccgggctcttcacaggagggtccctgccccctgccaggctcccacctttcacccggccacccctcatgagtcaggctgccaccaatactgtcatagtgaccaattctgagaatgcgagatcctggattaaagactcccagacccaccagtggaggctgggagaaccgatagagctgcggagggccatgaatgtcatccatggggatggtggtggtctgtcaggaggggctgcagctggggtcacagtgggggtcaccaccattctggctgttgttatcaccttggccatctacggcacccggaagttcaagaagaaagcatatcaggcaattgaggaaaggcagagtttggttccaggcactgcagcaactggagacaccacttaccaagagcaggggcagagtccagcttaaatctctccccgaaaatggtttctctcatctccagtgtggtcattgctgaccactctgttttcctaagcattgaaatggcaagtgcaaccaaaagtaggtatattcgtgacttcttgtttaggtctctgggccaggaaattcatactgttacatggataaggttgggattggggagagggaacagttgggactagaagcaaaagtgattctgggactaaaataggaagcagatgtcctttcccaatgtgtgttgctgtcttcacctgaatgcatttgtgtaaaaatagcggagggacaatgtgaacatttgtatttggaagctatgaatttactctgaagtttgcagttgtttccaatttgtgagctctaagagtttctgcctgtaagaactactctccttttattttgatttttaaaaaactgtctgaatttcacactcttagagcctggaagagccctgaaaagacacaagtcttgcctggctactgctttttaactttgagggctctatgttgacagactgttatctcctctgggtgacctcaaacatctgaaaagaaagatgttgcctgtgccaattccactttttccagctgccccttgatgaacactcccttataccagaccactcttggacttctgactggtgtcatcaagtcctcagaaaatattttaagttattttaagttattaaggaagggatgatttggagacaaggagtaatgaaagatgggtaaaaactggaaaagattctggtgctaagtactaccccttcatcttccatggatggtcattacctttcctgtcctcctgttctatgaacacacacacacacacaccccccccacatttcaataagtcttcattgttctgggtccttacctttcctgtcctcctgttatatgaacacacacacacacacacacacacacacgcacacacataccacatttcaataagtcttcattgttctgggtccttacctttcctgtcctcctgttatatgaacacacacacacacacacacacacacacgcacaccacatttcaatgtctgcatggttctgggggtaacaaaggcaagaagttaaagtaagaccacatttgagtattacttactctgtagaatcaaaacagagtagttaacaccaattatgcaaactacttttttttccagcagaaagggagctgacatgatcaaatccatgttttcaaatgaactgaaaaaggcatccagcaccacttataacacatttatttcagttccaggctgacagccttggggcatctagcaggatgcataattgtcatctggtgagagttgggactttgctcaattttaataccaatctctcctgattgtaattacctccactactttcatgatccccctacaatatttttttaaatgatatatttattcactgaatcaaatgtcattaatgagttatcttctgtggaggatgactgttctctttgttaatgttcacaatcaagatcttgggctgagaagaggcccttcacccaaggagtttgaagtatcacagcgtgtgggaaggtgggaaccaggatacccattcatttccaaccgagacacagagaagtgagtcacagaatttgagcccgctctcttgactgcccagccagagacactgatttctgtaacctcttcacttgatcctgcctcttaagcattaaaacattctcctaaacctctgagtgttttgtgggttctgggtgttttgtacattttagccaagctaaccacttgtctgcaagtactgactttcctatgaattctttgaagattattgagtcagaaaggaaaaatatagccccaaattcccaggcttttaatgcattacattaactgcctattgaaatgagaagttcttcacaaacttgtatacccactaacaagattgcacataaacatgcattaaagtatatactaagaaaaaaaaaaaaaag

SEQ ID NO: 717 - DNA, 1920 bp, Homo sapiens
taggatcccagggaggtgtaaactcagtgcttaattaaatggattctttagagggtgggaaacaggtggatgtcaaccatttgccccacatacccgtattcatgcaatccacccccagtgggctcaccggtgcgggtgtgcaaaacctcctcccaccccagtcatcttaggttcaggtcatcctttggtcctgctctttccccgccaggctgtctgttgatgctacttttaatctgctttcactaagataagcctggcagaagtggtgggggtaaggtgggctgtaggccagctcccaaatgtgtgctgggcataacagaagacccattcttgactgaagtgcccttgtgggaccctgagcccgtgccctggagtggcacagggaggtgtgccagcaatggggaccgaggtcactggggactgctggggttcgggctagtggcctgtctggctgctgtctgcttccctcgttcacatcctgctggagccttaaataggagcccaaaagcttttctttcttacttttttttgagacaaaatctcactctgttgcccaggccggagtgcagtggcacaacctctgccgcctgggttcaagcgattctcctgcctcagcctcccgagtagctgggattacaggtgcctgccaccatgcctggctaattttcgtagttagagtagagacggggtttcaccatcttggccaggctggtcttgaactcctcacctcatgatccacctgcctcggcctcccaaagtgctgggattccaggtatgagccaccacgcccggcctaaagcttttctattaataatttcctgcctcaccctccatccccttcctcctcagacacctggatttcattagcatcatgacctacgattttcatggagcctggcgtgggaccacaggccatcacagtcccctgttccgaggtcaggaggatgcaagtcctgacagattcagcaacactatctgtgacttcctccgcggagccacagtccatagaatcctcggccagcaggtcccctatgccaccaagggcaaccagtgggtaggatacgacgaccaggaaagcgtcaaaagcaaggtaggtttccccaaggccacacctcaggacaaagagaaagaaggaggccccgctcccagcagccagattcctgtcccttgcactgaggtctgggctgggctcacagagcacatgtgccctgtacacactctgggtcagggaacccagccctgctcctctgggcctcccctgccaggtgcagtacctgaaggacaggcagctggcgggcgccatggtatgggccctggacctggatgacttccagggctccttctgcggccaggatctgcgcttccctctcaccaatgccatcaaggatgcactcgctgcaacgtagccctctgttctgcacacagcacgggggccaaggatgccccgtccccctctggctccagctggccgggagcctgatcacctgccctgctgagtcccaggctgagcctcagtctccctcccttggggcctatgcagaggtccacaacacacagatttgagctcagccctggtgggcagagaggtagggatggggctgtggggatagtgaggcatcgcaatgtaagactcgggattagtacacacttgttgattaatggaaatgtttacagatccccaagcctggcaagggaatttcttcaactccctgccccccagccctccttatcaaaggacaccattttggcaagctctatcaccaaggagccaaacatcctacaagacacagtgaccatactaattataccccctgcaaagcccagcttgaaaccttcacttaggaacgtaatcgtgtcccctatcctacttccccttcctaattccacagctgctcaataaagtacaagagcttaacagtg

SEQ ID NO: 718 - DNA, 3466 bp, Homo sapiens
actcactcctccaaccactggctcagcctctccgcccgctgcctgtgaatgatgcaatggaaggtgtgctggggtcgccctgtgtcccgtgcataggagcatctcagcctccaggtcctctcctttggggcttacggcacccccatgctacgaaccgcaggcagggacggcctctgtcgcctgtccacctacttggaagaactcgaggctgtggaactgaagaagttcaagttatacctggggaccgcgacagagctgggagaaggcaagatcccctggggaagcatggagaaggccggtcccctggaaatggcccagctgctcatcacccacttcgggccagaggaggcctggaggttggctctcagcacctttgagcggataaacaggaaggacctgtgggagagaggacagagagaggacctggtgagggataccccacctggtggcccgtcctcacttgggaaccagtcaacatgccttctggaagtctctcttgtcactccaagaaaagatccccaggaaacctacagggactatgtccgcaggaaattccggctcatggaagaccgcaatgcgcgcctaggggaatgtgtcaacctcagccaccggtacacccggctcctgctggtgaaggagcactcaaaccccatgcaggtccagcagcagcttctggacacaggccggggacacgcgaggaccgtgggacaccaggctagccccatcaagatagagaccctctttgagccagacgaggagcgccccgagccaccgcgcaccgtggtcatgcaaggcgcggcagggataggcaagtccatgctggcacacaaggtgatgctggactgggcggacgggaagctcttccaaggcagatttgattatctcttctacatcaactgcagggagatgaaccagagtgccacggaatgcagcatgcaagacctcatcttcagctgctggcctgagcccagcgcgcctctccaggagctcatccgagttcccgagcgcctccttttcatcatcgacggcttcgatgagctcaagccttctttccacgatcctcagggaccctggtgcctctgctgggaggagaaacggcccacggagctgcttcttaacagcttaattcggaagaagctgctccctgagctatctttgctcatcaccacacggcccacggctttggagaagctccaccgtctgctggagcaccccaggcatgtggagatcctgggcttctctgaggcagaaaggaaggaatacttctacaagtatttccacaatgcagagcaggcgggccaagtcttcaattacgtgagggacaacgagcctctcttcaccatgtgcttcgtccccctggtgtgctgggtggtgtgtacctgcctccagcagcagctggagggtggggggctgttgagacagacgtccaggaccaccactgcagtgtacatgctctacctgctgagtctgatgcaacccaagccgggggccccgcgcctccagcccccacccaaccagagagggttgtgctccttggcggcagatgggctctggaatcagaaaatcctatttgaggagcaggacctccggaagcacggcctagacggggaagacgtctctgccttcctcaacatgaacatcttccagaaggacatcaactgtgagaggtactacagcttcatccacttgagtttccaggaattctttgcagctatgtactatatcctggacgagggggagggcggggcaggcccagaccaggacgtgaccaggctgttgaccgagtacgcgttttctgaaaggagcttcctggcactcaccagccgcttcctgtttggactcctgaacgaggagaccaggagccacctggagaagagtctctgctggaaggtctcgccgcacatcaagatggacctgttgcagtggatccaaagcaaagctcagagcgacggctccaccctgcagcagggctccttggagttcttcagctgcttgtacgagatccaggaggaggagtttatccagcaggccctgagccacttccaggtgatcgtggtcagcaacattgcctccaagatggagcacacggtctcctcgttctgtctgaagcgctgcaggagcgcccaggtgctgcacttgtatggcgccacctacagcgcggacggggaagaccgcgcgaggtgctccgcaggagcgcacacgctgttggtgcagctaccagagaggaccgttctgctggacgcctacagtgaacatctggcagcggccctgtgcaccaatccaaacctgatagagctgtctctgtaccgaaatgccctgggcagccggggggtgaagctgctctgtcaaggactcagacaccccaactgcaaacttcagaacctgaggctgaagaggtgccgcatctccagctcagcctgcgaggacctctctgcagctctcatagccaataagaatttgacaaggatggatctcagtggcaacggcgttggattcccaggcatgatgctgctttgcgagggcctgcggcatccccaatgcaggctgcagatgattcagttgaggaagtgtcagctggagtccggggcttgtcaggagatggcttctgtgcttggcaccaacccacatctggttgagttggacctgacaggaaatgcactggaggatttgggcctgaggttactatgccagggactgaggcacccagtctgcagactacggactttgtggctgaagatctgccgcctcactgctgctgcctgtgacgagctggcctcaactctcagtgtgaaccagagcctgagagagctggacctgagcctgaatgagctgggggacctcggggtgctgctgctgtgtgagggcctcaggcatcccacgtgcaagctccagaccctgcggctggatagctgtggcctcacagccaaggcttgtgagaatctttacttcaccctggggatcaaccagaccttgaccgacctttacctgaccaacaacgccctaggggacacaggtgtccgactgctttgcaagcggctgagccatcctggctgcaaactccgagtcctctggttatttgggatggacctgaataaaatgacccacagtaggttggcagcgcttcgagtaacaaaaccttatttggacattggctgctgaatggtcctatctgctggctctcccctgagatctggacagaggaagatgggagggtgctcatcacccccccagcataatgatcagcctccttcctagagacagactcatgcagattgagatcaaaagtccctctgcttgggatcaaattaatgtttgacagagctggccaggcgtggtggctcatgtatgtaatcctagcacttcgagaggccgaggcaggtggatcacgaggtcaggagtttgagattagcctggccaagatggtgaaaccctgtctctactaaaaataaaaaaaaattagccaggc

SEQ ID NO: 719 - DNA, 2073 bp, Homo sapiens
actgtccgtccgccactgcccgccagcaggtcctggtctccgctctccaacagctgaaaggccggcgcagtgaacacagaaacgaaaaccaagaaatgccttattccacaaacaaagagttgatacttggcatcatggtgggcactgctggaatcagcttgctgctcttgtggtaccacaaggtccgtaaaccagggatagcaatgaagttacctgaatttctttctctgggtaatacatttaattcaataactttgcaagatgaaatacatgatgaccaaggaacaacagtaatctttcaagaaaggcaacttcagatactggagaagttaaacgaattactgacaaatatggaagaactcaaagaggaaatcagatttcttaaagaagctattccaaagctggaggaatatatacaagatgaacttggagggaaaataactgttcataagataagccctcagcacagagcgagaaaaagaagactccccacaattcaaagttcagcaacaagtaatagttcagaggaagcagaaagtgaaggaggggcattttatggcttaaggatgacggcctagaagggaagggagagacttactttggattaaatttacaatgggaaagtgcttaaggtatattacagctaatactgacacagaagaacagagttttccagtccctaaggcatttaacacacgtgtagaggaattaaatttagatgtccttcttcagaaggtagatcatttacgtatgagtgagtctggcaagtcggagagttttgaactacttcgtgaccacaaagaaaagtttagagatgaaatagagtttatgtggcgatttgctcgtgcttatggagacatgtatgaactatctacaaacacacaagaaaagaaacattatgctaatattggaaaaactttaagtgaaagagctattaatagagcacccatgaatggacattgtcatctgtggtatgcagttttgtgtggctatgtatctgagtttgagggtttacaaaacaaaatcaactatgggcacctcttcaaggaacatctagatatagcaatcaaacttttaccagaggaaccctttctatattacctcaaagggagatactgctatactgtctcaaaactgagctggattgagaaaaaaatggctgctactctgtttggaaaaataccatcttcaactgtacaagaagctttacacaatttccttaaggtacattttgtgtatccattattttagtgtcagactgattaccatctgcaccaatccctgctgccgttgtcaaggaaatcttttctccatgtggagcctcagtttgaatcctggttttggcatgttctgttttaagcccctcataatgcaagttattaatatgttttaagtctaaactccttagaacaactagttatgccctaggttctaggaattacaaactactttttaaaaataacccagcagcctaaatgaaggtttaggtttgacagctcttactgctaagtccaagaacagctctctgagtcacttgagcatgtgcagaaacagtcacgccctgatggttaaacttagtcccagtcctcctgattagcctaacatagaaccagtttaatcttaaagaaataaaagtgctaaaggaagagttattttaaaagctaactcctaaagttgcagacatttctctggaagattcttggggtatcagaccaaatcagtattctcaatcctgtcttaaaatgtataatcgctgtactatacaactctaagcagtaatatatgtgtgtgtgagctcacatgtaaatgtataatatagccacccatataatcaacttcctgtgggggtaataatccctttacctttctctggaaccagtttcaaaattttatagttactaaatgtgttttccttcccaacctacctacttcaagtttacaaaaatacagacaaggctgcatgcagtggctcacctctgtaatcccaacactttggaaggccgaggtaggaggattgcttgaggccaggagtttgagaccagcctgggcaacatagcaacatgccatctctac

SEQ ID NO: 720 - DNA, 3012 bp, Homo sapiens
agagaaacctctacagagatgtgatgctggaaaacttccagaacctggcctcactagggtatccgctacacacaccccatctgatctcccagtgggaacaagaggaggacctgcagacagtgaagagagaacttatccagggcatctttatgggagagcaccgggaaggttttgagactcaacttaaaactaatgaatcagttgcttcacaagatatttgtggagaaaaaatatccaatgaacagaaaatagtaagattcaaaaggaatgattcctggttctccagtttacatgaaaaccaggagtcctgtggtattgattatcagaacaaaagccatgagagacatttgagaaatcatatggtagagaacatctatgaatgttatgaagaaaatcaagatggacagactttcagccaagttccaaatcttgattcactcaagagaaatactgaagtaaaatcctgtgaatgccatgagtgtggaaaggccttcgtggatcattcatcccttaagagtcacatcaggtctcatactggaagcaaaccctatcagtgcaaggaatgtgggaaggccttccattttcttgcttgtttcaagaagcatatgaaaacccccactgaagagaagccctatgaatgtaaggaatgtaccaaagccttcagctgttcctcattctttagggcacatatgaagattcacatcggaaagacaaactatgaatgtaaagaatgtgggaaaggttttagttgttcctcatcgctcacagaacacaaaagaattcacagtggagataagccttatgaatgtaaggaatgtgggaaggccttcagttgttcctcctcactctccaaacacaaaagaattcacagtggagataagccatatgaatgtaaggaatgtgggaaggcctttagctcttcctctcaccttataatacatataagaattcacactggagagaagccttatgaatgtaaagagtgtgggaaggccttcagcgagtcctcaaaactcactgtacatgggaggacacatactggagagaaaccctataaatgtaaggaatgtgggaaagcctacaattgtccctcctccttaagtatccatatgagaaaacacactggagaaaaaccgtatgaatgtctggaatgtggaaaggccttctaccttcccacttcccttaatacacatgtgaaaaatcaaagtcgagagaaaccctatgaatgtaaggaatgtgggaaggcctttagttgtccctcgtcctttagagcacatgtgagagatcacactggaaagatacagtatgaatgtaaggagtgtgggaagacctttagtcgttcctcatccctcaccgaacacctaagaactcacagcggagagaagccgtatgaatgtaaagaatgtgggaaagcctttattagttcctcccaccttacagtacatatcagaactcacactggagagaaaccctatgaatgtaagaaatgtgggaaagcctttatttatccctcagcccttaggatccacatgagaacgcacactggggaaaaaccctatgaatgtaaggaatgtgggaaagcatttcgtcattcttcataccttactgtacatgcaagaatgcacactggagagaaaccctttgaatgtctggaatgtggaaaagctttcagttgtccctcatcctttcgaaggcatgtgagaagccacactggagagaaaccctatgaatgtaaggaatgtgggaaagcctttgtttgtcctgcctactttcgaaggcatgtgaaaactcacactagagaaaacatataaatgtaaggaatatgggaatgtctgcaaagcttcagatcctaggcaacatgtgagatctcatactgtggagacaccctatgaatgtaagaaagtaggaaattgttgctcatcgttttgaagatttgaggacactttagagaaaccctgtgtatgtaagtcatgtgctaaagcctttatgaacattgcttattatgtataagaaaatctctactagaaatgaagatcagtgcctcatccttaaagtagaatgctggctcgttgattaccagtgttttctgataggaacattgaaggtgataaatttaccttttcagctctagccacatactttttagtatgaggtgctttaattttggttctgatgtaaatatgatttccattacaaaatcttttggatcatggaggacacgaaatattttttctgtataggcagcagtggtcttttttaaaaaagtggtttctaattaatgttcattgttctttaaatgggtagtcgttataatattgacaaaccaatataatattgacaaaccaaaaaccaaatattgatttttgttgatgttttgtttttagtctacatggcagataatggaacttgcccactcaatatttttcttcctattcttttttgctaagagacgttagagtttctgagatgataaatttttactattaaaagcttttattgtctagtgagtaatttcagcagaaattaatttaatatactatttttatattttattctttgtccttgctcgtggctgggaattggatccagtgttttgagtgtaaaaattgtgttacattaactacatttcccagaatcacttttttctccagttctaggttagacttgtctaaaataagagtttgtacgagatttggaaggcataagggaagaaaaagctgttatgctatgtttagtggggccatcagacagagagacagatgtataaaggcctggcgacctctagttttcagctcatttttctgactgttggactcattgatcaatatttgctcaaaactgaatgttatagctggacgtgatggtgcatacctgtggtcccagctactcagggggctgaggctggaggatcacttgagcccaggagtttgaggctgcagtgaactatgatcatgccactgcactccagcctgagtgatagagtgagaccctttctcaaaaacaaaagaaaat

SEQ ID NO: 721 - DNA, 2248 bp, Homo sapiens
agtgtgcgaattcagaggaaggagaccgaatccagcctgggcacaggagggaaagcgtcttggaggcagctggtccccaggtggcccttaaggataaagaaaagttagcttggtgaagggctgaggaaggtagtgagccttctaggaagaggggagaaatcaagcacaggcgtggccctgacacggagggctgcacagaaggtggctctcactgggaacatggccaagagtggacaacacctggggacccctgccgaatctgccggtgcctggagggtcacatccagtgccgccagcgagaatgtgccagcctgtgtccatacccagcccggcccctcccaggcacctgctgccctgtgtgtgaaggctgtttcctaaacgggcgggagcaccgcagcggggagcctgtgggctcaggggacccctgctcgcactgccgctgtgctgtgagtgtggctgcctggcagggagggcctggctccggggcctgcctctggcgtgctgaccaggccctgttggcagaatgggagtgtccagtgtgagcctctgccctgcccgccagtgccctgcagacacccaggcaagatccctgggcagtgctgccctgtctgcgatggctgtgagtaccagggacaccagtatcagagccaggagaccttcagactccaagagcggggcctctgtgtccgctgctcctgccaggctggcgaggtctcctgtgaggagcaggagtgcccagtcaccccctgtgccctgcctgcctctggccgccagctctgcccagcctgtgagctggatggagaggagtttgctgagggagtccagtgggagcctgatggtcggccctgcaccgcctgcgtctgtcaagatggggtacccaagtgcggggctgtgctctgccccccagccccctgccagcaccccacccagccccctggtgcctgctgccccagctgtgacagctgcacctaccacagccaagtgtatgccaatgggcagaacttcacggatgcagacagcccttgccatgcctgccactgtcaggatggaactgtgacatgctccttggttgactgccctcccacgacctgtgccaggccccagagtggaccaggccagtgttgccccaggtgcccagactgcatcctggaggaagaggtgtttgtggacggcgagagcttctcccacccccgagacccctgccaggagtgccgatgccaggaaggccatgcccactgccagcctcgcccctgccccagggccccctgtgcccacccgctgcctgggacctgctgcccgaacgactgcagcggctgtgcctttggcgggaaagagtaccccagcggagcggacttcccccacccctctgacccctgccgtctgtgtcgctgtctgagcggcaacgtgcagtgcctggcccgccgctgcgtgccgctgccctgtccagagcctgtcctgctgccgggagagtgctgcccgcagtgcccagccgccccagcccccgccggctgcccacggcccggcgcggcccacgcccgccaccaggagtacttctccccgcccggcgatccctgccgccgctgcctctgcctcgacggctccgtgtcctgccagcggctgccctgcccgcccgcgccctgcgcgcacccgcgccaggggccttgctgcccctcctgcgacggctgcctgtaccaggggaaggagtttgccagcggggagcgcttcccatcgcccactgctgcctgccacctctgcctttgctgggagggcagcgtgagctgcgagcccaaggcatgtgcccctgcactgtgccccttccctgccaggggcgactgctgccctgactgtgatggtgagggtcatgggatagggagctgccggggtgggatgcgggagaccagagggctgggtcagaataatctttactgccctagggtggatctaaaatatttattacagtaagaaaaagccctgaggctgggagccctagctgaagcctgtgaccccgacaatttgggaggctgaggcaggaggatcacttgagcccaggagttcaagaccagcctgggcaacatagagagatcttgtctctacacaaaaaatttaaaatcagctggtcgtggtgcctcttgtagttccatctactccggaggctgaggtgggaggattgcccaggagtttgaggctacagtgaaccgtgttttcaccactgcactccaggctgggtgacagagtgagaccttgtctc

SEQ ID NO: 722 - DNA, 2249 bp, Homo sapiens
attttttttccttttctccagcggcctcaggttcttgttacaactgagtccgggttggaggaggtgtggggccgctgccgccaggaaaaacagcactggaggcaatgtttctataaatcaaagaagagacagtgtgagaatgtcagccctcaactggaagccgtttgtgtacggggggctggcctccatcactgctgagtgcggattgcccccgcgatgttacgccaggcatcctatggcaccatcaagataggcacttaccagagcttgaagcgactattcattgaacgcccagaagatgaaactctaccgataaatgtgatatgtggaattctgtctggagtcatatcttcaaccattgctaatccaactgatgttttgaaaattcggatgcaagcgcaaagcaacaccattcaaggaggaatgataggcaacttcatgaacatttaccagcaagaggggacaagaggactgtggaagggtgtgtcccttactgcgcagagggctgctattgttgttggtgtggagctgccggtctatgacatcaccaagaagcatcttattctctcaggcctgatgggagacactgtgtatacccacttcctctcaagcttcacctgtggtctggcaggggccctggcctcaaaccctgttgatgttgtgaggacacgtatgatgaatcagagagtgcttcgagatggcagatgttctggctacacaggaaccctggattgcttgttacagacatggaagaatgaagggttttttgctctctataaaggcttttggccaaattggttgagacttggtccttggaatatcattttctttgtgacatacgagcagttgaagaaattggatttgtgacaagccaaggctgcatgagacatctttctgaaaatggtaacttctgaaacagcaaagcttcctgtgtttcactctgcttctcactgcttggctcatcacagattctgggatgtgagcaacagatgaagactgggttagttgagattgctgtgtgttggcattggatgctcttcatcaaacgtttaatggcataaactaacatccaaacactagtctttaccactgaagtgcccttcaacatcaaagataatatgtggaatgcatgtttcttgctaaagaaaacttgcaagaaaatcaggagcgatgtattgttttattcagggagagtagctcctgatgcatctcagctcatgactgagaatcagactgctctagaaaagctcactggaaccatggaatggagcctccgagaaggtgttatggtttctgaatttctgggagattttgctccttgtcaactgaagaaatttcatgtatggagacctggactgttcaaccccaggtataaacggtgcaggaaatggatcctaggaatatcacactgctttatcatttcctattttggcaggatcttccacttataataagtgattttaagctttgaagacttgacatttgtgagaaattgttacaaagtaataatctctaaattcgtggtggtgttatgtgttggctttgagtttaaagattgcttttcttgaaatgctctttttttaatgtagaaaaattttactttttcaaatatgcatacaatttttaaaacagtagaagcaaattcattttaatgaccatgtaaagagcgaatgtcagacagtattattaccagtttattcaaattacatacatgttcctaccaaggtggaaagaaattcaaacctcatggtaaaacttaagcacgatttaagataaaagcatagtatttcttcagtgtagacttattaagtgccttattgaacaggatcttaacctgctttttctgtttttttgaaagagttaatgcaattgttgaagcttctaaccaagaaacaacttaaggaattgggagacttggtcccctcgttgtcagggttctggctataagtacctccccacctttgggttttcttaaatatgccaaaaggaattctagtttttataaccaatgggtttttttgtttgtgtgcttatggatttgtgtaatcattgatgcttaatgttgtggattcataatataaaaagtggctcctgtcctttatatttattcatgtgctagaaatagtatgcattatataaagagtatgaagttttcataggcctttatatttcaagctctttatttaaacattgttggaatatgtggcataagccttgtttcatttatttaataaactggagtaatatat

SEQ ID NO: 723 - DNA, 3226 bp, Homo sapiens
ttattttttgagacagttctccctctgttgcccaggctggagtgcagtggtgtaaacatagctccctgcagttgcaaattcctgggctcaagtgatccttccatctcagcctcccgagtagctgggactacaggtgtccaccaccatgcctggctaatgacctcttcttttgtagatacatcagctacatggaagcaggaaaccaaacaggatttttagagtttatccttctcggactctctgaggatccagaactacagccgttcatatttgggctgttcctgtccatgtacctggtgacggtgctgggaaacctgctcatcatcctggccatcagctctgactcccacctccacacccccatgtacttcttcctctccaacctgtcctgggttgacatctgtttcagcacttgcatcgtccccaagatgctggtgaacatccagaccgagaacaaagccatctcctacatggactgcctcacacaggtctatttctccatgttttttcctattctggacacgctactcctgaccgtgatggcctatgaccggtttgtggctgtctgccaccctctgcactatatgatcatcatgaacccccacctctgtggcctcctggtttttgtcacctggctcattggtgtcatgacatccctcctccatatttctctgatgatgcatctaatcttctgtaaagattttgaaattccacattttttctgcgaactgacgtacatcctccagctggcctgctctgataccttcctgaacagcacgttgatatactttatgacgggtgtgctgggcgtttttcccctccttgggatcattttctcttattcacgaattgcttcatccataaggaagatgtcctcatctgggggaaaacaaaaagcactttccacctgtgggtctcacctctccgtcgtttctttattttatgggacaggcattggggtccacttcacttctgcggtgactcactcttcccagaaaatctccgtggcctcggtgatgtacactgtggtcacccccatgttgaaccccttcatctacagcctgaggaacaaggatgtgaagggagccctggggagtctcctcagcagggcagcctcttgtttgtgatggatcccttggccccaggactaagaagttttgtgagcaccaatggcaaaaatgttttattttgaaattcttactctttaaaattaaaaacatttttttatactttgagagtacaaatgcagatttcttaacatgcatttgcataagggtgaagtctgagcttttggcgtaccaattacctgaatagtgaacataaggcactttttttttttttttgagacggagtctcactctgtctcccaggctggagtgcagtggagtgatctcggctcactgcaacctccgcctcccgggttcaagtgattcttctgtctcagcctcctgagtagctgagattacaggtgtgtgccacccatgccttttagtagagacggggtttcaccatcttggccaggctggtctcgaactcctgaccttgtgatccacctgccttggcctctcaaagtgctgggattacaggtgtgagccaccacgcccagccaaggcagtttttaaactctcactcccctctcaccttttgcagtctccagtgtccattattctgttataatgcccatgcgtatacattgtttagctcccaattataagtgagatcatgcagcatttgactttgtttctttactaccttacttaagagaatggcttccagtcccatcgatgttgctgcaaaagacatgatttcatccttttttatggctgagtagtactccattgtatatatcctcgatatctatatagatatagacatatgtagatacataccatgttttctttttttaaaaaaaatttatttttatgtcagtagtttttggggtacatgtggtttttcattacacggatgagttctttagtggtgacttctgagtttttagtgtacccgtcacccaagtggtagtagtctcttattcctcacccccctcccaacctttctcccgtcaagtcaccaaagttcattatattgttcatattcctttgtgtcctcatagcttagctcccacttataactgagaacatacgatatgttcatatggatcttatgtatgttggttgaacatacaaacaagtccaggtttttcattcctgagttacttcacctagagtaatgacctccagttccatccaagttgctacaaaagacattatttggttcctttttatggataagtagtattccatgctgtacatataccacaatctttatcactcattggttgatgggcacttaggttggttccatgcctttgtaattgctaattatgttgctataaacatgcaggtgtatgtgtcttttttacataatgactttgtttcctttgggtagatacccagtagtggaactgctggactgaaaggtagttctacttttagttcttttttttgtttttttttttaagacagagtctcactctgttgcccaggctggagtgcagtggcgcgatctcatctcactgcaacctccacctcccaggttcaagcgattctcctgcctcaacctcctgagtagctgggactacaggcacctgccaccccacccagctaattcttctatttttagtagagacagggtttcaccatgttggccaggctggtcttgaactcctgacctcaggtgatacgcccacctcggcctcccaaagtgctgggattacaggtgtgagccactgtgcctggccttctagttctttaagataccactttaaaaaaagtccagtcctccattgatggacacgtaggttgattccatatctttgctaatgtgaatagtgccgtgataaacatgggggtgtaagttaacaattaatctccaagtaatttccttgatggcacttctgtcctatgtgctattcaaaaattgtgtccttgatcatcgttcttaattctccattagtgagttctgaacttgggtttgaagcatttgctatagctttgttatctcaagtggtggcacagagttcttaagctattgattgttcactgactttatttctatgtgtttgcatgtgggtttttgttgtttgtgtgttcgatcatgaacagatcaacagtgtttatttgttttcctactggatgaagtatgattaaaatacgtatttaaatat

SEQ ID NO: 724 - DNA, 2247 bp, Homo sapiens
ataaccccactgagttgtgtgagttaggtaaacgcgccggcagcccctccctgcctggttactccatctttgggacaaaggaactgacaacattccctgctccacctctgatagagaagctggcttctatcacaactcacccctcccttcattagtggctgcagctgtgccaatggtcagcacagggacaagatgaccacactttaattgagtggctaatgggagccacatggactgtttggaatgatgccagagaaataccagaaactgacattttggaggcctgccagaagtgcccagcatgtgctcaagcatacctgagacaaagacaactgcccaatgtgacacaacaagtgacagtagggcagatgcccttgaccagatggcaaatagattacgctgagccactgccaaaattgcagggctacacatatgcgctgatggctgcagacatagccaccggcttgttgctcatctacccttgcaggttggccaaccagcaacacagcattcgagccctgcaacacttaagtgccttatatggccttcctctggccatcaaaagtgataggggaacacattttactggacatcaaatacgacagtgagcacagcagatggacatacaatgggagttccatgttccttataacccacaagccgctggcatgattgagcaatataacagactcctgaagaacaggttatgtttgcatgttacttccccatccttgggggctggagttccaggttggacctggtgcttcaaatcttgaataagtggccacagaaaggcagcccagccccggtggaggcactgttacaccagcccgctgcccccatcctgctacagatacacaccaagaatgacctcctccgaccagctgtaggttggcatgctccaacaacatcatggactgggcccacacctacaccgagttgaccaatgtctccaactgttggatctgcaccgcccttccagcagcagctgcagacagcttgccctggcttgtgcatccagcttctgtgcagaaccggacattgctaaagacttggggtcccacggacaatgggtgggatgcaacatggaggctttggatagggggtgtcacaaaacccatggcaagcttgccccctggctgactcataacgtccatgagggctggctaatgggagaacacatggtgcccccattgcaggtatcacgatgtatagagcaacactggggtaaagtcattctgggatggctgctggctgaggcctgtgcaaatgtaacacatgccacacaccttgccaagaccaggcccccatggactttgtagcccctgggagcttatgggtctgtgagaacacaggatggccatatcatgccagccaactggactggacgttgtacctgggggtgaccttatatgcctgccactgtgctcccacattgcctagttgcccgcataagtgggaggtgctgcgtttctgctttttgtgagtgtggcgggccccctggtggttctatcgcttagcaataactatccctggggtaagtgtcatcactgtagaaatgtaggttacagcctttgcagagcacgcagcttgggccctaaattacacctgaattgccctccttttgctaaccgatgaagttaatcagatcaggaaagtggtgctgccaaaccggattgccttagacatagttacagctgcctaaggtagcatctgtgcccttgtagggacgcaatgttgtacattcatccctgacaaccaccagaacataacgacagctttacaagtggtgtcacgggagattaaggtgattgagagccttactgaccaccccctgcagagatggtatgcatctctgagctctggtctaagttgggctctcataatcatagatagcatagcaggaatgttagtagtaggttgttgctctctgtgttgtggcctataagtccagggtgcttccctatgtgctcaggtccccactaagaggatcctctcggcctagggagtggagcatagggaacatggctgcactgcagccaagcagtcataggccgaggtaaacatcctgcatggctcagcgggattggagcaaaggtgcacattcccatgccttatataatcacagctatgtagatataacttagagatgctcatgaccaggctctcggccactactgtttgtgaggtgtataaatgtaacactgacactgtgaaagagctgctgaataaagccatgtctcatct

SEQ ID NO: 725 - DNA, 2207 bp, Homo sapiens
ataaaaaatcagtcatttaagtacaagaatcatattttccattcctttttagaaatttattttgttgtccctatggaaatcattcacatctgacaatttatatgttaaagagttttactctctctattttggtccaatttgtatctagtggctgagaaattaaataattctaaagtatgaagttacctatctgaaaatgtacttacagagtatcattttaaaatggatgtctctttaaaaattttgttacttttaccaacaatgtaatataatttatgtatattttattaataatagtgaattccttaaaatttgttctatgtacttatatttaatttgatttaatggttactgcccagatattgagaaatggttcaaatattgagtgtgtttcaatatattatctggcttatttcaattgagtaatatgagcaaaataagttaaaacctgcgtctgatcaattttcctcatgactagaactaaaacagtaaatttggacaatattaagcctcaaataatcatctccaaactccttctaacactttttaaatcagattggaagacatggacaaatcaggttcatgtgttgcatctttatgtcctttgccaatatccaagatcatcacatatggtagatattcacatggagtttcaaattcagaatagattaccattaccttcctgcccttacacatcctactccttatttaaaagttctatttgtgacttttcatttcctgaaagtttaaaaatacaatttgagaatgtttataatacattctctcctgtcttttcacggttacgtctgttattgctgaaatacaccacattttctttgttctggtcaaggttaactcaatatctgtgtgaaagagaactactaacaacgttacaatagaggctagatttgaaaaaaaaaatctatagatctaattgatacaattgtagaacaaaatgtcaaaataatgttttaagtataagagaagatggaccaaggagagagagatcatttgaaaatctaattgtagcttttctaggctcacattcatgtactacttttagcacccttatgggctgtgctcgccccctggacagttgagctttggattatcttcctcttcaattttccctctattgacccgagtgtctccctctgcttctacagatttatagtactccttggctcttttgagtctccacttttactcactgtctctgggatttttaagatccttttcttctcttataaatcatcctcttaatgaaaattagcctaacaaaagtttggagactggaatcctactttgagccactgacttgaaataactcttttggcaagttgcctgacatcctgtcttaccaaggtggcatatttgcatttttactgcttaaaacattttttttttttaccatctttatccaaatttatcatattgatggtaggactaacaggctttttagaagctggctttaactttgagtctcaagctacaatgctgttgggcagcctggtcttcccacgtgagggtttaactttgtttatttgcctccagttattccaaaatgcttattaaatgaaaggcccaggaacatgtttattttagtcacctttgctttttaacaattttgttttgtaatcaatgagtaattcatgatgaattatttttgactaatggatagccgaaggccaagcttttaattctaataggtaatgttcttcttttgtcttattgaaacaatgagaatactctgtgcatttcaaatgcactccgattatgctgtggttttattcacataagcacaatatgtgttttatttataacttcataacaaacttataatataataatttaccttagcagacatgcaaaagcttattcttgtgtgacttactttctttaagctaataatataaaaataaatatgtatcttaaaaatctataataaaacattagaaattaaagatatgtgctttttattttgcagatgagttcatttgcttctgtagatgtgttttcagagctaggtacagaggaatgtttgctacctttagcggtgaaaaaagaaagagagtcaagaattttgttggattgtgtttgtgtgtgcatatatttgatatcatcattatatttgtaatctttggacttgtaatcatagcctgtttattctactgtgccattaaatatactttaccttatacataacg

SEQ ID NO: 726 - DNA, 2408 bp, Homo sapiens
aaaaaagcaacaagaaggaagagcaatggcgacactggatcgcaaagtgcccagtccggaggcgtttctgggcaaaccctggtcctcctggatcgacgccgccaaattacactgctccgacaatgtagatttagaagaggctggaaaagagggtggaaaaagcagggaggttatgaggcttaataaagaagatatgcacttatttggccattacccagcacatgacgacttctatctcgtagtgtgcagtgcctgtaaccaggtcgtcaagccacaggttttccagtcgcactgcgggagaaagcaagacaacaggagaaatgaaggcatctccaggagtggaccagagagcagccaagccatagagaagcatcaggtgtgagaatggaaaacgcagaagagacgtacaacttctgaaagatctcagaggactggcattgtctggagacggcttcctggaagaggagactccagcagagccctgaagtgtggacaagcttccattcactgcaaattcgtgagcacactctggtgtcaggatctagtaaggaaatgggcttgagcagagcagggggtacctgtggggttcttctcttcattttcaccaccacaaagctggtctaagctgccatcaattcccacctggacaactgcaaaagccttccagctgttcctgcttccactcttgctcctctacaattcattctgcacgcagaagtcagaatcaaaatcaaagttcatcatgtcattctcttgacttgtggcttccctttgctcttaagctaaaagtaaaaatcattatcatggctacaaagtcttgtgtggtctgggccacatcctgtgccaggctccctttcattgtctatattccagtcaagctggccttcaaaatttcagcacattgggtctttctgccacagggcccttgcacatacatgcttttccctctgtacatgtgattttctttcatccccgctttccaaagctaactctgactcatccttcagactgcatcttaatgattacttccttctggaagactcccctaattttcacaactagatgagctctcccttatatgttgaaaacaagtatttcttgtgtgaacagaaatgtttaatgtctgccttcccaactcagccacaagctctgtgagggtggggactcagtctttgcatccctcagagcctagcatagtctcagttaatacgtgatagctggagcgtgacatttcattaggaacagtgaggctagttgagaaattatacctcaccagtatataggagagtaccattaggaattcttaatgggatgaaaacctgaattcatgtctagaccctgccacctgctggctgtgctgttttaaataaattgcagatcctctcagagcctgtttcctcatatataaaataatggggatcctaacagccccctcatatggttgtagcaggaatttaattaaataatatatggaaaagcatttttttaactgtaaaaccatacataaatatcctttgtcacttttcccagtgcatgacacactgggtcattaaacatctattggatgggtggatggttggatagatggacagacagattaacagttagggggccagtatgagtgacaagaggagaacttggcatatggaaagcatgatggaagccagaaaaaggagagacttcccagaagtaggaggaggcttgttgattcatccacagtgtcacatgcagtagagcaggcaggagaatgaggggggaaaatcatttaacctgggtggaaggaaatcactggtgacctccagctgattcctcctcagccttttcatgttatctgggctttcaatgacatgccttaattgtaacttaatcactttactgatttctatctttagggggggcggaaatcaaattgatttgcacatatggcaaaattggtaagattactccagctgctgccagcaggtgctgacaagtaaagaactgaatgtcagagaataagaaaatacactaaacatttattttaataaggcctagaaaccttagttatttaataaattgccatggataattggtttcagtttctagagttgtttcatctttaactccctgtgttccagaaggaatcgtgctggatgtgtagacagggccttgtggtttgagacctatctgagctatcacacatttctctgagcattttcctgtctctctgatcacaccccacttcctgccaccactcccagcatttatcatctcagcgctgcctcccacagaagaaggaagacataatgaataaatgaaaccccatgactgtatcaacattcatcaacccattactccaaacgtggctgataaaattgggtacctggattaaaaaaaaaaaaaagtaagaataaattaaaaaaaaggcc

SEQ ID NO: 727 - DNA, 2873 bp, Homo sapiens
ccctcgctgggcttggtagttggggcgcagccgcggtggctgggcgcggagtgtgcgtggcctgagccgtgcgggtgactgcttcagggcttctccgcgactggaccgggcgccgctcgaaagcacgccctccattcgcactgcttgttgggctcatcatgaagcgcttgggctccgtgcagcggaaaatgccgtgtgtgtttgtgacggaggtgaaagaggagccttcctccaaaagggagcatcagccatttaaagttttggcaactgaaactgtaagtcacaaggcattagatgcagatatatacagtgcaattccaacagaaaaagtggatggaacatgttgttatgttactacctataaagatcagccatacctttgggctcgactagatagaaaacccaacaaacaagctgaaaaaagatttaaaaattttctacattcaaaagaaaacccaaaagaatttttttggaacgttgaggaggacttcaaaccagctccggagtgctggataccagcaaaggagacagaacaaataaatgggaacccagtgcctgatgaaaatggacacattcctggttgggtaccagtagagaaaaacaacaaacagtattgctggcattcctctgtagttaattatgaatttgaaattgccctggtactaaaacatcatcctgatgattctggacttttggaaattagtgcagtgccactttcagatctcttagaacaaacactggaactcataggaacaaatatcaatggaaacccatatgggttagggagcaagaaacatccattacatcttcttataccacatggagcatttcaaataagaaatctaccttcattgaagcacaatgatctcctgtcctggtttgaagattgcaaagagggtaaaattgaaggaatagtgtggcattgcagtgatggctgtttaataaaggtccatcgccatcatcttggcttatgctggccaattccagatacttacatgaattcaagaccagttattatcaacatgaacctgaacaaatgtgactctgcctttgatattaagtgtttgtttaatcattttttaaaaatagataatcagaaatttgttagactcaaagatataatatttgatgtataaaatgcaaataaaattagtttatcattatattctaatcttgaatattctaccatatttaaaaatatctcaaggtttctgttcattatgaaacatcaatatgttttctaccatttgtgaagaaatgaattttccagtttcaagtacctattcaaaattttattaaaaaccagcaaattaattttaatctctagccataaaaacataagtaatagtaagctcctaagcttggacaaaggctggattctcttcactataactgagtggtaatttaaagacaacaatttaatgtcactaattttcaaaattaaatagtttaagctcaatttaattttgctagatatttaacaaaacatacggctcaacctcataacctatatgtgtgtatgtctacatctgtgtatatatcataggatttgagaatcttaacacatgtataaataagtatatataaactccaattttaaatcttaaaattgctgaatttaccctcatattctttaaaaaacttaaagcattatgaatgtagagaaattcaccagagctcactgcctatttgatggctgtaacaagtcttcaagtatatacttttataataagttgaaaatttcatataattttatttattaagaattccaatctaagtataaaggtacaaggtagtgagaaggaaatactacagttcggagaactgcttatttccaagtatatttaacttataaagttaataaatagttaaatgaaacaaagtttataggtgacctttagtaaatggggaaattaacaggactttcttcttcatcttcaaactcttcagaagcagcaacagggctagttaattcaactcccaattgttctgaaagtttttttaccttctcttctaagagaatattcttcttcacttcttccttgtaattatacttaagatcttcaatttcttcaaaaaatgaaggatcaaaattttccagttcttttttcagcttctttatttcctcctaatggaaacattatctttaaaagttgcatataggaaatatacatattttacgtttgaacaaggagatttaattgtaaatatgaaagccaaagtattcctgaatggtcaaatacagcaataaaggcagaagaattaagatttttctttgttccattgtacagtgtaaataactaagttgttaactgtcaagtccagttatgtattctgtaagttgtgttctagtctttgactaaaatttatcatctcttataatgggacttaatctttctctaaaagcatataagagcttgtcaatagagcaatcaatcaaaaagattttgtgattcataacattgaagttagtctggttaagagttttggtttagacttcatttatattttccttactaatatctaatatttaatgaataatgatcaattttttataaagttattaatatgatcagggaaacctttgggacttctgacaggcatctggtgaagagacaattcaagccttagtgactatttagaatagccagtgatcactagctaattctcatatccatgcctttttgtcctgtttacagtcttaaaagaggtaaaacagcaaatatttttttaagggaactataaccttaggattcctgaaaagaatttcaaaaaaaaaataaagacactgttgccaatgtgacccaaaacttaagaacatactaatggcatatatttgttacaattaaaaaataaatttactacctaatcct

SEQ ID NO: 728 - DNA, 2428 bp, Homo sapiens
gttacttcatagcattctgaagacctgtccaccaattacagggctccttactggaaaaaccaactgctggggagtgccaagagaccctagcaacaccctgcagcgtttgaaatctgaggggaaaagactgtagtcagcccttagtggatgagagcgcctatgctccagaaacagcaggctcccaggatggacaccccgccccctgaagaacgcttagagaagcaaaatgaaaaactgaacaaccaggaagaggagacggagtttaaggaactggacggtctgagggaagccttggcaaacctccggggactgtcagaggaggagaggagcgagaaggctatgcttcgctcccgcattgaagagcagtcccagctcatctgcatcctgaagcggaggtcagatgaggccctggagcgctgccagatcctagagctgctcaatgcagagctggaggagaagatgatgcaggaggctgagaagctcaaggcccagggtgagtacagtcggaaactagaggaacgctttatgaccctagcagccaaccacgagttgatgctccgcttcaaggatgaatacaagagtgagaacatcaagctgagggaggagaatgagaagctgaggctggagaatagcagcctcttcagccaggctctgaaggatgaggaggcgaaagtattacagctcacagtccggtgtgaggccctcactggggagctagaaacgctgaaggagaggtgtgctcaggatgcctgccaggcacaggcgcgcgagaaggagctgctggagctacagagccagcaggcctgcacccacaccaaggagacagaacagctgcgcagccagctgcagaccctcaagcagcagcaccagcaggctgtggagcagatagctaaggcagaggagacacacagcagcctgagccaggagctgcaggccaggctgcagaccgtcactagagagaaagaggagttgctgcagctgtccattgaaaggggcaaagtgcttcagaacaaacaggcagagatctgccagcttgaggaaaagttggagatagcaaatgaagacaggaagcatgcgctggagcggtttgagcaagaggcagtggctgtggacagcaacttgagagtcagggagcttcagcgcaaagtagatgggatccagaaggcctacgatgaactcaggctgcagtctgaagccttcaaaaagcacagcttggatcttttaagcaaggagagagaactcaatggcaaactccgccatctctctccatagggaagtttctgcttcctctggcctgcaattcagaattcaaatatttgcgtcttagcattatggcaagagtaaagatgatatcccatttattatactttcaagcacaaaaggcaactcaaagaaaagctactttactatgatattgttgttattattgtaaagccattattaattttcatttctacacctagaatacacaagatttgccagatttccttctgtgccttagaaatcttaaatttactagtagtatcttctcctacccataagttattaattctcaacctcagatatcttcatttatgttaggattttaaattagcagcttctatgatttaagtcaatctaagtgcagtgagatgtgccattgtgaaaaataattagcacaattacccactgtagatagttaggcttatagtctcccatagttgagattgtaagcaaacatgtatcagcataatagcatgaatgctttgcagaaaaaaaaaagtgtctgactttattttattttgcgctagcttggaaaatgattgagatcaagttctttaacaaagaaggtcaattttattctgtatgagcaatatgattcaaataagttatacaaaacaacttttattttttctgcaagcttagataatattccattttttggttttctctttaaaaagaggatttagatgtgcaataatgcaaatatcagtagcttaatttaatattgcacgatatgctaatagacaattagacaatttggggtaacaaatcatagcagacgtgatctatagagtaactcagaaattgttttgtttctattagcatattttttgtaattaagattttccttttttaaaaaaatctaagctgaacgtgtgtatgtatgcttgcagcatttttgtagtaatacctacattttgtaagaatagttataaaaacatgatatatatatatgtaaagttcttaaaaaagttctcaaaggtagttatattttcttatcttcctgtaattaggtattgatatataaacattattatgaatacctctcaaaatagattgtaatgtaatatttttctcacccattttgctgaaggctaccaagttacataatgaatttacttaaaaaatatgacttggtgcctttttagtaaaaccatttccaagc

SEQ ID NO: 729 - DNA, 2990 bp, Homo sapiens
gcttgtggcccgcgcaggggcggggtcggaaggtctaggccgggcgcggagcgaggaagcgggtggcgctgggacgcatgctctgggggagatgagtataatgacccgcgtttgtccgccgcccgtgccccgctcaatccccgcatcaatcccgcgaggccgtttctcccgttggctccactgtaccgggggctgaggcccagggaggtctcgcggctccctaggttatccagctagtaagaggcgaagctggaattctcactgtgggcccattccatggcttttgccagagcgccagggacacactcagttcaccttctagcagggaagacccaaagatgcgcgcccctggcagccagggcgtcggaccaggcaattcctactgtccagcatcacctcctccaggcctctcggatgcctctgttgggacagctaagttcctcttcaaagactcaatttcctggtcataagctgtaaacagattctactcccgctttttcttctttgtcgcacgtctaccctatttgggaaagtttaaaccttagccaatcgggatcagctcagattgtgcggtccaaccccccagccaatggggaaaggacacagaaacaggaactgcgttagggttaaaaaccacttccctcctttgttggcgggtgctcttgggattgcaaccagcgcaagcagcacccttctgcagaagtaaagatgccttgctgggaagtcttctgtctcagtgctggtttttcttgactacactgagcacttgttttcaacaaatttgagggtcttctgggatcccattctcctttgggaggggtagcgattacttttcctcgtgagacacgtcccactgccttgttgcagtggcccaaggagcggaggatcgggtccacccaaagtgaggaataaatccggactttcagcaacgtgggcaggaaggagccttaaaattcccaggcaagtgggtaactctgtgcacagaccaagccgccgacgggaccatcacaaaagctttacaaggccttaccaccctggcaaatgaattagccgaaaattctggactagataacccttttatgggtctcatggaaaagtggtttggaaaatggaaaggactcctggcttcaatctttacctctcttgcaattgtaacaagtgtacttatccttgtgggctgccgcatcataccttgtattcgtgggttaactcaaaggctcatagaaacagccctcactaaagccttcctctcttctctccctccatacttggacaagctcttgctcctggataatcaagaagaacaacgaagccaaatcctgttaaaattttttgcagaggaagaagtatcaaatagaagagaggaaattgttgggacagctaagctcttcaaagactcaacttcctggtcataaacttctccccgtttttcttctttttcgccagtctaccctgtttgggaaagtttaaaccttagccagtcgggatcagctcagattgtgcagtccatccccagtcaatggggaaaggacacagaaacaggaactgcgttagggttaaaaagcccttctctcctttgtttggggtgctcttgcgattacaagctgcgcaagtagcaccgttctgaagtaaagatgccttgctgggaaatctgtctcagtgctggtttttcttgactacactgagcacttgtttccaacacccctgtgctccaggctgggttaggtctgatctcagggaatgtctgtttcaacacgtgtctgcagttctttggcttgtgttgctcactgcagtgggcccagcctggtctagaggaggcgctcaggaagtatctgtgaaatgtgaatgtgtagttccttcagtgaatatggccctggggctgaagatggcagaagcattctgggagcttctggagaaggagacctgggaggagaaggttggaatggcgggggcagcagaggggctgggtgaactcagctgtcccacccaggcccatcctctgcagcccgagaaggaagctcacagggcaagacatggaagagatcaagttccctgcccggtgcctgggctgttgatggcctcaggaaaatggaaccattacctgttgctgtcaagtggctgggggccaggatgcctgggttggccgtgagaggacattgctgaggagagtggaggccaggctggggtggggtgtggcaggaggacaggaatgcagtggaaccagtgggtcaggctcctgagggccccaggctccagcctcagggctggcctgttccctcctaagctgccatcttcatatcttcaggacccacccctctactcctcaccctcagcacaacgatgtgatcgaaaggcaaatatttatttttcaggaagagaagcaggagacctcgaggcttctggacttaggaggtccgggcagctggtccatggttgtccaggtagtgccgcagggctgtgggataatccgttatgacgccagtggctcccacgctgaaggctgcttcaaaatccgactcttcattaaggcaccaaaagaccacctgagcagggagggagggggcctgtagattctgaacaattttacatctggagagtggggacccacctcctcctctatggagactccccagcagcagtaggctggagctgattgttaaattctcaggaattttgcaaagtggttattaaacccagccattattaaaaattaaatcatagcctgggtgcagtggctcacgcctgtaatatcaacactttgggacgccgaggcaggagttgaggccaggtgtttaagatcgagtgagacctcatctctacaaaaaactttgtaaaaattaattagcccggtgtggtggtatgcgcctgtgctcccagctacttggaagactgaggtgaaagaattgcttgagcccaggactctaaggctgcagtgagctatggttgcaccactgtactccagcctgggcgatacaacaagacctcgtctc

SEQ ID NO: 730 - DNA, 2408 bp, Homo sapiens
actgctgtggtggagcccagggctattcccccacttcccgggagactcggagcgcatcgagtgtgcgcgcggcgcgtgcgtggcgtcccggaaccgccgagcgctgagggactcgcggacgcgcgcgctgctcttctacggcacagacttccgcgcgtcggccgccccgctgccgcgcctggcgcaccagagctgggcgctcctccacgaggagtcgcccctcaacaacttcttgctgagccacggcccgggcatccgcctcttcaatcttacctccaccttcagtcgccactcggattacccgctgtcgctgcagtggctgcccgggaccgcctatctgcgccgcccggtgcctccgcccatggaacgcgcggagtggcgccgccgcggctacgcgccgctgctctatctgcagtcacactgcgacgtgccagcggaccgggaccgctacgtgcgcgagctcatgcgccacatcccgactcctacgggaaatgcctgcagaatcgggagctgcctaccgcgcggctacaggacacagccacggccaccaccgaggatccagagctcttggctttcttgtcccgctataagttccacttggccctggaaaatgccatctgtaacgactacatgacagaaaaactgtggcgtcccatgcacctgggcgctgtgcccgtgtaccgcggttctccctctgtgagggactggatgccgaacaatcactccgtcatcctgattgatgattttgagtctcctcagaagctggcagagtttattgactttctggacaagaatgatgaggagtatatgaaatacctggcatacaagcaacctgggggcatcaccaaccaatttcttctggatagtctgaagcatcgggagtggggagtgaatgatcctttgctgcctaactacctcaacggcttcgagtgtttcgtctgtgactacgaactggctcggctggatgccgagaaagcccacgcggcctctcccggggacagccccgtctttgagccccacattgcccagccctcacacatggactgcccagtgcccacacctggctttggcaatgtggaagagattcctgagaatgacaggtaagagtgctggggtcccctgcagctatcaaatcatttacttacttgcttactgtgggcaattaagtagcactaggtgctgagcaggtgcaggaggaaattatcacatgggctcattctgtatttaaggtgtcaacagtctagttggggggataagacaagctgaaaaagctgaatagatgtaaaatataattcaaggcaacgtatgaaaatcagcttatgtgaacaatgtttccagtagtggttcaaaaagattgaaccagagtacagggcctgtgcagacaggggagagagaaaatggggcaaataaatagggacaaggctataaatatcattaataccaggttcaggagtttgcactgcactaaaaatcaactcagctatttgagcaccttttatagagtggaaatggggttgggcagtagagaagagcacttttagagaggcttttctgcagtagtcaggggttacacctgttaaccagccataatttttttttttaagcggctgtgctgaggatgagccccatgtagttggtgcaggtggggacacactgcctgtgtaactagaaaaactaggcatggccgggcacggtggctcacacctgtaatcccagcactttgggaggtcaaggggggaggaacacttgaggccagagacaatataatatataatataatatattgaccagcctggacaatataataagagcctctctgtacaatttaaaaactaaaagcctggggtggtggcacatacctgtagtcctggctacttgggaggctgtggcaggtggattgcttgaacctaggagttcaatgctgtagtgagctaggatcgtgccactgcattccagcctgggttggagtaagaccctgtcacacacacacacacacacaaaacaatgcacaatgcgcatcagaagggaagcgaataggctactgtagtaggtggcaaaaggtggtggtactgggaaacaaggccagcgtgtggtgtggggtgggaaaatgttgaaaccacttgtagcaagccacacctattgggggagaggtgataagattattaagctgaagtaaggctgctagaatggcctatagaaaccgacttggacagtggatggcagcagaaggccatttattaacagatgctgctggcagttttgtcctgatggttggaatccttcaccaagtaatttgtatctaattacaaattgtttgtatctgaacataatatgatttactagaggaaaagtatgaaaaaatatgaaacattaagaaaataaatattcaggttatgtcttttctagat

SEQ ID NO: 731 - DNA, 2527 bp, Homo sapiens
gtcgtcgcgagtgtggagtcgggactggagctgctgccgcggcgacgccggggatctttgtcgctagctcccggcccttctgccccgccgccttccctcagtcagcgttgcccactcctctccggccgggcgcccctgcctccatttctcgctctctgtccaccacacacacggcccccccgatcatggatccgggcagtggcggcggcggcggcggcggcgggagcagcagcggcagcagcagcagcgactcggcgcctgactgctgggaccaggcggacatggaagcccccgggccgggcccttgcggcggcggcggctccctggcggcggcggccgaggcccagcgggagaacctcagcgcggccttcagccggcaactcaacgtcaacgccaagcccttcgtgcccaacgtccacgccgccgagttcgtgccgtccttcctgcggtgcccggcagcgccgccacccccagctggcggcgccgccaataaccacggagccggcagcggcgcgggaggccgtgcggcacctgtggaatcctctcaagaggaacagtcattgtgtgaaggttcaaattcagctgttagcatggaactttcagaacctattgtagaaaatggagagacagaaatgtctccagaagaatcatgggagcacaaagaagaaataagtgaagcagagccagggggtggttccttgggagatggaaggccgccagaggaaagtgcccatgaaatgatggaggaggaagaggaaatcccaaaacctaagtctgtggttgcaccgccaggtgctcctaagaaagagcatgtaaatgtagtattcattgggcacgtagatgctggcaagtcaaccattggaggacaaataatgtatttgactggaatggttgacaaaaggacgcttgaaaagtatgaaagagaagctaaagagaaaaacagagaaacttggtacttgtcttgggccttagacacaaatcaggaagaacgagacaagggtaaaacagtagaagtgggtcgtgcctattttgaaaccgaaaagaagcatttcacaattctagatgcccctggccacaagagttttgtcccaaatatgattggtggtgcctctcaagctgatttggctgtgctggtaatctcagccaggaaaggagagtttgaaactggatttgaaaaaggaggacagacaaaagaacatgcaatgttggcaaagacagcaggtgtaaaacacctaattgtgctaattaataagatggatgatccaacagtaaattggagcaatgagagatatgaagaatgtaaggagaaactagtgccatttttgaaaaaagttggcttcaatcccaaaaaggacattcactttatgccctgctcaggacttactggagcaaatctcaaagagcagtcggatttctgtccttggtacattggattaccgtttattccatatctggataatttgccgaacttcaatagatcagttgatggaccaatcaggctgccaattgtggataagtacaaggatatgggcactgtggtcctgggaaagctggaatcaggatctatttgtaaaggccagcagcttgtgatgatgccaaacaagcacaacgtggaagttcttggaatactttccgatgatgtagagactgataccgtagccccaggtgaaaacctcaaaatcagactgaaaggaattgaagaagaggagattcttccagggtttatactttgtgatcctaataatctttgtcattctggacgcacatttgatgcccagatagtgattatagagcacaaatccatcatctgcccaggctataatgcggtgctgcatattcatacctgtattgaggaggtggaaataacagccttaatctgcttggtagacaaaaaatcaggagaaaaaagtaagacccgaccccgttttgtcaaacaagatcaagtatgcattgctcgcttaaggacagcaggaaccatctgccttgagacctttaaagacttccctcagatgggtcgtttcaccttaagagatgagggtaagaccattgcaattggaaaagttctgaaactggttccagagaaagactaagcattttcttgatgaccctgcacaatactgtgaggaaaattgactgcagaagcctacttcacaccgccttctcttattttctgcccattgataaacctctccccatattttgcaaagaggaaattcacagcaaaagtccacattatgtcagctttctcatattgagagctctgctatgccactgttgaatttttcccaagattcctgtccctagccctcacttcaaactctgcttccttggacagatttggcaatagctttgtaagtgatgtggacataattgcctacaataatgaaaacctacaggaatttttttatttttcattttccccttaggcatatttagtatttttcccccaggcagatcattctgagtgtgcgagtgtgtgtgcacatgttacaaaggcaactaccatgttaataaaatattcaatttg

SEQ ID NO: 732 - DNA, 2967 bp, Homo sapiens
actcgccgctgagcccatctccctgcaacactgcaggtagcggagtctagagacaacacagacagcggctgccgacggctgggactgggagaggatggctatggggcacgtttccttccagggtgataaaggcattcattccaagatagactgtggtgatggctgcacgctctgtagatgacatctcaatcaagctgcttcatgagaaaggcccagccactgaccacggggtgaacgtcctgccatccacagtccctggccgagaagaaggtatgactgacaggaagcactggttttctttcgggacacaaccgaacgtgccaggactgcaggagccgctggattacagagcagcaaaccaggcatggcaggcggtgctcgcggaggtaccacggggcggaccagggtgtgcagcgttacgtgacttgggaagatgtggggggcccgatgtatctaccaggagacagtggagacctctaccctttagctgtcctctgtcccacacaacccagcccccactgggcggccactgcaggggaagctcagctggaaggttccatgggagagaccagaccagtcctggcactgtccagcagctgccttcggcccatgttctgaaaccgggatgcacacagcatggagatctcagccctgggcaggcctcgccccctccagcagctgccctcggcccatctcccaaagcctggacgcatacactggggagacctcagctctgggcaggcctgggttcccatcgcttcggcgtccctgggcccgggacacggaacacacttgctgcgtgctgtgtacaagaatgaacgaatcggcctgcctagcaccccttggccggctccaggcctccacttgctgtgtcaagtgaggctcccacgtgctgaggggacagagggtccctgtgacctgcaatgctcccactctcacccacgcagctgctcacctacacagccggtttctccagggctaacaggccacccagatgcaagccagtctcagcccctgaccacactggttttcaaatgaactgtggactctcatgacagagaagcggctgggagtcccagcgtgggatgtggtgggacggggctggggtgtgcagagacgatgatggaggagctcctgggggcacacagacctagtgtcgctctcagggctgggtccgcaggccactctccctccctcaacaacactcacgcctgctgcagccccaggaagggtcaggactcacagatgccaacaagcaagcagcccgtgctggaagcatcaccaccaccggccccagcaaaggcttcctggtgtgtgcggctgaccatcggccactcgggtagacagaagtgtgggtgggctgtgtgcatgccagggcagacggacagcccggggtctcaggccaatggaaacaggaagtttccggctccatttgaatactggtggaaatgccgggccctcatgctgaatgggacactccatccaagcttgccgcctcctcggaggcttgggccagtcaccgggcccggctgtgctttcacagctgcttttcttatgggagagcaagatctcctgggattcaagaccctgccaggagtagaagacaagggtcatgggaaggctgtgtgagccctcaaggggcaccatggaccccgagcaccagcgatttgcgctcctggttccgagagcccagcgctgaatcctggcagatggggaagctgagctctgtctgacctgctctggaaaacaactggtccagagaaggacgaagatgtcacttaattctgagttgctgaggataagccaggggccctggaggtgactgtgctgcccacagcatcccaagggatgccacatccccacaggggcagcccaggtcccccagaggattgtgtgccccccaccaccaaggtccttgcccactggtctgtgcctcaataggacagcctccttctcacactattttgaaatataaaaataacactcatcacccatcacccagtcactcagaatcacaccagcgggggcacagaggcgacggcatgtagttctccagcctgtttgtgagcacgggtgtacatgtacacacacacacacacacacacacacaaatgcacatgcacggacacatgcacacacacatacacgtgcacacacagacatgcacacacacgtacacacatgcacacacacacacgtacgcacatgcggggtcagggagctgatgctgtgcgaggctgtcgagggcttcttcactcagcggcacttgggaagcgctgctctgtgggaggcccctcatccatgtcctcgttattggcagcacaaatctccaagtgaggaggggccatgtttaccagccgtccttccagcccacgtctcctacggttccttattttcacaggtactgttttgcagacacagagcccccaagcagcccacacgtcttagccgggtgaagctttgctttatgaagtgctgcctggacccctgatggtcggccctccccgtcgagacagtggcaggcaggcgggggtgctcagggctgtctgcagggggcagccaggacctcactgaggtggccgactgggtccacgccctcctcagcctgcactgctggacaggccccaagaagtcgtgctcggcgtggcccaagaacgggaagcggcagcgtcctggcgtcctaggtgagacttcaagacggctccctgctcccacctgggctaaaggtggaaccccaggtgtaaagagccccctggggtacaggggaggctggatcagcagacgccggctctgggagggccctgaggggctgtggagggaaggtgaccccgcagtggcagcggcagcggaagcaggacggcgcggtgcccgacacctgaggccactctccctggacggggggcgggcggcactgagaggcggccataaaaaccggagtttatttaataaaacaagagcccacgcggc

SEQ ID NO: 733 - DNA, 1960 bp, Homo sapiens
aaaaaaggccagggaagttggcctgccggaagttcccagggagaaggcagcgcgttgtacccgagattcagggtctggctctgcttcccaggctagagtgcatttggcgcgatcacagctcactgcagcctcgacctcctgagctcaagcgaacttcctgcctcagcctcctgagcttcctgagtagctgcgactacagaaaaaagaaatcctctttttagaacatctcttggtggtaccatcagaaatgtcttccttaagtggaaaagtccaaaccgttttgggccttgtagagccaagcaaactgggccgtaccctgacccatgaacacctggccatgacctttgactgctgttactgtccacctcccccgtgccaggaagctatttccaaagaacctatcgtgatgaaaaatttatattggattcagaaaaacgcctattcccataaagaaaaccttcaattaaatcaggagacagaagccataaaggaagaactgttgtattttaaagctaatggtggaggggctttggtggaaaacacaaccactgggattagccgagacacacagacgttgaagaggcttgcagaagagactggcgtccatatcatatctggagccgggttttatgtggatgcaactcactcctcagagaccagggccatgtcagtggagcagcttaccgatgtccttatgaatgaaattctccatggagctgatggaaccagtatcaagtgtggcattattggagaaattggttgctcctggcctttgactgagagtgaaagaaaggttctccaggccacagctcatgcccaggctcagcttggttgtcctgttattatccatcctggacggagctccagggcaccatttcagattatccgaatattgcaagaagcaggcgcagacatctccaaaacagtcatgtcacacctggatagggtgcgtctcctggtggaagagggctgtgaagatcgaattctggtagcacatgacatacatacgaaaacccggctgatgaaatatggaggtcacggctattctcatatactcaccaatgttgttcctaaaatgttgctgagaggcataactgagaatgtgcttgataagattctaatagagaaccctaagcaatggctaactttcaaataggatggttgcttatgaattcacaccttgagtataaaacttgcagagaacattcagcgatttccagtccactgtgagatattaatcagttacctaggactaatgacagatcatttccttctgatgagaactaggagggtttgccttctctgagaccagctattacaactgtgcctctagggagttactcagcctaattgagccctattattttaacttaacaaaataaatacagaagtacctatttctaaacaatgatttaaagtctatatcccctaagcggagttgttgtttttctccctaatctatcagctgcactacttgagaaaatttaaagtgtttctagttaaattatttccttcttgagcgatctaatgtttcttgtaatattgatgatcctactaattatcctgctgttctttaattaatgcttaatgaataatatggcactgtaaaatagcttctgcaacaagggaagttaaattttgagacttttttccccaaaggatactgactgtaatacaattaccaattcacaatgataaaaatattttgaaaggttaattttatactgtccacctatctatatattcttctactgaaatgattttgatatctttggctttccggtatctatttttgccatacattttgctgttttgcaaagtttgtataagaacacataacactactgaattataaaaattcaatcataaaagtcaaaatatattacataatatagtttaatgaatcattacatttataataacaaaggccacaatttaattaattggtaagatataatgc

SEQ ID NO: 734 - DNA, 2167 bp, Homo sapiens
ctgcctcaccaagggccctgttttccgacagaaacttttcattccataggaaatgaggtcacacaccaagagcacacgggtaaccgggcatttggctagcttactttcaagacttggagccccttaatctacggcctacaggagaccaacacacaggagaatggcccaactgctttctcagctacatttctggttttcaagaaacccacttatgctactctacctcagacttaaggaaagcgcttgttgaagagaaaatgtgtcttcgaggcaataaacaattgagcttttgtgatgtctggggaaagatacccccaaagcagaagtctgggtccctcacaatcaaaagcctccaaacaacaatgatcacagacatcctctggtcaccaggtcttggcatggcacctggaacccagcaggcacaaaaatgctgggtggacacagccatgggcacaagagcaaccatttatacggggcaagcttttgggttttgtggcagaagtcctcctgacttttgggtccaggcctttggcctccatgccacaggagtcccagggtcttgcataggagcctctgccttgagtaggagacagcaatggaatgcaagttccagatgggtcttctgcgataacaggataaaaatagagaacgatgagaatctcaaggacaccattttcaggtttaagacctatttttaaaaaatgaaacacatgctttcttgaagtaagccctcaaacatactctgaactgagctaaccaagtcacagaacttgtatgtcaactgcccaactaatatccacttatctgtgataagtggtgacggttctgccactagaaggaattttagtgatggggtctgggggtgtggagaagggatattggccatagcagtcatgagttaggctgtaaaacataagttaaacgcagagtgtcctatattgaattagaccctaaaatgtgctatattttcgggtctaattcaagtaacaagtgctataatcacctttccataggctaacagaatgaaggctgtgtcaaatctatgcttttatttctcccaaatgcgttccagtcctggtactcaataaatagtcatcacaatggtgctgatgatggagggggaaggagaaaagtggcagagtcatcaagctagccttcctcagcccgacagctaatgctagctggagaataaaggtgctcccaagcatccctaccacgcatccggggtgtaacaataatcattaatactactttctgtcctgtgttcacaatcccatcaatgcccctttcgggctggaaagcagtgaggggcttgcaatccactaggttaaagaaatggaactagaggctggacgcggtggctcatgcctataatcccagcactttgggaggctgaggcaggcagatcacctgcggtccggagtttgagaccagcctggccaatatggtgaaaccccgtctctactaaaaatacaaaaaattagccgggcatgttggcctgcacctgtaatcccaggtactcaggaggctgccgtgagcctagatcatgcgcttgtattccaggctgggtgacagagcaagactccgtctcaaaaaaaaaaagaaagaaagagaaatggaactagaccaacaagggaaacaaatggattaagagtttaattgggtgggattattttgaaggatgctcaatacacttctgcaatggagcatcctggacgggggtgatgtgtgccataggctggtgtggtcaggaaagacttcatggaggccaagctgccagaatgaagaggaagagaaggccagccagcagcggatatcaaaggtgctggtggaggcagcagacacaccaagtataggggagaggttagcaaaaggtggcatagaggctgggtatggtggctcacatctgtaatcccagcactttgggaggccgaggcgggtggatcacttgaggtcaggagttcgagatcagcctggccaacatggtgaaaccccgtctctactaaaaatacaaaaattagccaggtgtggtggtgggcacctgtaatcccagctattcaggaggctgaggcaggagaattgcttgaacctgggatgtggaggttgtagtgagcgaagatggcaccactgcactccagcctgggcgacagagcgagattctgtcttc

SEQ ID NO: 735 - DNA, 3513 bp, Homo sapiens
aaaggcccggcccaagggaacgttcagggcgtctcggctctccccgctgctgcttctgctaggcccagtgcgagaccagagcacgagcgactcccgtcgtccccggccaggcagatgttggcctagtcctggcgcgaacgaagcgcgctatttccctgcttcctctaggccaagcctgctttacggcagggcccgcctcgggagcgagcacagaccggggcagcgaggccagccaggcgccgacgaggtccccgaacgcgcacgcgctccgttcagctccgggtggcggccgccggagtagacgttagccatggaaaccgagagctggcccgggcggggccgcggtgagctcgttattcggccgccgcagcttttctgcctccgcatatgggcactaaccaacctcccggcgggatcgcccagcccgggtttacctgcaaaaatgcggtccctgggatgccttcgcgtcttctcttccctcgggtgacttgaggtttgtggtaaatatgccagctctagaacacatgaatcagattttacacatcttgtttgtatttttaccctttctgtgggcacttgggactctgcccccacccgatgcacttctcttatgggcaatggagcaggttttagagttcggccttggaggctcatctatgtcaacccacttacggttattagtaatgttcatcatgtctgctggaacagctatagcatcatatttcattccaagcactgttggtgtggttcttttcatgactggatttggtttcttgctgagtctgaacttaagtgatatgggtcacaaaattggaaccaaatctaaggatttacccagtggtccagaaaaacatttttcatggaaggaatgccttttctacatcattatattagtcttggctcttttagaaactagtttgcttcatcactttgctggcttctcacagatttctaaaagcaattcccaggctattgtgggctatggtttgatgatattacttataatactgtggatacttagagaaattcaaagcatatatatcattggaattttccgaaatcccttttatccgaaggatgtgcaaactgtgactgtattctttgagaagcaaactaggctcatgaagattggtattgtcagacggattttgctaactttagtatcaccttttgccatgatagcatttctttcattggacagttccttacaagggctccactcagtgtctgtctgtattggattcacaagagcctttagaatggtatggcagaatacagaaaatgctttattggagacagtcattgtatcaacagtacacttgatctccagtacagacatatggtggaacagaagcctggatacaggactcagactcttactggttggtatcatacgtgatcgtttgattcagttcatctctaaattgcagtttgccgtgactgtgcttttgacatcatggacagagaaaaaacaacgtcgaaaaacaactgccactttatgtatactcaacattgtcttttctccattcgtgttggtcatcatagttttttctacactactctcttctcccttactccctcttttcacccttcctgtgttcttggtggggtttccccgacctattcagagttggccaggagcagcaggcaccacagcctgtgtgtgtgcagatacagtgtactactaccaaatggtgcccaggttgactgctgtactgcagactgcaatggcagctggaagtttaggtctcctcctacctggatctcattacttgggccgttttcaggatcgtttaatgtggataatgattctggaatgtggctatacttactgctctattaacattaaggggttagaattgcaggaaacatcctgtcatactgcagaagctcgcagagttgatgaagtttttgaagatgcttttgagcaagaatacacaagagtatgttcccttaatgaacactttggaaatgtcttgacaccctgtactgttttgcctgtgaaattgtattctgatgccaggaatgttctatcaggcataattgattctcatgaaaacttaaaagaatttaaaggtgacctcattaaagtacttgtgtggatacttgttcaatactgctccaaaaggcctggcatgaaagagaatgttcacaacactgaaaataaagggaaagcacctctaatgttgcctgctttgaacactttgccacctcccaaatccccagaagacatagacagtttaaattcagaaacttttaatgactggtctgatgataatatttttgatgatgagccaactatcaaaaaagtaatagaagaaaaacatcagttgaaagatttgccaggtacaaatttgtttattccaggatcagtagaatcacagagggttggtgatcattctacaggcactgttcctgaaaacgatctttacaaagcagttctattaggataccctgctgttgacaaaggaaaacaagaggacatgccatatattcctctcatggagttcagttgttcacattctcacttagtatgcttacccgcagagtggaggactagctgtatgcccagttccaaaatgaaggagatgagctcgttatttccagaagactggtaccaatttgttctaaggcagttggaatgttatcattcagaagagaaggcctcaaatgtactggaagaaattgccaaggacaaagttttaaaagacttttatgttcatacagtaatgacttgttattttagtttatttggaatagacaatatggctcctagtcctggtcatatattgagagtttacggtggtgttttgccttggtctgttgctttggactggctcacagaaaagccagaactgtttcaactagcactgaaagcattcaggtatactctgaaactaatgattgataaagcaagtttaggtccaatagaagacttttgagaactgattaagtaccttgaagaatatgaacgtgactggtacattggtttggtatctgatgaaaagtggaaggaagcaattttacaagaaaagccatacttgttttctctggggtatgattctaatatgccaggaccagccttggagataagcagagtgaacagaaatttatggtctcagatttaagaaaaacaaaattctttcttgcttcttaaatcatactccatcccattggcttgcaaacatgctgacactcctcataatttcactcttcataaaccaaagcataaggtcagaggagaacttgacatattagaacacttaggcattgaaagtggttagtctaactaacccattgaagttttggagaacctgggactcaaattttggaagatgtgacagatgatatgttaacatacattgcaccgaggctgaagtgggaggattgcttgagactgcctggaaggcagaagttgcagtgagccgagactgatggtgtcactgcactccagcctgggcaacagagcaagaccctgtcttaaaaaaacaaaacaaacaaacaaaagaaacc

SEQ ID NO: 736 - DNA, 2575 bp, Homo sapiens
tactacggcgtggccgagactagccccccgctgtgggcgggccaggagaacgccacgcccacctccgtgctcttctcctctgcctcctcctcctcctcctcttccgccaaggcccgcgctgggcccccgggcgcacaccgctcccctgccacttccgcgggacccgagctggccggactcccgaggcgccccccgggagagccgctccagggcttctctaaacttggtgggggcggcctgcggagccccggcggcgggcgggattgcatggtctgctttgagagcgaagtgactgccgcccttgtgccctgcggacacaacctgctctgcatggagtgtgcagtacgcatctgcgagaggacggacccagagtgtcccgtctgccacatcacagccacgcaagccatccgaatattctcctaagccccgtgccccatgcctccggggcccactccactgggcccaccctggacctgttttccactaaagccttttggaaagcggtgatttgaggggcaaggtgcttagagatactcgctcgctggggaaggggggagggaggcagtggtggctggagggtgcgccactttcagagcctctggtcaccctgtcctggaaagattgggagggggccagactgaaaattttactagagttacaactctgatacctcaacacacccttaaatctggaagcagctaagagaaacttttgttttgccagaggtggccactaaggcattctgacgccctctgcccacctcccccgctgtgtgtcactccaccccttcttccgaggagggggtgggtaaaagggagagggagaattaccacctgtatctagaggtgctctttgcaatccctaagccctctggtcctgacctccgacctcctaacatgaccctttacctcccaccccacccccatatcctgtttgggaaactgtcaccagtttccagcagtgtaagggagttggagtcctatcagaagttgcatagatcttctaggggttggggagagaagcatgtcaatcgtttctgtggctgaaaggctcagaagccatctgtccccacaaagctgggctagaggaatctggagaggagtcctcctctctgcccctgtcccccgcagtgtttcccttcactctctccgcctatcttcccttcctttgggatcttccctttcctcaactctttcctttccctccagctctttgctttgctttcttttggtggctgtcactcccagctctgtcttgttccttgtctttgtctttcttcccttccccctgcccctgcccctaccagcccagctttggggacaccatccttctggggagaagtagggggaggaatatttggatggtccctccattcctcttcaggcatctggaggccctctcccccactcctccaaagaaacatctcaaattattgatggaatgtatccccattctcagtgaaaatgtgaggaggggactaatactggggtaaagggtcaaacccccaccttcatcactatgggcattatatttagggagtagttcttgggctggattttctggttgtggaagtgggggcgccagagtagtgtgtctgctatttaaaggagcaggaaagggcgtgaggcaggaggagagactggtggagggaagagctgctcctcccatgcagtgcccgactccctgcacccctctcaacctgacctgaacctttattgaatccttattagcttgaatccttattagcttgaatcctccatgcaaatcatggagtctgtgtcccacctgatgtggttgaggagaagccaggtcttcaaagaggggtcagcctggggcaaagcaggactggggggaggtgggcagcagggcctattctgagaatcacatattgttacaggccttgcaccccctttgctgcttccctcctgctcatttggggctgccaccagctctccaccctcctggttccgctggccgggccaagggaggatggagggatgggagtcccaggagatccttgtaaatagtggggtgggactgttctgagtgatcacccgagcacttaaagctccagagtcccattcttcctggatggagcaggtggaggtgcagaggggatttcctcctctccttcctcctgtcgagaattaacacctctccacagccttcccctccagaacaccagccagggaggggtggggaaggaggtcacagccaagaaaactgccctgtgacgacttccctccttcccgcctatgtgagccatcctgagatgtctgtacaatagaaaccaaaccaaatgggcaccctcggttgccggggggcaggtggggaggggggtgggaagaagggatgtctgtctgtcgtccccctccccctctccactctttacccacaaaggcagaagactgttacactagggggctcagcaaattcaatcccacccttaccaattgagccaaacctagaaacaaacacaaaacacgaatagtgagagacaaaatagaggagagaaagagagcatgagagggagcgagacaggcgaccaacacagaggagagaaaacaaaaatagc

SEQ ID NO: 737 - DNA, 2865 bp, Homo sapiens
ctgatgcaaccagtgagctagaaggcaaggatggcaaagaggatcttgatcaattagaaaatgtccctgtagaggaagaggaagaattgcagtcacaacagctactcccacaacagctgcctgaatgcaaagttgatagtgaaaccaacatagaagctagtaagctacctacatctgaaccagaagctgacgctgaaatagagctcaaagagagcaacggcacaaaactagaagaacctattaatgaagaaacaccatcccaagatgaagaggagggtgtgtctgatgtggagagtgaaaggagccaagaacagccagataaaacagtggatataagtgatttggccaccaaactcctggacagttggaaagacctaaagcttctcagggcagcaaggagcttgttaacatcaccagctgaccatgtgtctccttttctcaactccatttccaacttcgtgctgaagaaaaacgagaacctagcgtgcattctgtgaagaaacaggaagatggttgggaagttggatgatgcatgaaaaatataataggtgaaaagaggacagaggtggttaactcactggcgccggcgttattttggtgcgtccattgccgacaatggatgtcgttccgggaaaatccctactcctggcgagaaaggattaaaaaaagtttgccaacatctgatctaaaagataaagtgcagaatctggctgctctaaacattctggttttgaatgaagtcattttcactttactcttttgggaggtatatcgaattccaaagaaaagtcaaactgaaaaggaaaacacaacaactgaacgaggaagggatgctgttggcttcagagatcaaacacctgccccgaagactcctaataggtcaagagagagagacccagacaagcaaactcaaaataaagagaaaaggaaacgaagaagctccctctcaccaccctcttctgcctatgagcggggaacaaaaaggccagatgacagatatgatacaccaacttctaaaaagaaagtacgaattaaagaccgcaataaactttctacagaggaacgccggaagttgtttgagcaagaggtggctcaacgggaggctcagaaacaacagcaacagatgcagaacctgggaatgacatcaccactgccctatgactctcttggttataatgccccgcatcatccctttgctggttacccaccaggttatcccatgcaggcctatgtggatcccagcaaccctaatgctggaaaggtgctcctgcccacacccagcatggacccagttcagggacagaattatagtgtttgggattcaaaccaacagtctgtcagtgtacagagttatgcccagccaagtcttcagtatatccaggggcaacagattttcacagctcatccacaaggagtggtggtacagccagccgcagcagtgactacaatagttgcaccagggcagcctcagcccttgcagccatctgaaatggttgtgacaaataatctcttggatctgccgcccccctctcctcccaaaccaaaaaccattgtcttacctcccaactggaagacagctcgagatccagaagggaagatttattactaccatgtgatcacaagagacagagtctttctttgttgcccagactgatctgcacgaactcctggcttcaagcgatcctcccacctaagcctcccaaaatgctgggatgacaggcgtgaggcaccacacccagctacaactgcagactcagtgggatcctcctacttgggaaagcccaggagatgatgccagccttgagcatgaagctgagatggacctgggaactccaacatatgatgaaaaccccatgaaggcctcgaaaaagcccaagacagcagaagcagacacctccagtgaactagcaaagaaaagcaaagaagtattcagaaaagagatgtcccagttcatcgtccagtgcctgaacccttaccggaaacctgactgcaaagtgggaagaattaccacaactgaagactttaaacatctggctcgcaagctgactcacggtgttatgaataaggagctgaagtactgtaagaatcctgaggacctggagtgcaatgagaatgtgaaacacaaaaccaaggagtacattaagaagtacatgcagaagtttggggctgtttacaaacccaaagaggacactgaattagagtgactgttgggccagggtgggaggatgggtggtcaggtaagacagactctagggagaggaaatcctgtgggcctttctgtcccacccctgtcagcactgtgctactgatgatacatcaccctggggaattcaaccctgcagatgtcaactgaaggccacaaaaatgaactccatctacaagtgattacctagttgtgagctgttggcatgtggttagaagccatcagaggtgcaagggcttagaaaagaccctggccagacctgactccactcttaaacctgggtcttctccttggcggtgctgtcagcgcacagacccatgcgcatccccacccacaaccctttaccctgatgatctgtattatattttaatgtatatgtgaatatattgaaaataatttgttttttcctggtttttgtttggttttcgttttgcttttagcctctacatgctaggatcacaggaagactttgtaaggacagtttaagttctcctgcaaggtttaatttgttatcatgtaaatattccaaagcaggctgccttgtggttttggccagccttgtgctatgttgataagattgatttactgcttaaaatcactttactttatccaatttttactgaactttttatgtaaaaaaataaaatcaattaaagaacttg

SEQ ID NO: 738 - DNA, 3041 bp, Homo sapiens
attttatagagggcatctgtcggttgcatttgatttatttaaaacgttttcttacatggccaatttagtaacagcaagcaaaaccaaaatgagcaaaggagaggatcccaataatcccagatctataaagcggatttctcaagggggtagagataaccacctagctattgctaaatgtgatctcactcagttgaaaaagaaacaatcagaagtgagcaatgggagccgtgaaaccatctcaatgaagacttgttgccaacatggagatagaggatattggtctacagggtactattggagagggggtcctgatgacaacttaattgaaggtggaggaacaaaatttgtctgcaaacctggagccagaaacattaccgtcatattccacccattactaagatttattcaggagattgagcatgctctgggtcttggcccagccaaacagtgtcctcttcgagagtttctcaccgtgtacatcaaaaacatctttctcaatcaagtcttggctgagatcaacaaggagattgaaggagtcactaaaacatctgaccctttgaagattctggccaacgcagacaccatgaaggtgctgggagtgcagcggcctctcctacagagcacaatcattgtggagaagacagttcaagacctcctgaacctgatgcatgacttgagtgcatattcagatcaattcctcaacatggtgtgcgtaaagctccaggagtacaaggacacctgcactgcagcttacaggggtattgtccagtcagaagaaaaacttgtcatcagtgcatcctgggcaaaagatgatgatatcagcagactcttgaaatctctaccaaactggatgaatatggctcaacccaaacagctgaggccaaaaagaggggaggaagaagatttcataagggcagcttttggcaaggagtctgaagttcttattgggaacctgggtgataaattaatccctccacaagacatccttcgtgacgtcagtgacctcaaagccttggccaacatgcatgaaagcctggaatggttggcaagtcgaacaaagtcagctttctccaatctttctacatcccagatgctttctcctgctcaagacagccacacgaacacggatctccccccagtgtcagagcagatcatgcagactctcagtgaacttgccaaatcgttccaggatatggctgaccgctgcttgcttgtcttacatctggaagtgagggttcactgtttccactatcttatccctcttgcaaaggaggggaactatgccattgtggctaatgtggaaagtatggattatgaccccctggtggtcaagctcaacaaagatatcagcgccattgaagaggccatgagcgccagccttcagcagcacaagttccagtatatcttcgaaggcctgggccacctgatctcctgcatcctcattaatggtgcccagtacttcaggcgcatcagtgagtctggcatcaagaaaatgtgtaggaacatttttgttcttcagcagaatttgaccaacatcaccatgtcgcgggaggcagacctggactttgcaaggcagtactacgagatgctttacaacacagctgacgagctcctgaacctggtggtggaccagggtgtgaagtacacggagctggagtacatccacgctctgaccctgctgcaccgcagccaaactggggtgggggaactgaccacccagaacacgaggctgcagaggctcaaagagatcatctgcgagcaggctgccatcaagcaagccaccaaggacaagaagataactaccgtttagcagggcgtactgcggttggtgacgggggtcccctcagtcacactcactttttttccttggtatgttattgagtatattctgagcttagttttctctacagtgatactttagtggagaggaggtgtaaggattctttctctctggttttggcttttcatataaatgctaaaggaaggcgacagtacagagtgttttggttgaacaactactttaatgcagtcaaatctaacgggactagggtgggatagggaggaaggtggtatcaaattattggactctgaaaaacaagtggatggattactaatatttgatttattactcaatatatatataattccagccttggaaagtaggaaagtaggctgctacctaacttttagtcccttccaaaaccatttagtagggttctattacataaacagtagggtttttcctctcctgaccttatccgtttacagttcaatgaaataagtgtatgtgcattgctgtctgtctctattgccaaaatcaaataaatggcttctcagctgctgtttacaacaaacttccctaaccaaaacagaacctctaatttagggctaggaatagaagtcttttgatcccagtccctgggacagttttgtatgctgtatcttgtacacaggttgtaggttggtttattgccattttgttttatttctgctgtataaaaaccaagagccagacaattagacaactatggaggaatgaaaggcaattcaaacatctgcttgattcccgccccgccacccctaatttctgagagaataatggttagagaacattgcatctcacttgaaacatcctttgggggtaaatgattcttaggtgctcacttggtctgagctcagctgaatgcagggaagatgggacagagtgacatttctcctctgtgcggcctccagctgagcctgtctctgaattgttccctcccccgcaatgtgggcacttaccatgttcctggcacactggacctcaccatgtcccccggtcaccagtcctcttgctgcccatggttcataggtcatagaaggcagcaatgcactgactgggccacatcttgaaaactcgtggaaagggaaaggggaggagatgggactttgaccacacacagtgatgcctcacaccctgaaggtgggggattttgtacctgtttgtacaactttggtcttgatgggaaaaatggagaattaaaaagtgttttgagaagctt

SEQ ID NO: 739 - DNA, 3166 bp, Homo sapiens
gaaaagcgctggaataccaggagaaaatagtctttcaaaaggtagggcaccatcaacaccttcgcgacaggattaagagtttctagattcccaaaggtccaggctgataggtgagaggagcaactttaagagctgctagagactgagttgaaacgtttacgccagaaagacgtttggctaaggagctatggagccgggaaagggaagagctcagcggacaaggcaagtgctgcttttctttgttttcctgggagggtctttggtgtgttctgagaccgggagctattccatagcagaggaaatggaggtcggtacctttatagccaacgtggtgaaagacatgggtttggatgtggaagacctggctgcaagggggggccagagtcatctttgacgactataaaccttatttgcgattggatccacagaatggcgacttgctcttaaacgagcagctggaccgggaggcactttgtgatctcacagagccatgtatattgcatttccaggtgttatttgaaaatccgttgcaattttttcgtgctgagcttttggtcaaagacataaatgatcacactcccacgttcctaaacaatcatatgcttctaaaaatctccgaaggtgctactctaggaaccttattccaaatagatagtgcgcaggacttggatgtgggaaagaatggtgttcaaaactatacaataagtcccaatccccatttccaccttaaattacgggatagcgatgagggcagaaaatatccagagttggtactggaccaatccctggatcgagaaaaggtgtctgagtttagtttaacgctaacagccgtggatggcgggtctccgcccaggtctgggactacactgattaacgttgtggtcctggacatcagtgacaatgcccctgaatttgagaagccagtctatgaagttcatgtacctgagagcagccctctggactccttgatcatcaaagcgtctgctacagatttagatgcaggaataaatggagaactgtcttattcattttcccacgtctccagagatgtacggaaaacatttgaaatccatccaatttctggcgaagtctatttaaaagcccctctagatttcgagattattcaatcttatatcataaatattcaggccattgaaggtgggagcctttctggaaaatcaagcattttagttcgggttgtagatgtgaatgacaacccgccagaaatagccatgacatctcttaccagccccataccggaaaactcttcacctgagatggtggtcgctgttttcagcatacgagaccaagacgctggagacaatgggagaacagtttgctcaattcaggacaacctcccctttgtcttgaagcctaccttcaagaatttttacgctctggtaacagagcacccactggacagagaggtcagaaatgaatataacatcaccatcaccgtgaccgacttggggacacccaggctgaaaaccgagcacaacataaccgtgctggtctccgacgtcaatgacaacgcccccatcttcacccaaacctcctacaccctgttcgtccgcgagaacaacagccccgccctgcacatcggcagcgtcagcgctacagacagagactcaggcaccaacgcccaggtcacctactcgctgctgccgccccaggacccgcacctgcccctcacctccctggtctccatcaacgcggacaacggccacctattcgccctcaggtctttggactacgaggccctgcaggagttcgggtttcgcgtgggcgccgcagaccacggctccccggcgctgagcagcgaggtgctggtgcgcgtgctggtgctggacgccaacgacaactcgcccttcgtgctgtacccgctgcagaacggctcggcgccctgcaccgagctggtacctcgggcggccgagccgggctacctggtgaccaaggtggtggcggtggacggcgactcgggccagaacgcctggctgtcgtaccagctgctcaaggccacggagcccgggctgttcggcgtgtgggcgcacaatggcgaggggcgcaccgccaggctgctgagcgagcgcgacgcggccaagcacaggctggtggtgctggtcaaggacaatggcgagcctccgcgctcggccaccgccacgctgcacgtgctcctggtggagggcttctctcagccctacctgcctctcacggaggctgccccctcccaggcccaggccgactccctcaccgtctacctggtggtggcgttggcctcggtgtcgtcgctcttcctcttctcggtgttcctgttcgtggcggtgcggctgtgcaggaggagcagggcggcctcgatgggtcgctgctcggtgcccgagtgtccctttccagggcatctggtagacgtgagcggcaccgggaccctatcccagagctaccagtacgaggtgtgtctgacgggaggctcaggggcaaatgagttcaagttcctgaagccggtgattcccaatctcctgtcccgcgacagcgaaatggagaaagccccacctttctgaatggcgtggaatgcaattagggatctgattatgatgcagaacttttagaatgagtctatttctttgaaatcttattcattgttatgcagagtttttcattttgggtaactgcattttactcaagagttttcagaagttacaagaatttaagtctattttttgttgttttaaccgtgaaaaaattgagagccggaatttgcttagtcattgttttgaaatacaacctcaaataatatattcacaaacacattattttcccttcaagtttaatcgcacactgggctcattcatattttctgagtgttctgactgtggatcctctatccaaagcagtttttatataattgagaatattattatagaggtaaatgcatgatatgaataaaaacataattgcttgttatctggttaggttggtttctgagatgttatctaatttaggtttctttcttaaaaacctataatcttttcattctacttttctggcaaacattgcagagaatttttcctgtacttagggttttttttccataattatttgtgaaccatatatatgctagtagaagttgttttatttaaataaattcaaaaccttgtttggattaagatgt

SEQ ID NO: 740 - DNA, 2638 bp, Homo sapiens
agaggagccccaagtcttggggaccacagaagatgccatgtgctccacgatgtcggcccccacctgcctggcccacttgcctccctgcttcctgttgctggcactggtccttgtcccctcagatgcctctgggcagagcagcaggaatgactggcaggtgctacagcccgagggccccatgctggtggcagaaggtgagacacttctactgaggtgtatggtggtcggctcctgcactgatggtatgataaaatgggtgaaggtgagcactcaggaccaacaggaaatttataactttaaacgtggctccttccctggggtaatgcccatgatccaacggacatcagaaccactgagttgtgattattccatctatatccacaatgtcaccagggagcacactggaacctaccactgtgtgaggtttgatggtttgagtgaacactcagaaatgaaatcggatgaaggcacctcagtgcttgtgaagggagctggggaccctgaaccagacctgtggatcatccagccccaggaattggtgttggggaccactggagacactgtctttctgaactgcacagtgcttggagacggtccccctggacccatcaggtggttccagggagctggtctgagccgggaggccatttacaactttggaggcatctcccaccccaaggcgacagcggtgcaggcctccaacaatgacttcagcattcttctgcaaaacgtctccagtgaggatgcaggcacctattactgtgtaaagtttcagaggaaacccaacaggcaatacctgtctggacagggcaccagcctgaaagtgaaagcaaaatctacctcttccaaagaggcagaattcaccagtgaacctgcaactgagatgtctccaacaggcctcctggttgtgttcgcacctgtggtcctggggctgaaggcaattaccttggctgcactcctactggccctggctacctctcggaggagccctgggcaagaagatgtcaagaccacaggcccagcaggagccatgaacaccttagcatggagcaagggtcaagagtgaggggtcagccccagagtgaggaccctctgagttggagaggagccagggctcctcaaccatttccctacctccagtcccagcctctaggtgcccccaggcctcatgacaaactcctagatccctacatctggttttggtccacctagtgaaattcccttctttgcaccgggcttccctctaaaatgtctccctttctctttttggcctgttcaagacctccttgcttttcagtccctggctcagtctctcctcaacacccttgcccctgctgcagccctttctggtgcgccctgcccctttccccacctcgctacatccttcttggcctccaacatccaactcagagtcttcttcccaggagatgtctgtaagaatctctgaactcaaccagccagaccatctgtgcccctccatctacacctttctccccactccttcctgccttccttccatccccctcatggctggcttgggcaggtataatattagaatgcaggttcagcaactataacaaagctcttagataacagtggcttaaaccagtggaaatcaaccagaaggttgaccatcagcaggccaagcaatacagagactccctggtattgagacccaggattcactgatctcattgctaccaggtccaccttctaggcagccagactggaaaagagggcaggaaaggggagcaggaccctcccctttaagtgcacagtcaggaacttggccacctcacttatctctacttggctggaatgtggtcacatggtcacacctagctgcaagaaacactgggagatgtagtctttatttctggcagcaatgcgcccagctgcaagttttcactagagaaaccagatggcagatatcaggggataaccagttatctccaccacagcagcatacagacagcctctcacctgccctgtgggacacctgagttcaatgcccagctagctagccagcacttcttcccactatcacctcccctggggcagcatgatgtggggcagtagttcccaagatgagtgattttgcccccactggacttttggcaatgtctagagatgtttttggcacaacctgggggggtgctaccaccatctagtggactgagaagccctgacatggggaagagtgtgcatgcccaggagtcagacacacctgcctttaaccctgaggcctctgcctcctccctgtgcaccctcagtgactaatcagagtcctttcccatcacggaacatccaggatactaatgtggacttctctgcattgtgtaagaaccaattcaagaccaggcacggtggcttatgcatgtaatcccagcactttgggaggccgaggtgggtggatcacctgagttcaggagtttgagaccagcctggctaacatggtgaaacctcgtctctactaaaaatacaaaaaattagccaggcgtggtggtgtgcacctgtaatcccagctacttgggaggatggggcaggagaaccgcttgaactgggaggcagaggctgcagtgagctgagatcgcgccattgcactccagcctgggcaacaagagcaaaactccgtctc

SEQ ID NO: 741 - DNA, 3238 bp, Homo sapiens
aagttccaaggcccgcgctgggaaaaaggtggggggaccaggggaagactcggagtgcgatggcggcgcaaattccaattgtggccaccacttccactcccggaatagtccggaacagcaagaagaggccggccagcccttcccacaatggcagcagcggcgggggctatggcgccagtaagaagaaaaaagcgtccgcttccagctttgcgcagggtatcagcatggaagccatgagtgagaataaaatggtgccctctgagtttagcacaggacctgtggaaaaagctgccaaacctttgccatttaaggatcccaactttgtgcactctggccacggtggcgcagtagctggcaagaagaacagaacctggaagaacctgaaacaaatcctcgcttctgaaagggcattgccgtggcaactgaacgatcctaactacttcagtattgatgctcctccatcctttaagccagctaagaagtattctgatgtttcaggtctgcttgaaccaccaaactgttttccacagaggctgcatcaattgacattcccactagcaatggatgagggttccaatttttccagatgctcaccaacacttgttaattttggttttgttttcattatggccattctggtgggtgtaaagtagcatctcattgtggcttgactgaatttctctaatgagtaatgatgttgagcatttttcatgtgcttattggctatttgtatatctttgttggagaaatatctgttcaagttctttggccattttaaaattgggttgtctttttgttgttgaattgtaaagttctttagatattctgaatactagatccttattaaatatatgatttgaaaatatttttcccattttgaatgttgtcttttcattttttggatagtgtcttttggtgcaccaaacttcaaaaattttttcgaagtccagtttatcaattttttattttgttgcctgtgcttttggtgtcatatccaataagtcattgccaaatccaatgtcacaaatatatttttgctgctttcttgtaagagttatacagttttagctcatatgtttaggtctttgatgcattttgagttaatttttgtatgtagtgtaggataagggtctaacttcattcctttgcatgtaaatattccatttttctggcaccatttgttgtaggaactgtcatttccccattaaatgatttggcatccttgtcagaaatcaattgtccatacatgtgagggtttatttctgggctcccaattctattccattggtctatacatctgttcccatgccagtaccacactgtttgattaatgtcgatttttagtaagttttgaaatcaggaagtgtgaatcctccaactttgttcttttcaagatcattttggttatatgggttaccttaagattccatttgaattttcggatgggtttttctatttttgtaaaaaatatcattgggattttgataggaattgcactgaatctgtagatcgctttgggtagtactatcatattaacaatattaagtcttccaagccataaacatggactgtctttccatttatttagattttctttaatttctttcagcaatgttttgcagtattcagtgtacaagtcttttgcctcctttgttaaatttattcctaaggatgctattctttctgatgctagtaaaatagttttcctaatttcattttcagatcatgcataaccaccaccataaacatgattccaacaccccagagtattccctcagtctgaccttttgtaaagtggtgctttttaaaatttaattttccaattgcttgttgctagtgtatagaaatacgactgatacttttatattggccttgtatcctgagaccctgtaaattcacttattagttctagacagttttaattctttctttccaatctttatgcctattatttctgttttgttttgttttttaaacagggtttggctctgtcacccaggctggagtgcagtggcttgattccaactcactgcaccctcgacctcctgggctcaagtcatcctcccacctcagccttccaagtagctgggactacaagcatgagccaccacacccagctaattttttttcttttctttttcttttttttggagggtgcagggagcagagtcttgctctgttgcccaggctggtctcaaattcctgagctcaagtaattcatacaccttggcctcccaaagtgctaggattacaggcatgagtcaccttgcctgactattacttctttttttgagacagtcttgctctgttgccaggctggagtgcagtggcatgatctcggctcactgcaacctccgcctcatgggttcaagcgattctcctgcctcagcctcccaggtagctgggactacagatgcatgccaccacaccaagctaatttttagatttttagtagagatggggtttcaccatgttggccaggatggtctcgatctcttgacctcatgatccacctgcctcagcctcccaacatgctgggattacaggcgtgagccactgcacccggcctattattcctttttttgccctattgtcccagtggatagtgatgtccagtagagtgttgaatcaaagtggtaaaattgtgcgtccttgccttgttctccacgttaaggtgaaattttgaagatttcattattacatatgatgtaagctgtaggtttttatttatttatttatttagagacagggtcttgctctgtcacccaggctggagtacagtggcatgatccactgtagccttgacctcccagtctcaagcagtcctcccacctcagcctcccaaatagctgagaccacaggcacatgccaccataccctgctaattttttattttttgtagacatggggtcttactatcttgaccaggctggtctcaaactcatgggctcaaatcatcctcctgcctcagcctcccaaagtgctgggattacaggcatgagccactgcacctggcctaactgtgggctttttttgaaatgtctttttcaggttgaggaaggtcccttctattcctagtgtactgagagtttgtatcatgaaaaggtattgaattttgtcaaatgttgttcctgtgtctattgagatggctgtatgggttttctcttttttctgataatgtgatgaattatatggatttattaatattgaaataataaaatgacactgcattcttcgg

SEQ ID NO: 742 - DNA, 2630 bp, Homo sapiens
aaacggatcgcgttgggtgaaggtgacggcgtcgagcgacctctctgacctcatctcctgcctgtgtcctcctcgctccctctgctccagccaagcatgcgtccttcctgttcctgggccgagcttgctcctgcctcaaggccttcacgtgggctgtgcctctgctggaactcgctggcccctcagctgcagcattgacttccaaagactcctggcacatgaggaagaaacccagaagaggagagcaaaggagtcaggaatggcttttactcagttgacattcagggacgtggccatcgaattctctcaagatgagtggaaatgcctgaactctacacagaggactttatacagggatgtgatgttggagaactacaggaacctggtctccctggagtattatcctatgtgggagcacaggaaagagccctggaccatagaaagccaagtacgagtagcaagaaaaccaaaagggtgggaatggatcaaaggtgtgaaaacaggctggagtgcaatggtgcaatctcggctcactgcaaccttcgcctcccggattcaaatgattctcctgcctcagcctcccgagtagctgggattacagatctgtctcgtaactgtgtaatcaaggaactagcaccacaacaggaaggtaacccaggagaagtattccacacagtgacattggaacaacatgaaaaacatgacattgaagagttttgcttcagggaaatcaagaaaaaaatacacgactttgactgtcagtggagagatgacgaaagaaattgcaacaaagtgactacggccccaaaagaaaatcttacttgtaggagagaccaacgcgatagaagaggtataggaaacaagtctattaaacatcagcctggattaagctttctaccacatccccatgaactgcagcagtttcaagctgaagggaaaatttatgaatgtaaccgtgttgagaagtctgtcaaccatggttcctcagtttcaccaccccaaatactttcttcaaccgtcgaaacccatgtttctaataaatgtgggactgatttcatctgttcttcattactcacacaagaacagaaatcatgcattagggaaaaaccttacagatatattgagtgcgacaaagccttgaatcatggctcacacatgactgtacgtcaggtaagtcattctggagagaaaggatataaatgtgatctgtgtggcaaggtctttagtcaaaaatcaaaccttgcgcgtcattggagagttcatactggagagaaaccatacaaatgtaatgaatgtgacagaagtttcagtcgcaactcatgccttgcactacatcggagagttcacactggagagaaaccttacaaatgttatgagtgtgacaaggtcttcagtcgaaattcatgccttgcactacatcagaaaactcatattggagagaaaccttacacgtgtaaagagtgtggcaaagcctttagtgtgaggtcaacacttaccaaccatcaggtaattcatagtggcaagaaaccttacaaatgcaatgaatgtggcaaggtgttcagtcagacttcaagccttgcaactcatcagagaattcacactggggagaaaccatacaagtgtaatgaatgtggtaaagtcttcagtcagacttcaagccttgcaaggcattggagaattcatactggagagaaaccttacaaatgcaatgaatgtggtaaggttttcagttacaattcacaccttgcgagtcatcggagagttcatactggagagaaaccttacaagtgtaatgagtgtgggaaagcctttagtgtgcattcgaacttaactacccatcaggtcatccatactggagagaagccttacaaatgtaatcaatgtggcaaaggcttcagtgtgcattcaagcctaactacccatcaggtcatccatactggagaaaaaccttacaaatgtaatgagtgtggcaaatcctttagtgtgcgcccaaacctcactagacatcagataatccatactggaaagaaaccttacaaatgtagtgattgtgggaagtcctttagtgtgcgcccaaacctcttcagacatcaaattatccatactaaggagaaaccttataaaagaaattaatatggcaaggtcttcagtcaaagtttaaatcctgtgagtcatcaaagaatttatatcagagagaaaccatacaagtataataaatgtggcaaggttttcagtcacaattcactcctacacagcatcagagaatttcattcttgagagaatccttacaagtacagcaaacccttcatcacaagttcaagcattcattgacatcagagtccatgctaaagagaaatcatatacacctaactgtgtggcagaggcttcatttaggtctcacaactcactagacatcaaaatgtgtaaacatctttgtatattttgtgcatgttgaagctattaaccaaggatcaaaactgtaacacatccaaggatttatgtgaggaataattcagtctagttgtgctgataaacttttcatattacacattgtagaacaaatgcaagcccaaatgtgttaaaactcacacaacatgatatatattaaaggttgcaggatgtttgaagtc

SEQ ID NO: 743 - DNA, 2597 bp, Homo sapiens
gtcgggaagatggcgctacgtctgctgcggagggcggcgcgcggagctgcggcggcggcgctgctgaggctgaaagcgtctctagcagctgatatccccagacttggatatagttcctcatcccatcacaagtacatcccccggagggcagtgctttatgtacctggaaatgatgaaaagaaaataaagaagattccatccctgaatgtagattgtgcagtgctcgactgtgaggatggagtggctgcaaacaaaaagaatgaagctcgactgagaattgtaaaaactcttgaagacattgatctgggccctactgaaaaatgtgtgagagtcaactcagtttccagtggtctggcggaagaagacctagagacccttttgcaatcccgggtccttccttccagcctgatgctaccaaaggtggaaagtcctgaagaaatccagtggtttgcagacaaattttcattccacttaaaaggccgaaaacttgaacaaccaatgaatttaatcccttttgtggaaactgcaatgggtttgctcaattttaaggcagtgtgtgaagaaaccctgaaggtcgggcctcaagtaggtctctttctagatgcagtcgtttttggaggagaagactttcgagccagcataggtgcaacaagtagtaaagaaaccctggatattctctacgcccggcaaaagattgttgtcatagcgaaagcctttggtctccaagccgtagatctggtgtacattgactttcgagatggagctgggctgcttagacagtcacgagaaggagccgccatgggcttcactggtaagcaggtgattcaccctaaccaaattgccgtggtccaggagcagttttctccttcccctgaaaaaattaagtgggctgaagaactgattgctgcctttaaagaacatcaacaattaggaaagggggcctttactttccaagggagtatgatcgacatgccattactgaagcaggcccagaacactgttacgcttgccacctccatcaaggaaaaatgatctgttaaatgaagctgtcatcggggaatgctgagctgcaatgaccattactgtagagttacaacaagagggtaaagttcatacatggcgacctgtgtcaaatccgtccattgatctgccctccagcacacatttactgagcttctgttacgtgcctgtggttcttggaaagagctttttccttctctacaaggaggaatctgatgcaactgacatcctcaatagctacagagaacttgcaaaggagtagagagaatgtttgaggtccagccttggtgtagagaagcggcagaaacagaaatcccaaaaggtgtcatgcttggctccagctctgtgctctcaggactcccttccctctgggcagaggcccatctgctctgtttacacacctggacctggtgtgaagggaggtttggaggagggtagctccctgaccatttgtggaatcgttcctgcttccaagcagcatgctacaggccagccttcaaagaaagaccagaagccaagtgtactctgtcatcacttaataatgcttgaagcttttcatataacaaaaggaatgaagcagccccgcctcgcagtgtggaagcctgatcattcttccatcagctctgcaccaaaaagcttttcctgagctttgaatattagatctgaccaatatgggtaaccaatgcccttaggtaaggtaaaataggaataaaatagctgtttgcaatgttatttcaccacacagtgtggtagggagggaactgatatgttgcaatgcaaagtaatctagtagtactgtttgtagaacagacaagtgtgtccaatttaaagaatatcaacatcatttttctatatcatactcttgtgaggttggatttaaccacagaggcagaaagttggtctactttgctcgttcctggcaactagcatggtgcctgcccctaatacattttcactgaatgaatgaatcagtgagttaatgaataaataaacaaatgggaggtgttctcctttatattgtgttagaggctgaggatatagaaatatgtaactcagagtcccattccacaagcccatgctagtgagccaacacaaacaaaaaacaactcaaattcaatgtgattaattcctaaaatcatagcactaacattcagtagtcatgtccagctcttcctttatgtcaggtacctagacatagcggaacagaaaacccttcaaaagttcagtctagtctggaaaacaaacatgaagcaaagaaggcacaacaccatatggaaaagcaagacagaaatatgtacagggcagagaggctgcacggtgtcatttaatcacgaagactctgttattagactgctcgaatacacaaagctgtgttaccttggacatgttacttcacctctctgggcttcagttgtctcattctgtaaaatggtgatattactggaactcatctcatagggttgttagtgagtgaatgtttgtaaaacaggatagtgcccagcacatactagtaacaaatgtaaaatacatgaaacaaataaatatttcctgtgtcctctgaactttaaactctcatc

SEQ ID NO: 744 - DNA, 2228 bp, Homo sapiens
ttaatttcctggagagtttcaccaatgttttttgtagtagtttcatagtttgatgtcttagatttgtctctaatccgttttgatttaattttttttagatggcaagagatagaggtctagttttattcctctgaatatggatattcagtttttgtaacacaatttgttgaagagactcccccattatattgaggcaggaaaatagagtctggaggcagaaaacataagaccacttcacacttcacctttccatagggcatgggccataaataactttgtaactttatttcatcctctccatttacatagggcatactagggggtatttaaactcccaaaaattctgtaatggggcctttgagcccctacgcttgggctttttcccacactgtggagtgtattttcattttcaataaatcacttcatgccttccttgctttgtgcgttttgtccaattctttgttaaagacgtcaaggacctggacacctacaactggtaacgtatattttggccagccaggaggaagaagtaagcccaaagtttgggattcatttttctctctttcctttctgctccatacaagagctttctcttttcatttccaacttggaacacttggtgggcagcacctaaacgtggaggcaactgcaggtttctggctgtggcctgtgaaactaatgggtttccgtgcagagaaggctgactgccacctcctggtttgcttaaggaacctgggtctttttcatttttttttcctttatttctcagtctttaagtcgctgtttataattgccctgcccagaagggggaatgactttttttttttatcttttctgcacgtggtccccgatccctatgtgtggcgcagttcagagcaaactcgcacatgttttaagggacttaaaccttcttatgctaaattcttcccttaccgtactcaactggctacggaacaaaaaggcccacccggcatccagttctcattgcagttcatggctatttttataaagcttatagtgtgctctggaggtgcccacctaaggtcagagacatctgacactgagatcggatccacaggaggatactctgtgggtcctgcggacctcaaccttcccaaaggggacgttcctggcagaggttctgaggtctggtactaaaccctccttggaattttctctcatagttgcaatgctgtttggccccaacattgtttggaatttggagtttactgttgaatggaaaagtggaatggcattgtatctatgcaggcttttgtgctgtggttccaagcaggggacctggttaatgtgtgatgccctcctttggtatggtttggccccagtgctctttggattctggggaggtttggcctttaaaaatcaaactgccatggagactgctttacccaaaattttggttcacagccttcattggattatctactggggcaaagtaaaaccagtaagtttctattgctatctcatggctaaggttccaagctattgagtcttcatttatgtgtgtgtatacatgtctagatgtctttatttgcatgtacacttactgttatatgttatgtctaccaaattggcttataagtaaaagagcactcataagtaagtctaagcaattttcaagttcatgtgacttaaagtataactttactaaacaagctagctttaaaattattggtggaataaaaatataaatgccttcataattatcagcatacattttgtctgaattttatgtttgtctttgctaaatatttttaaatgtcagtgttaattcaagctgggagctacttagggtgagcctgccttcttccattctatccgaagtctcttctaaagttgcggaattgtccatatccattagttcaggatttttttgttttttagggtttcactaaagtttcaggtttctatttaacatgtaattctgtataccaaatgtaccagaaagggttatgttattcatgaaaaaaaaaagagaatagttttgtctaattcaatagttatctaaaagttggttcaaattacagatttaaaaaggttattcataaaacaatgtagtaaggaatcattaggcaaaaaatgtgggaaaagtttaaatcataaaatattttttaaaccctgataaagaattggagacgtttggctaattaaacattttcataaagctgttagttttgattaaagtaaaataaaaagtattgtaaaaatgc

SEQ ID NO: 745 - DNA, 3584 bp, Homo sapiens
taactagcctagaatgttctgtttcctcttaagtctctacacacacattttgatatttcatttctagaatggtagactatacatgttagcaatcgtgggaatcactttttatgtaataacatacttgagtgtatggcatacagtgtgattgggaataaagatggagaaactgttctttacaatattccatgatgatctgcaggggctttttttgtttgttttttaaaatcattaaggcatttctctttaagattgctttattttatttaggactttatcttatctttatgtttctttttttcacagtccatatttttctcccctttctctttctctccctgcctcccaccatgcacacacgcacacacacacacacacacacttcctccaagcatattgatttattgaaaatcaaggtgacttctggtgttggagataagcaggcccacacttgttggtgtggttctttgcatgaactgcctccttttcctgacactaaggcacagctgagtggagggaagaagatagcagtgacttctcctatcctctaggtcattggcttcacattagaagcaccagaggagttttaaaaattatcattctcagattcacaccccatcccaaataaatcaggatgtgagtatcttgtgttgagatacacatatctgtactttttaaagattcttaagtgattccagtgtgctgcaaagtctgcgctgcgaagtctgggagacactctaggttttttgtttgtttttataatgaaacagtagtttttttttttttttgaagtttaacagctattaatggtggcatagtaccttgtaggtagtttttcaatcctcaccctccttctaacccctaccctcaagtaggaccctgtgtgtattgttccctttcttctatccatgtgtactcagtgtttacttcctacttataagtggaaacgtgatatttggttttctgttcctacattaatttgattaggataatggcctccagctgcatccatgttgtgcaatggacatgattttttttaatggctatatagaatcccatgatgtatatgtactgcatttgctttatccagtctaccattggtgggtatataggttgattcaatgtctttgctaatatgaatggtgctgtgaggaacatacaaatacatgtttctttttggtagaacgatttatattcctttgagtatatacccagtagtgggattgctgggttgaatagtagttctgttttaagttctttgagaaatctccaaattgatttccacagtggctgaactaatttacattcccactagaagtgtataagctttactctgtaaccttgccaacatgttattttctgactttttaataataaccatcctgactggtgtgagatggtatctcattgtggttttgatttgcatttctctaataatttgtcatgctgagcatttttttttatatgcttgttggctacttgtatgtcttcttttgagaagtgtctgttcatgtcctttgcccattttttaatggggttgtttgctttttgttgttgagttttgtttaaattccttatagattctggatattagaattttgtcagatgaatagtttgcaaatattttcacccattctgtaggatgtctgtttactctgttgatagtttctttagctgtgcaggagctctttagtttcattaggtcccatttgtgtatttttggttttgttgcatttgcttttggagacattgtcatgaactctttgccaaggtctatgtccagaatggtatttcctaggttttcttctagggttgttgtagttttaggtcttacattgaagtgtttaatccatattgagttgatttttgtgtatggtataagaaggggtccagcttcaatctgctgcatatggctagcctgttaacccagcaccatttattgaacaggcagtcctttctgcattgcttgttgttgtcgactttgtcaaatatcagatggttgtaggtgtgcagctttatttttgggttctgtaacctgtaccattggtctatgtgtctgtttttgtatcagtaccatgctgttttggctactgtagccttgtagtatagtttgaagtcaggtagcctgctgcctctggctttattctttttgcttaggattgcactggctttgggggcttttttttggttccatatgaattttaaaatattttttctaattctgtgaaaaaatgatgttggtagtttgataggagtagcatggtcaccttttagaactggcagtttatctccttgactataagagaaaagtgacctgaagtacattgtcttctcaatttttgtataaaagaagcatttgtactcttcctccagttcatcatgataaaacatgatgattactgctatatctggaaactctgcaatcatccataaggtagcttttatctagatagactgaaattggaaggttgtctgtaaataatatatgtttgacatctgatgtcattcttaaaagaataaatgccagagcatcaagaatagtcccaatccatggaacaatacagaattctaacggtgggaagtctgtataagcaatgccatccatataccatattttaattctgttatagagggattacctctaaatatgtcagatggaaaaatttcttcctctcaatataggccagatacaagcagcttacttactcacacagcttcatagtccatggcagcctcccaagtcattcatttttaagtagttgcatctatttgagtcatgatgtgaacattacccagcaaactgagtcacaaattaatttacatatttgagaagttgttgtattcggtatattgcaatagaaatatcatagaaacttggtattcttgtttcactcagattcagaattcactaaagtatgacgagttattattgctattattatccctaggaataagttaatattaattgattgcatttgtgttttacataatatttatatgtgggaacattataccataactagaagatagaatgcaatgagaaacataattgtagaatatgaaaattcaccagctgtaggattcaaaatggttaaaattcaaaaagataaaaggaaaatgcttggttaaatatactgggattttctaagcttacagtattagaaaagccatatagtttttgttatgtacaaataatttagcttacacaatctttagaaatctttgggttctgggatttaaaaataaaaggaaaccaacaagaagaaaagttaaagttactgattcgacttagtttttatactacatagtacccacctctccaaatgcaatatttcatgtaagctggaattaagtatttattaatgttcaagaaactaggcagtcatatgatcgtggcttattatagcttactcctaaatttagaagtgttcccagattgaaaaatggtaaaaagattagagaacaaatgcacagtttttagttttttccttgttttagatttattatattttttgaaactagattttattatcctaatcatactgtattgaaccttttaagagaataaaataagattgtgttag

SEQ ID NO: 746 - DNA, 2920 bp, Homo sapiens
gagtcgtggccgctgcgccgccaggaggcttcccgggagccggcggggcccaggacctctcgagcgcagcaggcaaggggccggccttttggcagcgcggctgccagttaattttctccgttgcattctgcaaacgagatcgcattcagagcccagaagttgcaagctgggaataagcgagatctgaaagacccccaagaggagcttgtttgggagtgggggcagacggcgttttgcgcccaactgatggttctgtgaagggaaagaactgcacaacactcctgatattcaaatccactgtgagggaggggacctccataccctgatcatagcagaggcctttgaggacgacacaggtcgctacacctgtttggctacgaatcccagcggctcagacacaacatctgctgaggtgttcattgaaggtgccagttcaacagattctgacagtgaaagtttagctttcaaatcaagagctggagctatgccacaagctcaaaagaaaacaacttctgtttccttgacaataggatcatcatctccaaagacaggggtgaccacagctgtgattcaaccactgtctgtccctgtgcaacaggttcacagtccaacttcatatctctgccgacctgatggaaccactactgcctactttcctcctgtttttacaaaggaactgcaaaacacagccgtggcggaaggccaggtggtggttctggagtgccgggtccgtggggcaccccctctgcaggtccagtggtttcggcaagggagtgaaatccaagactctccagatttccgaattctacagaaaaaacctagatctacagctgaacctgaggagatttgcaccctagttatcgcggagactttccctgaagatgcagggatctttacatgttcagcaagaaatgattatggatcagcaaccagcactgcccagctggttgtcacctcagccaacactgaaaactgtagttacgagtcaatgggagaatccaacaatgaccacttccaacactttccacctccccctccaatcttggagacaagttccttggagttggcttcaaagaaaccatctgagatccagcaggtgaacaaccctgagttaggcctgagcagggcagcccttcaaatgcaattcaatgctgctgagagggaaacgaacggagtccatcccagccgtggagtaaatggactgattaacggcaaagctaacagtaataaatctcttccaacaccagctgtcctgctttcacccactaaggagccaccacctctgcttgccaaaccaaaactaggatttccaaagaaggccagtagaactgctagaatagcctccgatgaggaaattcaaggcacaaaggatgctgttattcaagacctggaacgaaaacttcgcttcaaggaggacctcctgaacaatggccagccgaggttaacatacgaagaaagaatggctcgtcgactgctaggtgctgacagtgcaactgtctttaatattcaggagccagaagaggaaacagctaatcaggaatacaaagtctccagctgtgaacagagactcatcagtgaaatagagtacaggctagaaaggtctcctgtggatgaatcaggtgatgaagttcagtatggagatgtgcctgtggaaaatggaatggcaccattctttgagatgaagctgaaacattacaagatctttgagggaatgccagtaactttcacatgtagagtggctggaaatccaaagccaaagatctattggtttaaagatgggaagcagatctctccaaagagtgatcactacaccattcaaagagatctcgatgggacctgctccctccataccacagcctccaccctagatgatgatgggaattatacaattatggctgcaaaccctcagggccgcatcagttgtactggacggctaatggtacaggctgtcaaccaaagaggtcgaagtccccggtctccctcaggccatcctcatgtcagaaggcctcgttctagatcaagggacagtggagacgaaaatgaaccaattcaggagcgattcttcagacctcacttcttgcaggctcctggagatctgactgttcaagaaggaaaactctgcagaatggactgcaaagtcagtgggttaccaaccccagatctaagctggcaactagatggaaagcccgtacgccctgacagtgctcacaagatgctggtgcgtgagaacggggtgcactctctgatcatagagccagtcacgtcacgtgatgccggcatctacacatgtatagctaccaaccgagcaggacagaactcattcagcctggagcttgtggttgctgctaaagaagcacacaaaccccctgtgtttattgagaagctccaaaacacaggagttgctgatgggtacccagtgcggctggaatgtcgtgtattgggagtgccaccacctcagatattttggaagaaagaaaatgaatcactcactcacagcactgaccgagtgagcatgcaccaggacaaccacggctacatctgcctgctcattcagggagccacaaaagaagatgctgggtggtatactgtgtcagccaagaatgaagcagggattgtgtcctgtactgccaggctggacgtttacacccagtggcatcagcagtcacagagcaccaagccaaaaaaagtacggccctcagccagtcgctatgcagcactttcggaccagggactagacatcaaagcagcgttccaacctgaggccaacccatctcacctgacactgaatactgccttggtagaaagtgaggacctgtaatccagcattcttgttaaagctgaaacactgaaacagccattgccttgaccaacatattcctttgtcacattatgtaaaaggcagaaacatacctttgactat

SEQ ID NO: 747 - DNA, 3831 bp, Homo sapiens
tttttttttgagatggggtctcgttctatcatccagaatggagtgcagtggcaagatctcgacactgcagcctcgaactccctggctccagcagtccactcacctcagcctcctgagtagctggaactgaagctacgggtgcatgccaccacacccagctaagtttttgcattttttgtagagacggttggttttgccattgccaaggctgctctcgaactcctgggttcaggtgatctgcctgcctcgtcccatcgaagtgctgagattacaggcgtgagccactgcagcctcctctcctgcaacctgcagcctgggaagcagagcctaccacagcaaccaaaagcaggctcttggaggaagggagggtattacagaagttttatggttggtggattggctagacacacatagttaacaggttatggggggctatgaatattcatgaggggcagtcacacaatagtggtatgtaaacatgtatgtcacatgcattctgtgttcactctgtggtggagacttaacattaaaatacagcaaaattagcctttctatgtcaaaaggtgaaacaaaggacatagaggcaccctgtgtgcagcctccatggactggccagaaccagtctgtgggcagtggtcacttatcaggagggaaggctgatcagttgtcatgtggaaaccgcaagaggggaggggagtctggctgtggcgctacgtggagtgagctaggtgaagtcagccaaggagtgagtcttctgttctttgttttccatgggtttctgtttaactcagtggaaaaagtccaatggcagttagcaagggagggaatataatgaggtgtgaatgatctctcatcttgtcatggttgggaaacttagtttttaaggtttctggggtctccttggccaagagggtctgttcagttggtggaggagctaaggattttatttttatttcacaataaaatgaatgaattaaacatttagtgtaagtccaatgttttatttcctacaaagttaactaacattttttctctactacatagcactcatacaaatgatttctctttcttacatgcatacacacattctgtttcactaattgttgaacacaactaatattttgtcagatttattattcaagaattacatcattacagtgaattataatgtttctgaaaacagtaagcagaaaagatgattagtaaatgttagcataaaatgaaatgaaatgtgaaagtggctgatatctgggtgcctaaggaccttgtctcacagagttctcaaagtcagcagccagtctcagggcccgctcatagtactccagggcttcattcatatttccttccaatttgtagacgaacccaaggaggctcaagctttccagatctaatgcctttctccgaagtttccttaaaaccaatttcttcaaagaattgatacttttatcccttgttaatgatgcctgttctgtttttatagcttttaaataatggataattgcattgacgtcagatttcttttgaaattcctgaaaccgaccatagtggaaatgtatgtcttgcattgtttcttctaccactggtttcatgcataacaatttttgaaaattctcttcagcttttctgtgattgcctgcttctatatacattcttgccaggtctagatgagccacctcaaatgtgggctttttttccactgcagattcaaaatgaaatatggctgatcttatcattttgtctagcttttctctgttctgccctctaggctgcccttttgtagcctccttgatttggatcatttgtgccttgtagcaaagccctatctggtgatgcagtaagacagaagtgggtgtttcctgcaaggccttttttaataactcaagagctttatccacagagccttttcttcggtaaaacttggctgcatatcgaaagacataggtctgtgaggacatgttggctagagcttcttcaatgtacttttctccttcagcttcctgtccttcatcctgaagcttcagggcaaggagaaccttaatatatccattatctggatttaagcggacagcctgccttaggggaagcaaagaaaatggcttgtgattttttgtggctaatttaaagccatccaggcgataggcagagatcgcatacccagcgctggattcagggttttcagggtccacttcaagcaccttttcaaagcaggccttggcccgttcataattctttcctccacacttcagcaaggcccatccttcctcacagtctatttctggacactccattctatagcggaagggatttgaaagcttcttgcaaatgttctccaccttgtccaggtaagtctgggcttctgccagtctgcccatgtggtaatacatccaggcaaagttgccccaggtcaccagactcctcacatttgcttggttgtcatgttcttcctgcattaagttttcagcttcttttaagctcttcagggcttcctcattctggcctttcaggtgtttcacataggctagtaggttgtgtattcccacactgtatttggtgtctaggaattcaatctgatccaagactctgttttctaaatcaggcatttcatcgtcatcaatggataactcccatgtaaagtgacatctcaattgctccagactatccttgacctgatgatcatcaccatttgtactgtaaaaacaaaaacagattttctttgttaggtgaggaacagctaaaagaaaaaagtcagataaaataccttgtattttagtgcttatccttgaaaggatcaacttacttaggtttcattaaagttaatgtatttttaagttattcatggactgttgatattgtttgcttggcttcatatgctggctagagcaatttccagccaagtaactattctgtacttatgagtcctatttgtagaatggagataatgatagtatttatcacactgggtttggtgaggattaataaacttatatgtgtcaagcacttagagcatattatatgctatataagagtttcttattttaatattaagataattaggacagaggtcagttagaaatgcagaaccttaggaaacattgacttcaggaccttactctgcatgtaatgcaacaaattaagaccacatgaaacagataatatttgacccgggtttttttttcattttttttttacttggaaataattacagattcacggaaagttgcaaagacagtacagagatccagtgtatccttcacccactttctccaatgattatatcttacacaactataatacagtagctcaaaactagaaaattgacattggtacaacaatgcttttgtatagtgctatgtcatttttttcacgtgagcctatgagaccaccactttgataaagaaacgaaactcctcttcactaccacatctccctcatattacccctttatggtcacatctgtcacctcctcacctgtactcccctaacccttggtaaccactaatttgttcttcatctctgtaattttgtcatttcaagaatgtcatataggctgggtgcggtggctcacacctgtaatcccagaactttgggaggtcgaggcaggtggatcatttgaggtcaggagtttgagaccagctgaccagcatggtgaaatcctgtctctactaaaaatacaaaaaaaaaattaggtgggcatggtggtgcatgcctgtagtcccagctacttgggaggctgaggcaggagaatcgcttgagtctgagaggcagaggttgcagtgagctgagatcgcgccactgcactctggcctaggtaacagagagaaactcagtctc

SEQ ID NO: 748 - DNA, 3189 bp, Homo sapiens
gagactcgtcgcaccgaagccgccgccaccaccgcgcctccgcctcggccgccgccgcagctgctcctggtccccgtccctttgccgccctcgtcaggcccagctctcctgcgccgccgcctcccgccgcgccccgccatgccgctctactccgttactgtaaaatggggaaaggagaaatttgaaggtgtagaattgaatacagatgaacctccaatggtattcaaggctcagctgtttgcgttgactggagtccagcctgccagacagaaagttatggtgaaaggaggaacgctaaaggatgatgattggggaaacatcaaaataaaaaatatggagttaccatgtggattgacaaaccttggtaacacttgttacatgaatgccacagttcagtgtattcgttctgtgcctgaactcaaagatgcccttaaaaggtatgcaggtgccttgagagcttcaggggaaatggcttcagcgcagtatattactgcagcccttagagatttgtttgattccatggataaaacttcttccagtattccacctattattctactgcagtttttgcacatggctttcccacagtttgccgagaaaggtgaacaaggacagtatcttcaacaggatgctaatgaatgttggatacaaatgatgcgagtattgcaacagaaattggaagcaatagaggatgattctgttaaagagacagactcctcatctgcatcggcagcgacaccttctaaaaagaaaagtttaatcgatcagttcttcggtgttgagtttgaaactaccatgaaatgtacagaatctgaagaagaagaagtcaccaaaggaaaggaaaatcaacttcagcttagctgttttatcaatcaggaagtcaagtatctttttacaggacttaaattgcgacttcaggaagaaatcaccaaacagtctccaacgttgcaaagaaatgccttgtatatcaaatcttccaagatcagccggctgcctgcttacttgaccattcagatggttcgatttttttataaagagaaggaatctgtgaatgccaaagttcttaaggatgttaaatttcctcttatgttggatatgtatgaactgtgtacaccagaacttcaagagaaaatggtgtcttttcgatccaaattcaaggatctagaagataaaaaagtgaatcagcagccaaatacaagtgacaaaaagagtagtccccagaaagaagttaagtatgaacccttttcttttgctgatggtaagtaacattctcattttaattgagttattgtatgtgggtctttttaaggtaaaatttacatcttaccccatatttacttattctgatgtgcttttcaaacaaaatgtcaggtttcttgaacaatttaccttaatgacatatagtaaatttactcattggcatacagttctatgagtaagttacttattaaaacatcaatcatgaagccttaactatgattggacagtagtatcttattggattctgataatactttcgtaatgtgaactttggagttattcttgttacttagcttgagaaggcacatgtctattcattgtctaatattaatggatttacatctttctttagatattggctccaataattgtggatactatgacttacaagcagtactaacacaccagggaaggtctagttcttcaggtcattatgtatcatgggtgaaaaggaaacaagatgaatggattaagtttgatgatgacaaagtcagcatcgtaacaccagaagatatcttacggctttctggtggtggagactggcatatcgcttacgttctactctatgggcctcgcagagttgaaataatggaagaggaaagtgaacagtaatcttcattttagtatttatgcttagatgtgaaaataaatgttatttgttgatcatttctataatccagagctttagaggaagacacataggtgggtttatgtttcacctcatttggaacaaaagaggacagaagcagaccactctgtgcaccaacctaaaaaattacagagaagagaaaattatctttggattgtgctgccctatataaaggtggcagaaagacatttttaaaaagcttattatttcttgcattattttaaaaagttcagagttgaaatgcctttcaaccatttccttctgtggtcatttttcttgctgcctttttcacccaagattcagcagtcagatgtttactgcacacctattacctattatttgctgttcttgcatggttcaaaccaccattctgtagccacccatcctttgccttatctaacaaacatttttccaggaaggtggaaaaggaagtgttgctctcattgtgtgactcagtgctgctgtccatcccatggaaacatgggcacaatcaagtatttgtccagcctattgcaggcttttcctgactttaaaataaattgtgatcaataatagtacctttgattatacatttattattgtgtctctctctgatgtactgtggattgtacatttaactttggaatggctttgtaataatcagtcttaagaaaatgttgacaagctctggttgcttatttttagaaaatgaggacatttaataataataaaaaaaaagggattaatagcttttgacctcaagtcttttgtcttctgagtgttggagcttggctgaagacatgtttaatactgtacaatttctgaagatggttattaacactgtgctgttaagcatccatttaaaaatatttgttatcttctttgcctgcctgtattttaaaaagaaatacaaagttgtaaaagtaatggatttctttggatgctgaatgcagtgatgttatcagtcagattctttccttggctcagttgtgtttgtatttcctttcttaattccccaaatcttggctgggcacggtggctcacgcctgtaatcccagcactttgggaggctgaggcaggtggttcactggaggttgagttcgagaccagcctggccacatggtgaaaccctgtctctactaaagatataaaaattagctggatgtggtggtgcacacctgtgatcccagctacttgggaggctgaggtgggagaattgcttgaacctggaaggcagaagttgcagtgagctgagatcacaccactgcactccagcctgggtgacagagagactctgtctc

SEQ ID NO: 749 - DNA, 2650 bp, Homo sapiens
agaagaagcaggcacgccatgattttgaagctccgtttttgttctgttattcaactgcagtcaacttccaactgttgaaaaaaagatgatttagaattaaagggttgcttgtctgtgtcgcaaggcccttcaacttgttcacctgtgatatccagagactccaagatgttgaaaggttctgttggattctgagtggaacctctttggatatgcctttggatttcaagattgagccaagtgttgacatgggaagatgctccagttcctccagttatctcaaagaagctcattaccttgctaaggaatagcacacagtgaagacagtcagtgagaaccagagctattgttacaactgacagcagccagctcaggaggcagaggacgagagcgatcgggctgcacacacatggatgaggctgatttttcagaacacacgacttataagcaggaggatttgccttatgatggggacctctctcagattaagataggcaatgattacagttttacctcaaaaaaggatggccttgaagtcttaaatcaaattattttcatagcagatgaccctcaagagaaggctatgcataatgagacttgtggaaatacagctgtgaccatacccctgggtaaaattactgaaaatgctgccaacaaaaaagacgagaaagagaaacaatgcactgcagctcttcatattccagcaaatgaaggagacgcttctaagtcaagcatttctgatattttacttcatcatctttccaaagagccattcttaagaggtcaaggcattgattgtgaaaccctcccagagatctcaaatgccgacagttttgaagaggaagctattattaaaagtattatttcatgttataataagaattcttggccaaaagaacaaaccccagaactcactgaccaactcaacccgaaaagggatggtgaaaacagcaataagcctggttctgccaccacgacagaggaaaatacctctgatttagaagggccagtggctgctggagatagcagccatcaagaaaatgtgaatgttctaactaaaaccaagggtccaggtgataaacaaaaaagttatcaagggcagtcaccccagaaacagcagactgaaaaagcaaattcaggcaacacgttcaaatacggccaaggtcaagttcattaccagctccctgatttctctaagattgctcccaaagtgaaaattcctaaaaataagataattaataaaccacttgcaatagctaaacaagccagcttttcttccaagtcgagagataaacccactcttgtgcaagatagtctagaaaccacgcctgagtcaaactgtgttgaaaaacaacatcaagagcagaaagggaaaatcactgaaccttcacaacaaatccagatggagcccatagtacatatccaccaagaacttctcacaggaatagaatctgaggcaagtctctctaagttgtcaccaacctctcagaaaggcacttcctcaagttcttcttacatatttcaaaagatatcccaagggaaacagatgtgtcagaagttgaaagaacagactgatcaactgaagactaaagtacaagaattttccaaaagaataaaacaggactctccttaccatttgcaagacaagaagctggtcctggagaaactgcagggacaccttgaactgctggagcagaactttctggccaccaaggacaagcatctgactttgcagcagcaagtccacaagcacgaatcaacaatcgttggtgactttgatccagaaagaaaagtggaaggtgaaatcttcaaattggagatgctgcttgaagatgttaaagagaaaatggatgaaagcaaatatacttcagctccttcccttcctgtgagttctccagttaccctggatgacttggcctccaccttctcttcactctcaaatgaggaggatcccaacggcactccaagaaggcaggattgtgcagagatgacggcacccagtccgagctgtgccttctgtcgcaggctccttgaatggaagcaaaacgtggagaaaaagggccacggaaggatcaactgtggaagattttcaattgtccttcatgaaaaggcaccacactcagattcaactcccaattctgatacaggacacagcttctgttctgattctggcactgaaatgcagagtaacaaatgtcaggactgtggcactaagattcctacctcccgaagagcctgcaggaaagaaccaactaaagaatttcattatagatacaacactccaggacagaattactcaaatcatagcaaaagaggtgcctttgtccagccccattctttagatgaaagtaaaaactcttcaccctaaaaaaacttcaggctttcatgacctacagctcagaccctgcaacaccctcaccccatttctactcctgcaggatttctggaagcaaatccttatgtgactttgatagcactgaagaaataaaatctgagattttaaactcggctttggatcatgccctaaggacagcaaccattttgaaagaaactacagatcaaatgattaaaacgattgcagaagaccttgctaaagcacagaggtggaggaatcgactgaaatactagttcaacgctaggctaccaaggattc

SEQ ID NO: 750 - DNA, 2475 bp, Homo sapiens
tgaaaccgcagttcctgtgggttgggctgcccaggctggtcagagctcagcaccccaggtctggtgagcagacagagccggcgttaaaccccgatcaggtcattgtcaccacacccttgcttggatgaggaaggaaggaggcaaaggcacccactccatccaagatccgttccaattgatgagcctcagtactggcctcacactgaccaacggtggtatgctgcagtttgttggtttggtgcagagtctaaaggataacatatcaaggcttacctgtgataggccattttaaggaaatggtggcactctgaaggctgtccccattcaccttccacaatgctggtaccatcctggtagaagagccctctgaacaggacacctgttcaggcctgggggccccatgctaggcttgcctgggtgtgagaaggtcgaactgggtggcttaggccttcaaattgagcttgggggtgtccaagagaggggtcttattcgaggaactcacataccccaaataaccatcagtgcacaaatcattccatgctctttggcaccaggcaggagatgctgcaggcaggtgtccgtagttggcaaaaatgggcagtaggggaaatggagttgcttcaacctttctcagtcccggccctcactgcacccaccaagtcaagcagagctgggtgggctgagaccagcatcccagctggactgagcctggggggaggggctggagccaaggagcccccctgggtgggggcatcaggagcaggggcagggcctgaggactgctccccctgcatggagggcaggccaggatggagcccagggtagactttgaggaaggctcagtgggctcagcagaaggaaggctcttctcatagttgtggtttttcacagatggatttgggtgatctgagtgtggtcaggccctgccgttggggaatgaatgccacacggggtttgtctgtaagctgcagtgtctgtgattctgtgtgaactgacagcagggagctgaaggacaggccccggccttgggagaggacacgggcatgggctgctggatgcagggctcccagggctgtgaaggcagaggggtctctggaggcagacagggtgggctgggggccagcagcagggggcagagccccagccagggcagctgcttcctgcacatagacattcctcctgcgcagggccaagtgcccatgagcacagccccagacagacacggtggggagcttggagccctccgctcacctagaggagccctgggacacgcactggaaagtattctaggggcttcctgccttatccttctgtttgttcatacacttagtgaaagcagatcctgtactaggatgtgaggatatctgtcacctgcgtggtccattccataaacaccagattccatttcagttgccacacattttggggctagacttccctaaacaacatgccattgtgaaataatgcatatatttgtatttttaaatttccctgaaaatttaatctattctgttccatatgaagtctgtttcactaccttaaaaaatagatactccactagaggctgtgcttaattcaaatccatgtgtgtgcctgcattacatgtgtgaacacgtgtttctgtcgtgtgtgtcatgcacatctgtgtgttgcatagcataagccaaatgaaaatcatttgttcatgggattcatatgaggaacaaaattaaatttgaatacagtcagataactgccacgcagggcatttggggaaccatccccgaatgccctgatgtgatttccctcagaaaatccttgttattagaggagaaggtctgggcaggggcagcagcatctcagacatcaagtcaactttatcatctactacatcagcactgaagtccaggggcattgaggcactaactaggttccattttctttggtttggttacttattttttctttttgggttctcggtgtgcagaggctgtagagagagcctcagggcggtgaccgctgcaggaattcggccctccagctcccctccagttaccaggagccgatttggaggccaggccttcccagctgagtgtctgtcagcttcattctctctcagctgtgcagtggaagagcaacaacagacaggtgaccttcttgggttgtgcttcacaatggactgggaaaaacatctttgaaatcaggaaatcaggccgggcgcagtggctcatgcctgtaagcccagcactttgggaggcggaggcgggtggatccattgaggtcaggagctcaagaccagcctggtcaacatggtgaaaccccgtctctactaaaaatacaaaaaaaaaattagctgggcgtgttggcgggagcctgtagtcccagctacacgggaggctaaggtgggagaattgcttgaacccgggaggcggaggttgcagtgagctgagattgcaccattgcactccagcctgggcgacagagcaagactctctc

SEQ ID NO: 751 - DNA, 3001 bp, Homo sapiens
gtgattgtgaagggggaggaggctgtggcaggcaggggtggtagtagtagcgaatgacacagatttgccagatgacatgtagcggacctctgcatcagccaagaggaattaagctttgtcactccccactgggactacctttctcctggtatgtgcgcaaggaattcatatgctgctgctgctgcagccaccagagcagggagccttgagtacactttgccacagaaagcagtgagcaagaatgatagctgtctcttttaaatgccgttgtcaaattctgaggcgacttactaaagatgagagtccctacactaaatccgccagccagacaaagccgcctgatggagcgttggctgtgaggagacagagcatcccagaggaattcaagggctccacagtcgtcgagctgatgaagaaggaaggcactaccctgggtctgacggtatcgggaggaattgataaggatggcaagccaagagtatctaatctgcggcaaggaggaattgctgctagaagtgaccagctggatgtgggtgactacatcaaagcagtgaatggaatcaacctggccaaattccgccatgacgagatcatcagcttgctgaagaatgtgggagaaagagtggttcttgaagtagagtacgagcttccaccggtctctgtgcaaggatcaagtgttattttccgaacagtggaggtcacattacataaagaaggcaatacctttggttttgtaattcgagggggagcacatgatgatagaaataaatctcgtccagttgtgataacatgtgttcgtcctggagggcctgctgacagagagggcacgatcaaacccggtgacaggttgctcagtgtggatggaattcggcttcttggaactacgcatgctgaagccatgagtattcttaaacaatgtggacaagaagcagcactgctgatagaatatgatgtctcagtaatggactctgtggcaacagcatccgggccactactagtcgaagttgccaaaactcctggtgccagccttggggttgccctaactacctcgatgtgctgtaacaaactagtcattgtcatagacaaaatcaaatctgcaagtattgcagacagatgtggcgcattgcatgtgggagatcacatcctctccatcgatggaaccagcatggagtactgtacacttgcagaagcaacccagttcctggccaacaccactgaccaggtcaagcttgagatccttccccatcatcagacccggctggccctaaaggggcccgaccatgcagctttggtgtcttcatccttctctcctacctccatgagtgcatacagcctgagttccctgaacatggggactctacctcgaagcctctactccaccagcccacgtggaaccatgatgaggaggagactgaaaaagaaagacttcaaaagctcattgtccttagcctccagcacagtaggattggctgggcaggttgttcacacagaaaccacagaggttgtgctgacggcagatcctgtcacaggatttgggatccaactgcagggcagtgtgtttgccacagaaactctctcttctccacctctgatttcctatatcgaagctgacagcccagcagagagatgtggggtgctacagattggagacagagtgatggccatcaatggaattccaacagaagacagcaccttcgaagaagccagtctgctcctccgagactcttcaatcacgagcaaggtcacactggaaatcgagtttgatgttgcagagtctgtcatcccaagtagtggaacatttcatgtaaagctgcctaagaagcacaatgtggaacttggaataaccataagttcaccatccagtagaaaaccaggagaccccctcgtcatttcagatatcaagaaagggagtgtggcacacagaactgggaccctggaacttggggataaattgctcgcaatagataatatccggctggacaactgttccatggaagatgcagttcagatcctccagcaatgtgaagacctggtgaagctcaaaatccgcaaagatgaagataattcagatgagcaagaaagttccggagcaattatttacaccgtggagcttaaacgctacggggggccccttggcatcacaatttcaggaactgaagagccgtttgatcctataatcatttcaagcctcactaaagggggattagctgaaagaactggcgcaatccacataggagaccgaatcctagccatcaatagcagcagcttgaaagggaagcctctgagtgaagccatccatttgttacagatggcaggagagactgtcaccttgaaaattaagaaacagacagatgcccagtcagcatcgagccccaagaagttccctatttctagccatttgagtgacctgggggatgtggaggaggactcctcaccagcacagaagccaggcaagctctccgacatgtacccctccacggtgcccagtgtggacagtgctgtggattcatgggatgggtctgcaatagacaccagctatggaactgaaggcactagttttcaggcctcaggatacaatttcaacacctatgactggaggagtccaaaacagagaggcagcttgtccccagtcactaagcctcgaagccagacttacccagatgtggggctgagttatgaagactgggaccggtccacagccagtggttttgcaggggctgccgatagtgcagagacagaacaagaggagaacttctggtctcaagcgctggaggatttggaaacctgcggacagtcaggaattctgagagaactggaggcaacaatcatgtcggggagcacgatgagtttgaatcatgaggctccaacacctcgcagtcagctggggcgacaggccagcttccaggagcgcagcagctcgcggccgcactacagccaaacaactcggagcaacaccctgccttcagatgtgggtaggaagtcagtaaccctgagaaaaatg

SEQ ID NO: 752 - DNA, 2635 bp, Homo sapiens
agttttctccaacatggccgcgcccaggggagatggcgtgcaagtatccgctgcggtgttctggtgctagagtggagaggctggcaaagaagaaggcacacgcatggtgagaatccggcctgagccgaagcggagtttgctatggacagcaaccatcaaagtaattacaaactcagtaaaactgagaagaagttcttaaggaaacagattaaagccaagcatactttgctgagacatgaaggcattgagacagtatcctatgccactcagagcctggttgttgccaatggtggtttgggtaatggtgtgagtcggaaccagctgctcccggttttagagaaatgtggactggtggatgctctcttaatgccacctaacaagccgtactcatttgcaagatacagaactacagaagaatctaagagagcctatgttaccctcaatggaaaagaagtagtggatgatttaggacaaaagatcactctgtatttgaattttgtggaaaaagtgcagtggaaggagttgaggcctcaagccttaccaccaggactcatggtagtagaagaaataatttcttctgaggaggagaaaatgcttttggaaagtgttgattggacagaagatacagacaatcaaaactctcaaaaatccttaaaacacagaagagtaaagcattttggttatgagttccactatgagaacaacaatgtagataaagataagccattatctgggggtcttcctgacatttgtgaaagctttttggagagatggttgaggaaagctgagaaaaatttggaagtagggattcattaggagacattcaaatgtctcctgttggctgacatcacagatgtggtgttggctcctcctacttccctaggagaggtggtttctaaaagtgattgaagcagtttgtgcagtgtttgtaattcttgggtaagagcccaggattttgaagataatagttttttagtaaagtgctactaaatgtagtaaatcatgtaggattttagggatgtaattatatgttaatacagaaaatagtcctggtcaatagaaaattgtctgaagttttacctatgatttttagctctgtaaaatcatagacaataaccattctatttccatgcctgactagcccagggctggacgtatagcgggtgtccaataacgtttagtcaatcagataatacccagaacttagtaggagtttcattcaaaaactattttttgaacccaaccatgtaccagttactattttaagtactgataatgaagcagtgaataagaaagagcaaagctcttgcccttatggtgcttacattctagacggggagacagacagcaggcaaatcaataaatagatactatgtgccagatagtgataaatgccatgaaaaacataaaatgagagacgattcaccttggagcaaaagattacttttaagtgactgaaataactactaatcctgactaatttattatcaagagttaattggtattccaaattcattgagcagggtgctaaaaacaacccaaatgtgctcctttaactcctttgtttaaatgacaaaagttagaatgtggtcactcagacctaactgtgcccttagagccaaagctgtggtgtcattattggttatttctagttgattcatagtttgtcccaatccaggttcaatcgggttatttttaagatctgtacaatattgcataatagtaacccagttaacttaccacttaggttagatttcctggaggaacaaaggtagaaattcaaccataggtcaaattatcacatagaaggaaaaggctttttttcaaagaaaaaattttttgaacactttactcccagtatgcattacttttgtagtagtaatgcttaagactgttttaaagaaaaattgctttctgtttaattaatgtttactgttattaatgctagtgatacttaatcttgaagcatcaagttttcagaaacctatagtgatcaataatgggtctcagatgagaggatgattatttttttcatggaatttcagtccaacatcctggtgtactggtccctctgggatgaatttataaggctcatgatataggaaaaggaatatagggctaaaaatagttttatttctgatataaattctggtacttgacaccaaagtttgaagtcaagtcatgccaataaattttaacatccaaatgaaatagaatgattttctatgaagatgaaaaataccaaaattgactcaagaagggagagaaaatggaagatgttgaaaaatagcataggatgtaattcaaggcaagtttctaattccaagctgcctgttcatgttaacaggacttctttttattctcaagatgtactggttccctggcaccttaagggaaatcctgataaaggcaaacctgttgagccatttggtcccataggatcccaggacccaagtcctgtgtttcatcgttactaccatgtgttccgtgagggagaactggaaggtgcctgcaggactgtgagtgatgtcagaattctgcaaagctactacgatcaaggaaactggtgtgtgattcttcaaaaggcctgattatttacctgaacacatcatatataaagaagaaatgctcactt

SEQ ID NO: 753 - DNA, 2662 bp, Homo sapiens
cttgtgagaagagccgcgcttgcagcgtctgggagaatctttcggtctccgcgagaggtgcttcattccacgaaaaaagtataattcaagctcagatttgtgttgaaaccagcctcaagtttcacctatcctcactgatccgtggacttctgtatgatcagggtgctgtcctgagagcgctgcgggataaaggaggagcgtcctgcttcccggctgccctgttgctgtcggagtcacaggatggcggctgtcgtcctgcccccaactgccgcctctcagcgagaaggacacacagagggcggagagctgttaatgagctcctgaaaagctggctaaagggcttggtgacctttgaggatgtggcagtggagttcacccaggaggagtgggcattgctggaccctgcccaaaggacactgtacagggacgtgatgctggagaactgcaggaacctggcctcactggggaaccaagttgataaacctaggctgatctcccagctggagcaagaagataaagtgatgacagaagagagaggaattctctcaggtacctgtccagatgtggagaatccatttaaagccaaagggttaactcctaagctgcatgtttttcgaaaagaacaatctagaaatatgaaaatggagaggaatcatcttggagcaacactcaacgaatgtaatcagtgttttaaagtcttcagcacaaaatcttcccttacacggcacaggaagattcatactggagaaagaccctatggctgcagtgaatgtgggaaatcctacagcagtagatcttaccttgctgttcataagagaatccacaatggggagaaaccctatgaatgcaatgactgtgggaaaaccttcagcagcagatcttaccttactgttcataagagaatccacaatggggagaaaccctacgaatgcagtgactgtgggaaaaccttcagcaattcctcatacctcagaccgcacttgagaattcacactggagaaaaaccgtacaaatgtaaccagtgttttcgtgagttccgcactcagtcaatcttcacaaggcacaagagagttcatacgggggagggtcattatgtatgtaatcagtgtggaaaggctttcggcacgaggtcatctctttcttcgcactatagcattcatacaggggagtacccttacgaatgccacgattgtgggagaaccttcaggaggaggtcgaatctgacacagcacataagaactcatactggagaaaaaccctacacatgtaatgagtgtgggaaatcctttaccaatagcttttctcttacaattcacaggagaatacataatggagagaaatcctatgagtgcagtgattgtggaaaatcctttaatgttctctcgtccgttaagaaacacatgagaactcacactggaaaaaaaccctatgaatgtaattattgcgggaaatccttcacaagtaactcctacctttctgtgcatacgagaatgcataataggcaaatgtgaattcagtaactgtgggaaaagcattcattgatctttcatgcctcagataacatgagcaaactctaacaagatgtatgaatcacctgctactgtgtaacaaattaccccccaaaattttgtggcttcaaacaaaaacacttgttatctcaaaatttttgtaggtcaggaattcagaaacaacatagctctatagttcttcaggatatctcaagaggttacagtccagatgtcagcagaactgtaatcatccagaattgttactggtgaagggaccacttccaaatggcttacaagcccgacaagtgcatgctagctgtttccaagggacctgcgcttccaaatcacgtaggcctctcaacagggctgagtttctttatggaagcaacttctccccaaagccagtgatctaaaggagccaacacagaaagcataatgtcttttatgacctagcttcagtgagatatgttttcatgtccctgttacattggtcatacacaccaatcctgatacaatgtggaagaacaccacaggaggtatgaacagtagacattcggaaccatctggaaaacttgccatgaaatcagtggaggaaagccttcagctgaccctcatttttttttttttgagacaatgtctcactctgtcacccagtctggagcgcagtggtgtgatcacagctcactgcagcctctacttcctgggatcaagtagttctcctgccccagcctccaatgtagctgggactacaggtgcatgacaccatgtctggctaatttgttttttttaaactagagggagggttttgccatgttgcccagactggtctcaaactcctaggttcaagcagtcctttcatcttggcctccagaagtactgggattacaggcatgaaccaccatgcccagccaacttctaaactgatcaatatgggagtagcattcaatcacccacaggttaactcactctagagagaaatcttgtgagtgtaatttgtatggtaaaactttgagctcaaactttccccctaccaaaaaaaaagtatctactggggagctgcccaggtaatgcagtagctgtaggaaagccttcagtgatggcttcagggagtcacatgacaactcacaataaggggaaaccctgtgtgtggcatc

SEQ ID NO: 754 - DNA, 2643 bp, Homo sapiens
aaaaacaaagggcgaagagaggggcgtggggaggctggaaagcatggttgccccgcctggcccggcgacgcccgctcagcagcctgctgaggagtggggacgaagagcagcctaaacttagggctcgggatatttcgatgccacccaaattgccgtcctaccccaacgaggcagggaaaggagcggagcgcgcgcgcgagctgagtgagtgcttacgtcgcagcgagatctgtgctgggataattagagaggagttgggctgagccgagtcctctttcagcagcagcagccggagccgccgccgcagcccggtggggcacccctgactcggaccgctcgggagagccccaggagaggccagcgccgcgcagcagccgccccgctgcgcccacctccccggctgctcccggagggctcacaaaggcggtggccgcccgagtggccttctccatccaggcgttcgcgtcctcctccccaccttctctcccgaaggcgaaaatggcagggccaggcgagaacctgggacagcggtggccctagccctgcgatcctcacccctcctgctaggagaggctgcgggctgcccgcggacgatgtggccgcggctgctcccgagcgcatcttcggcccgggtccccgccgccacccctcttctctgctccttccatcccgcccagaggagttgatgccgctgtcgccgccgccgccgctgctgaagccgcggctgatggatgccagggagtgccgcattgcttagcgaccccgcctctgggtttgctgatgatctctctccgccctggagctcagcgctgaagagctaccttattattaatcagaatttccatcgccacccctggcaggcgtatccttcagcagggaccgcaggaacattcacagtgcaggggctgagatgtgcgtgggggttgtttttgttacatcttggaagagaagagaagaggacagtaccaagatcagaaacacccgtgctaggtggaattaggggtgatttgttaggaaagagaaaggacaagaagaggagtgcggagcccttcaggggttcacatctctttaaaggaaaggaaagagggagccaaagtagggtgttgtattttagggggcagaggaagaagtttacaccccccggcccccccagctttgctgggggaaagcaggagcaacagggcacttgattggacaccaagattattaatttcctgtaggggagaggaagcaggcagcaggaggtctgggggctggagtctggtggtggcaaggaccaggtttgctttgggacagtcaacaaggtcttctgagggaaagctcagagataggcagaacaatgactcatttgcaagccggtctctcccctgagaccctggagaaagctcgcctggagctcaatgaaaacccagacacgctgcaccaggacatccaggaggtgagggatatggtcatcaccaggccggacattggctttctgcgcacggatgatgccttcatcttacgcttcttgcgggctaggaagtttcatcactttgaggccttccgcctcctggcgcagtactttgagtaccggcagcagaacctggacatgttcaaaagctttaaggccaccgaccctggcatcaagcaggcactgaaggatggcttccctgggggcctggccaatctggaccactatggcaggaagattctagtcctttttgctgccaattgggatcagagcaggtacacactggtggatattttgcgtgccatcttactttctttagaagccatgattgaagatcctgagcttcaagtgaatgggtttgttttgatcatagactggagtaacttcactttcaagcaagcctctaaactcacaccaagtatgctgcgattagctattgaaggcctgcaggatagtttcccagcgcgatttggaggaattcattttgtcaatcaaccatggtatatccatgccctgtacaccgtgatccggcctttcctgaaggagaaaactcggaaaaggatatttttgcatggtaacaacctgaacagtctacaccaactaattcatcctgagatcctgccctctgagtttggaggaatgctgcctccttatgacatggggacatgggcaagaacactgctagaccatgaatatgacgatgacagcgagtacaatgtagactcctacagcatgcctgtgaaggaagtagagaaggaactctccccaaagtccatgaagagatctcaatcagtagtggatcctacagtactaaaacgcatggataaaaatgaggaagaaaacatgcaaccattgctttctctggactaataacttctctacatccccttcatggattagaaatggaaagtattggttttcagcaacagggacaacactgtagaggaattaccagctggaaaccgacttattcatgttaatgtagcataatatataacaaggcatcaggctttccttggcctgaaccatgggggccctgggctggatttttaaaatgtcaataatttattctgtaagtgccaagttctttgtaaatataatgtaatcttcatgtcaagtttgtaaatttcagtagtaactcagtttggaaaaaggttggctcaaaagtccatgccagtgttatgaactat

SEQ ID NO: 755 - DNA, 2729 bp, Homo sapiens
atttccctcttcccgactcctctagtcccttcatcagtccaggctccccacagtgccccatcttccctcttcttttcccagtctttctctcctgccttctctacccgcatctctcccagccattgcctaaacctcggcagtcctttcaggttggtggcacacagctgggcactaagccatgtcggacttccacgtgcatccccaggccaccgtgggtgaggagggtggtgtggcccgcttccagtgccaaatccatgggcttcccaaacccctgatcacttgggagaagaacagagtcccaattgacacggacaatgagaggtacacattgctgcccaagggggtcctgcagatcacaggacttcgagctgaggacggtggcatcttccactgtgtggcctcaaacatcgccagtatccggatcagccacggggccaggctcactgtgtcaggctcgggctctggggcctacaaggagccagccatcctcgtggggcctgagaacctcaccctgacagtgcaccagaccgcggtgcttgagtgtgtctccacgggcaacccgcgccccattgtgtcctggagccgcctggatggtcgccctatcggggtggagggcatccaggtgctgggcacaggaaacctcatcatctcagacgtgacggtccagcactctggcgtctacgtctgtgcagccaacagacctggcacccgggtgaggagaacggcacagggccggctggtggtgcaagccccagctgagtttgtgcagcatccccagtccatctccaggccagctgggaccacagccatgttcacctgccaagcccagggtgagccaccgcctcatgtcacgtggctgaaaaatggacaggtgctggggccaggaggccacgtcaggctcaagaataacaacagcacactgaccatttctggaatcggtcctgaggatgaagccatttatcagtgtgtggccgagaacagtgcgggctcatcacaggccagtgccaggctgaccgtactgtgggctgaggggctccccgggcctccccgcaatgtgcgggcagtctctgtgtcttccactgaggtgcgtgtgtcctggagtgagccgctggccaacaccaaggagatcatcggctacgtcctgcacatcaggaaggctgctgacccaccggagctggagtatcaggaggcagtcagcaagagcacctttcagcacctggtcagcgacctggagccctccacagcctacagtttctacatcaaggcctacacaccaaggggggccagctcagcctctgtgcccaccctagctagcaccctgggtgaagcccctgccccacccccactgtcagtgcgagtcctgggcagctcctccttgcagctgctgtgggagccttggccccggctggcccagcacgagggcggcttcaagctgttttaccgcccagcaagcaagacctccttcaccggccccatcctgctgcctggaaccgtctcctcctacaacctcagccagctcgaccccactgcagtgtatgaggtgaagctgctcgcctacaaccagcatggagatggcaatgccacagtccgctttgtgtctttgaggggagcatctgagaggacagccttgagcccaccatgtgactgccggaaggaggaggccgccaaccagacgtccaccacaggcatcgtcatcggcatccacatcggggtcacttgcatcatcttctgtgtcctcttcctcctgttcggccaaaggggcagggtcctcctgtgtaaagatgtggatatgaaggagctggagcagctgttccccccggccagcgcagcagggcagccggaccccagacccacagatcctgcagcccccgctccgtgtgaggagacccagctctccttgctgccacttcaggggtgcggcctgatggaggggaagacgacggaggcgaagaccacagaggccacggctccctgcgccggcctggcggctgccccaccacccccagatggaggccctggcctcctcagtgaaggccaggcttccaggcctgcagcggcccgggttacccagccagctcactcggaacagtagccagtgtctggcaggctccagagggtggacggagcggggcccattctcaggtcaaaagcaagatttctactgtcatgtgggatttggatggtcctgggggctccccagtatttctatcctgactgcctcttgggttgtcaaaacccaaggcagccttgacagggaccccccggccctaacacccatcaggagttggagcagttcctgcaggagcctgttccttccctgggctgacgcccccttgcctctgcctggtacccacatgacttggaactgaactaacatttttctttaaaaagcaaaacttaaaaaaaaaaaaaaagaggagagagatagaggaaggtgaattagactccaaaagatgaccctgctgtagctgggccctgacactgtcaccctccaccgactttgttttctcaggatggatttttgctgttttggctctcagcacctacctcagccggaatgaatgtcctggggggcagtggggcggtggcctcagtccccttaccccacagagcccgaatgcactcctacctcaagtccccttgctggggaccccctctcccttcccacactgttgtccagagtaaaaaaaaaaaaaaaaaaaaaaagcacttccccgtttccaggtgtg

SEQ ID NO: 756 - DNA, 2453 bp, Homo sapiens
gaccatcgcatcttgctcagccccagttcagaacacagaacttcacaccgcctgctcgggcctggagtccccccccgccgacccatggggagggcgcaaggcgcctttcagggaaggtgtcttcgaaaatggtcgaggggtgagagcactgtgacccgtccctgccggggatcctgtggtgggacagccaggattgggtccctagcccgggggaggcagaacctgggtaatggaagggagaatgggctcgctatctgcccagagcttccctggactgcaggaacccgtcctataagcaaccccgaaacttcggggcccgaggaccagggaagaccccctttccttgctgtcttgacagggttgcagaagccaaggagttcggcagggagacggggctcctggggtggttaaggacgcggtgaccacccctgggcgggagctgactcccgcgggcccggaggctctagctcactctacagcaaatgcttttgttcccggaggccgccctgggggaaagacgccccttacccctgccttcgaccctggagagcccagtgcccgcccgggcagggctggagcccgagtcgccccaggcagagtccgccgaggcctggggtgggagccgcgacttctggatctgcctccgagctcagctagaagactgcgcgcacctcgtccggcgccgtccggcgcgcagaagcgggtctaatgtttataacgttaataatgacagttagggagggctgtggagccgggaaccaagacctcatcccgccgccgcccacgtctttgatcattaaagaaacagacaactaatcaggtgtgtggaagtaggggtgggggaggggagggtgacaaggttccaagccgctagcgcagagggtcccagattcagaatctgccgaatccagactaaggcttctaaccaggctggagccgaccccagacagccccaggaatggagagctggagcccctggccgctttctgcggatcgacccttaacttcaacgtcgcgaacccggagcgtcgggagggtggggagggttgaaaccggttggatctggggacttgctccagcgactccatccgcgctgttctagggcccaagcctggtccgcgcgcgccccctgctggaagccgcttgccgggcgcagaggcgggtcaacggcagagggtgctggctgggcgaggaagatgtggctggaaccctgcaccaaggcgaccgctgctcacggctctgcagtcccgcggcgcgatacgccagtggggcgcgcttaaccaaagtcccgaggctttacttcccgtgcccacccagtctatgtcccaggtatcagcaacctctggtccactacacaacacaggcgctgtccctacttcgcgctgcgtagtttccagtgcccagggcgtctcctaattcttgagcgactagtccctggcacaaaaccttcctatacacctctcccactctcccttctctctgagtcttatgactttgtcaggggcctattaaaataaatgtctaagatctggaaaaaaaaatctgttggcgctaacaggggcaaagaaaactgcaaaattggaagtaatcgatgtttgattgaatgtttaagacatgcgacattgtgcaaacgattctgttgcaactgcactcagagttgtacttgcccttgtattttaatgtggcacgcggaggatttaatggacttgcctaaagatgtgggaagggcctctgagaataagaaagccggggcccagatgggcatcaaacatccccagcatagcagccggttaaggctgcggagaccttccccaaggctgccctccagtcagaagcccctgaacactcactacttcccatctttcagcttctgcgcgcacagacacacacacacacacacacacacacacacacacacacacacacacaaatgttctctccagccccacaccctcaagaagctgctttccttttctaatttccagtcgaaagatcactcctcagggaagccaggccctgtttatactccctcctccggcctttccttgtacaggttctatgtagtcgtcaggcgggcaggtcctagcgtcagactccattatgtactgactgtgtgtccttagccaagctatttaacctctctgtgcctcaagaaaaaaaggcataaataagagtactgaccaggcgcggtggctcacacctgtaataatcccagcactttgggaggcccaggcgggcggatcacaaggtcaggagttcgagaccagcctgaccaacatggtgaaacctcgtctctgctaaaaatacaaaaattagccgggcgtggtggtgcatgcctgtaatcccagctactcaggaggctgaggcaggagaatctcgggaggcagaggttgcagtgagccgagatagtgccactgcattccggcctgggcgacagagcgagactctgtctc

SEQ ID NO: 757 - DNA, 2832 bp, Homo sapiens
ctattaactcataactgctgttctcacgagaggctactggcagagaccaggcaggagctcctggagccaaggtcattgcttttatttttatttatttatttattgagatggaatgttcctttctcgcccaggctggagtgcagtggcatgacctcactgcatcctctgcctcacgggttcaagcaattctcccacctcagcctcctgagtagcagggattacaggcgtatgccaccacactaggctaattttttttacagacacgatttcgccacgttggccaggctggtcttgaactcctgacctcaagtgatccacccacctcagcctcccaaagtgttgggattacaggcgtgagccactgcacctggccaggctcatcactttttgcgcctattgcctcgaagccagtctctgatgggacattagggcaggggcccttcagcctagtctgggacatgggccgctcactcagcagtatgacaagcatcacctggagaacgggccagtctcaggaggtcgttcatgccccactggcagtgcactgtgcagccatagtgtaaacaagaggcttaacctgaactggtctgagatcttggggaccccctaccctgtctccagcagcctgtccctttagctgtttgcctactggcaccccatcctgagaaggcatagatacccggcccaccctgccctggaattacaaaagtcttagactgtgcctgagtgcccggcctccttgggagaccctcctaggcagcctaagcaccagacccgggagctgggtgctctggtcctgcctgcctgcctctcactggaccctctccttccaggtacggcttcaggtccagagcgtggagaagcctcagtaccgcgggacgttgcactgcttcaagtccatcatcaagcaagagagcgtgctgggcctgtacaagggcctgggctcgccgctcatggggctcaccttcatcaacgcgctggtgttcggggtgcagggcaacaccctccgggccctgggccacgactcgcccctcaaccagttcctggcaggtgcggcggcgggcgccatccagtgcgtcatctgctgccccatggagctggccaagacgcggctgcagctgcaggacgcgggcccagcgcgcacctacaagggctcgctggactgcctcgcgcagatctacgggcacgagggtctgcgtggcgtcaaccggggcatggtgtccacgttgctgcgtgagacgcccagcttcggcgtctacttcctcacctatgacgctctcacgcgggcgctgggctgcgagccgggcgaccgcctgctggtgcccaagctgctgttggcgggcggtacgtcaggcatcgtgtcctggctctctacctatcctgtggacgtggtcaagtcgcggctgcaggcggacggactgcggggcgccccgcgctaccgcggcatcctggactgcgtgcaccagagctaccgcgccgagggctggcgcgtcttcacacgggggctggcgtccacgctgctgcgcgccttccccgtcaacgctgccaccttcgccaccgtcacggtggtgctcacctacgcgcgcggcgaggaggccgggcccgagggcgaggctgtgcccgccgcccctgcggggcctgccctggcgcagccctccagcctgtgacgctcaccccgccctccttccccagggctccttctcagaaacctgggacataaattggcccctgagtcgattgccctgcttcctgctgggatgctgcgagctgtggagtctatcagacgtgggctgaattttgctgatcagctgggtagttttggccgagaactgcacttgcctcagtgttctcatctatgaaataaggaccctcatgcccacactgtagagtcacgaagctcagagattattcccagcagcagccagcacctggcctggctgaggccattgcaccgttatcctggaaactgaggcagacactccagcccctttctgggatcctggccacgtcattgtgctcctgccctgcaggctggctcccgggggtctctgatggccaaccaaggggccacccagggacctctaactccacacatcctccacccgggggggtggtgggccacccctctggtctgtgttagggacagaggaaaacttggtgtgcctcctggtgtcacagaactggatcctctgcataccccagcttctccacatgccactgctaggggtaccccagctgctgccactcctgctggagggtgaactggggaccctgcaccctccgggaagccatggagtctgctggaggcaccatatcagcctgcgggactagggtggggagcaaacaggccagcggtggaggtctggacagttcaagtgtgatgcagctgtggcaaggagaaatccttccgcctctgggcctcaggctgcctgtccataaaatggggacatggccagctgacggacaactgagtctccggcccacctaccaccgccagccaggatcccccaaagtgtgcagagggctcagcagagaacagtatgggaccccctcaccaggcctggaacacctccagccacaaagaagccaaaggtcagtccctctgctccccagcaaacggtgcctcccaggcattctcagtgccagggcttcatccctgtgaaggcacagggcctgctagtgggcacaggggtggctagttggggcctggggcagaggagggctgcaccaggcgtcctggggaatgtgctcagtgaagacgacactgggctttgcacagcctggtgtcgctgtacagaaactgtcaagggaataaagtgttctttgtttttt

SEQ ID NO: 758 - DNA, 2547 bp, Homo sapiens
ctggagtgtgtagtggtatctcactgttcttgtttaggttgattcatgtgatattgctgttaatgggccactttggggcttattggcaattccttctctctctctctctctttctctctttttttctttctttctttcttttttatttatttatttttttgagacggtgtcttgctctttcgcccaagctggagtgcagtggcgcgatctcggctcactgcaagctccgcctcttgggttcgcgccattctcctgcctcagcctcccgagtagctgggactacaggcgcccaccaccatgcccggctaattttttgtatttttagtagagacggggtttcaccgtgttagccaggatggtctcgatctcccgacctcgtgatccacccgcctcggccttccaaagtgctgggattacaggcgtgagccactgcgccccgccccttttctttcttttttcacagagtctcgctgtgtcgccgaggatggagtgcagtggcgcgatctcggctcactgcaatctccgcctcctgggttcaagtgattctcctgcctccgcctcccgagtagctgcgactacaggcgtccaccaccacacccaactgatttttgtatttttagtaggaacaagagtttcatcatgctggccaggttggtcgcgaacacctgacctcaggtgatccgcctgcctgggcctcccaaagtgctgggattacaggcgtgagccactgcgcctgtcctttattggctatttatttatttcttttatttatttttgcgatgcagtttcgctctttttgcccaggctggagtgcaatgactcgatctcggctcactgcaacctccacctcccgggctcaagccattcttctgcctcagcctcccgagtagctgagactacaggcccacgccaccatgcccagctaattttgtatttgtatttttagtagagacggagtttcaccatgttggccaggctggtctcaaactcctgacctcaggtgatccacccacctcggcctcccaaggtgctgggattacaggcatgagccaccgcgccggccggcaatttcgtatgtttcaacctaataatctgcatttgcctggtgagtaatgatggtgaacacctttccaaatgcttactaactatgggtgtgatctcttttgtgaagcctatgtttctgttcaagcccgatctatttttaggttaggttacttgtgtttttcttttctgatcatctgtagtgtaaaccaaagagtatctgagacaagtctcaatttagaaagtttattttgtcatggttaaggccacacccaagacacagccacaggaggtcctggcgacatgtacaaaggtggtcgaggtacagctcgcttttatacattttagggagacataatacatcaaccaatacgtgtaaggtttatattagttctatctggaagagcaggacaactggaaggaggagagcggcttccaggtcataggtaggtttaaacatattctgattggtgactgttcatggtggcggctcatgcgtgtaatgccagcacattgggaggctgaggcgggtggatcactcgaggccaagagtgccagaccaggctagccaacatggcgaaaccctgcctctactaaaaatacaaaaattagctgggtgtggtggcacacgcctgtggtcccagctactcgggaggctgaagcatgagaattgcttaaactgagagccaggggctgcaatgagcagagatagtgccactgcactccagcctgggctgcagtacaggccctgtctcaaataataataacaataaataaataaacctattttgattggcaattggttgaaagagttattatctatagaaaggaatggttatgataaggggttgtggagacctaggttttatcatgcagataaagcctccaggtagcaggctttagaggaaacagactaaatgtttcttatcagactttaggttgatgttaatggtggaggggtcgaagccccacttcttgtcatggcctgaaccactctttcaggttaaaagtgccctggccaaagaggaaggccccgaggttggaggaggaggggtagttaaattttatttttggtttacagtagtttgccttttcactctgaacggtgtattatgaactgaattgtgtccccctaaaatccatctattgaagcccaaatccccagtatctcagaaaatgactatctttggaggcaattaagttaaaatgggttgttggagtgggccctaatccaatatgattggggcccttataagaagagattagaacccagacacgcatggaaggcagaccatgaaaatagagggaaggcagccatctgcaagttaagcagagaggcctcaggggaaaccaaatctgccaacattttgatcttggacttctagcttccagaactgtgagaaaataaatatggtgtttaagtctcccactctatggtattctgttataatggtcccagccaactgatgcggagtgtacttgataaataaaaattcaatgaagtcg

SEQ ID NO: 759 - DNA, 2376 bp, Homo sapiens
agagcaccggacgacaacagcagcagcaacaacgcggcagccgccaccatggccctgcaggctgattttgacagggctgcagaagatgtgaggaagctgaaagcaagaccagatgatggagaactgaaagaactctatgggctttacaaacaagcaatagttggagacattaatattgcgtgtccaggaatgctagatttaaaaggcaaagccaaatgggaagcatggaacctcaaaaaagggttgtcgacggaagatgcgacgagtgcctatatttctaaagcaaaggagctgatagaaaaatacggaatttagaatacagcatatgaggaatttttccttttgaagacttccaaatgctatcatgacctaacatttagagggagaggcatactgttaacttgatgtatcatgtatatttttgctattagcatgagctgtagtacttagaagtatactgaaactacatagttaactcaattgtacttgcttaaaccaggtgtctttaaaagttctttttaagaaaatgtggcacatatacaccatggaatactatggagccataaaaagggatgagttcatgtcctttgcagggacatggatgaagctggaaaccatcattctcagcaaactatcacaagatcagaaaaccaagcatgttctcactcataagtgggagttgaacaatgagaacacatggacacagggaagggaacatcacacactggggcctgtcggggactagggggttaggggagggataacattaggagacatacctgatgtaggtgaccggttgatgggtgcagcaaaccaccatggcacatgtatacctatgtaacaaaactgcacgttctgcatatgtatcccagaacttaaagtataaaaaaaaaaattcttttagaaaagtattttttatttttatagagttagggagtacagttgcagtttttgtttgtttgtttgttttttcttgaggagtctcactctgtcacccaggctggagtgcagtcgtgtgatctcggttcactgcaacctccgcctcctgggttcaagtgattctcttgcctcagcctcccgagtagctgggattacaggtgcttgccaccatggctggctaatttttgtatttttagtagagacggggttttgccatgttggccaggctggtctcgaactcctgacctcaggtgatctgcccaccttggcgctggggttgcaggtgtgagccaccacacctggtcacaggtgcagttttgttacatggatatattgtgtagtggggaaatctgggcttttagtgtaaccatcaccaaaatactgtacattgtacccaaaaaaaaaaaaaaaattacaagtctgtccatagcagtttaaagaaatttaaaaagcccccataggaatatctatttttctttaaatttttacatttaagacatttaagacaaaaaggcaaactaaaatgtatctagtgataaactgtaccactactgtaccccatatgttcagttctatctgagtaaaaatagagtctggaatataatattggccccctactcagtctttctggatggtacacaggctctttgaaagaagacagtctcatgttaacaattcaaaaaattgtttgagatcccttaagataaatatcccccaaaacagtgtacctctattccctgcataaaaatttagatttggaatggtatgaccagaggaatagatccacttcatgttactacaacaacaaaactatctaggtctgctagatgaatttccagggaattatgctgagcagaaaaagccagtccccaaatgtgacatgtataattccatttatataacattctttttcttttcttttttttttttttttttgttgagacaggctgtcactctgttacccaggctggagcgcagtggcacgctctcggctcactgcaacctctgcctcccagggtcaagcaatcctcccatctcggcctccagagtagctgggactacaggtgcgtgcaaccatgcccggctaatttttgtatttttcatagagacagggtttcgccatgttgcccaggctggtctggaactcctgatctgaggtgatctacccaccttggccccccaaagtgctgagactgtaggcgtgagccaccgcgtccagccaggattcttgaaagggaacatttatagacgcaaaggatggaatagtggttgccagggaggagggaggtgggtgtggctttaaaagggcagcaggagggatgatcctgcagtgatggaatgttctgtcttgattgtagcaacaccaatatcctgattgtgatattatactatagttttgcataacagttaccattaaaggaaattgggtaaaaggct

SEQ ID NO: 760 - DNA, 2819 bp, Homo sapiens
aaaacatgaggcagctgccagccggcctgggcagtcttgtctgcctcggctgtgaagtggggaggctggcaacagttttcttcagcgcccaggatgcagccggctaagtcacctctgccacatctgctctggaaggctttctgggagtttctctggagcacagttgatgagaaccatggagactgaactagcggctcgagggtttcaccttggcacactcctgacagtctgactccatcttctcagccagatgggcctcctcaagacgaagctgtgccatgctgggcatggggcaaggagtgggacgctgctccgtgggccacctggcctctcaggggacctacagtgtagggagccacgaggcaaaatgtccggtccaggtcctggaggtttgttccaagtgctcagcctctgtctgtggtgtggaaactctcgggatgatggtgtggtgtttgcggcagagactggactgtgttcagggggagaggaaggcatgggggacagccctgcctcctacattcccgcagtgacagttttctcaggcactgggaagtcgccgcccctccctcactggccacatctagagtaggtcctgagtacctgtctccataatatccccagcacccagccatgacctccgcctggctcagccttcccccgctctcctgggcctgggcatccctcgcctcccccagatggccgcctgcctcatcgaacccccaatctgatctgcacattccaccaggccacccttctgaggcagctgcgagtccagctggacttgagtggcagagagcagctggggcggctgtgccctgccaggaggatgctgccccaagcctgccggctggcaggtctgagaaccatccggatcagtcctgtccaatagagacatgatgcaagccacagatgtcacttaaaatgtgccagtaggcacagtaaagaaagaaaaaaaggttaaattattttaaccatatgttttattaaacccagtgtaaatgattatcatttcaacctgcaattgatataaagcatttttaatgaactatttgatagtctagtaagtaaatgtttggaacccagtgtgtgtttacacgagggcacgtctcagtgtggaccagccacatgtcagtctcagcagcctggcgagaggccgccgtcactcagacttgaggggtcgcctggctgagtcgagcaagcccccagcctcagccacagagagaaacatacacttcctgcctttaccgttttgctgtatctgttgtgacctgtgctattgtttcttattatttttctttaaattaactcatgcattgaattttagtgaattcatttaaaagggaatctttaaatcagtactgtaagtgggaagccgggagcagaagtggaaggtaaccaccacattgccatgaaataaggcagcagcgataaactcccacccatggtctgtggcctgttgaggctctgagctgaggccgtgccctccctttgtaaagagaatggcagtggggagctggagagtgtgctggccccgagtctaagtcatctcctgcacctcgtaggtgcagctccccactgccagagacctcaggccaaagcccccaggacgcagctgactcagaacaggctgggtttacccctgttgaataacaggagaacgcataccccagggaccctggcaagctgcatgagaacgggtgagctagaatccattaccggatttggggctcagttgggtgctttgggtaattttgaggttctaaggaacctcaaaaagttggtgtgaccattaaatatgataacccctccaaacaactaactcagcaccagcacacagcaggggcatcacccacgccatctttttccatccctccctggctccccacaggccaggaggacttagaaggaagttgaggcctggtcctggcctgcctggctgggcaggagctacagatctcggccaccaggtgactggcagagaatggcctgcctggctcaccagcagcctctatccttcagggaaacttgtgacctttgagaaggctgcaggtccccagggccagcctagggccgtttctgggacacagccctaaatgcccacactgccaagtatgccaccagggactctgcctgaacccagggcccagatcttctggcttcactcgtctctgccactcaaccctggccatcctctaaagctggtagacaatgacagttctgtcacccattaaaatgaggccggcatcgagcaggagtgggaggagagagccccaggtgaattgtgaagagcacaggggacttttgatcattcgtgaatatttattcagagccttgtgcatgcttgcgtttttaacaccttctttttgggtgcatgagagtattttttgatggaaatctttattgagctcgttgtagattcacatgcagttgcaggagctcacaaagagggcccatgtacacttaacctggtttccccaatgacagcatatttcaaaactacaacacaatagcacaactggagtgtctgcaatgatgcaacccaccagtcctagtccgatttcccagttcacacgcactcatttccgtgtgcattttttgctacaatttttatcacgtgtaggttcaggcactcaacagcaccatcaagatgcaaaacagctctgtcccctcaaggcccctcctgccgccctgtgagagccacacccctctccctcctgcctgcctccccccatccttaacccctggccctctaatctgttctccatttctaaaactttgtcattttacaatgttatataaatagaatcacacagaatgtg

SEQ ID NO: 761 - DNA, 2042 bp, Homo sapiens
attacctggaccttttttttagagacagggtttctttctgcagtctcaaactcctagccttgattgatcctcctgccttggcctcccaaagtgctgggactacaggtgcatgcaaccacacctggctaattttcttttcttctttctttctttttttttttttttttttgatggagtcttgttctgttgcccaggctggagtgcaatggtgcaaccttggctcactgcaacctctgcctcctgggttcaatccattctcctgcctcagcctcccaagtagctgggattacaggcacatgcctccataccgggctaatttttgtatttttagtagagatggggtttcgccatgtgggccaggctgttctcgaatgcctgacctcaggtgatccacccgccttggcctcccaaagtgctggaattacaggtgtgagccactgtgcccagctgagtaaatttcttgattgcacagaatgtacggtgatattggcggacttaaggacatcgaattgtttatcaggaataaagtattatgtgtgttttctgcggccctggataatgctgtagcattcagggtcgattgagtaaaaaaaatgtagagatggtttcctgtttgtttttgcttctagttttcattcatttgctatttattctcttctggctttgcttgtgtatgcatatatataaaaccattattattattattattatttttagtttctagtggaaggcttttatttggttctgtgaatagtcattttgtttcctaagaacttccagcaagttgtattcattccattcatctagaattcctaggctgcctttgtcgggcctgcaggtattaatggagaatagcagctttttatttttttatatttattttttgagacagagtctcactctgttgcccaggctggagtgcaatggcgcgatctcagctcactgcaacctccgcctcagaggttcaagtgattctcctgcctcagcctctggaatagctgggactacaggcacctgccaccacacccagctaactttttgtatttttagagaagatggggtttcatcatgttggccaagctggtctcaaactcctgatctcagtgatccatctgcctcagcctcccaaagttataagatttttttcctctggtttttagtaaatgttttttttgagattgcttagcaccagaatgatttgcaaatttgaaaataggaactccactaggaatgccggatagaagagtgcttcacatttgtagagggagacaagaactaaatatcacgacgtctttctgagccttttggtttgctaacgtgccccaaattcttattccaaacggtataagataattatgtgtaaatgaataccagctctacttagttttatttcatatttgtgtatctgaatatattaaaatatcttttttttttttttgatgcggagtcttgctctgttgtccagcctggagtgcagtggcatgatctcggctcactgcagcctctgcctcccaggttcgagcgattctcctgcctcagcctcctaagtggctggtattacaggagtgtgccattagcctggctaatttttgtatttttagtagagatggattttcattgtgttggccatgctggtcttgaactcctgacctcaagtgatcctcctgccttggcctcccaaagtactgtgattactatcatgagccaccacacctggcctaaaagatcattgatttagttttgagtaagattttaagtgattaaattatggtattgttgtgtctggaatatctgatattagggttttttttttttttttttttacagtttttgatatgctttattttgggtatgtagtttacaaaatataaaggaaatataaggagtgttctcttttttttttaaataaaaagtgtatttttaactgggcatggtggctcactcctgtaaccccagcactgtgggaggctgaggctggtgaatcgcctgagtccaggagtttgagaccagcctgggcaacaaggtgaaaccctgtttctatc

SEQ ID NO: 762 - DNA, 2544 bp, Homo sapiens
acgcgccctagaatgtcctctggggaaggggctgcccataacttggaggaacttggagggcaaagcctgctgcgccccaacccttggaggggcctcaaccccgaaggcgaggggcgagatcggggactcggcgacgagggcgagcgcccccgggcttaccacgagcacggggaccccggcggccagcgagtagaggagcacggggggcacggcgctgctgtcctccgggcccgggtagggtttgcggtaggcgctgtcgtggcagaagaagccctgcacgttcacggtgaacgtgtccgtatactcgaagtagtacgccagcatcaccgtccctgccatgatcaccatctggaaatagagcatgctgctggtataccgatggctgcagcctgagccagtgactttaagccttggacatcaagcaggcaaaccaggcaagattttgaccttgctgcattactgcaggtccccccatggctactcatggagcaattggcatccacttcctcctctctgaggcccacaaaagacccgtgctcagccagaagcagataattgggtgaccagctgcagagaggagctctctgctgagaacttcagagacctgcagagatgatgggactaccagttccagagaggagctaccgtctccagggcttctctgctgagaactggactctcgttggggtgatctgcccgcggagaggagccttctcctgctcactcactccagggactccactcctcctcctccactcactccagggcttcctctctgctgagacctgaacgctcaacaggacagcctgcctacagagagaagctacccattgtgtgtctcttctgagctgtttctaacactcagcaaagctcctcttcaccttgctcaccctgcatttgtctgcatatctcattcttcctggacacaggaccagaactcaggcaaaggtgccaccggccacagaggtttccggccagaaaagtgacaccccgaggatcccataacagaacttgctcatgctcctgcttgacctatgcttaattgttaagtccaatgtattaaaagcacaaagtgtttatgtttgtgaagagggtacacttcatctctaattttctagtttccaggaggagggattgtccttaaatattaataacctcttgattcccttccttgattcctcccaccaagatagactgagttatctgctgtttttggtttttgttttcttacttaggtaaacttaaattttcccaaatcttaaaccaagagcatttgttcttttacccttacctgccctccactaagataagtgatttgggtgctagtgtctgctctgaagacccaaaacttccctccaactctaaagactaccctgctaatactactctaaaagttaggctggggagaagtcagaggctcatttagggcttagtagtgactaattataatattaataatttgctattgtcataataatgccacctaacaaacactccaaaatcagtagcatacaacaataggcatttagtcacttgcttgcaggtctgcagataggctagtgaagatattccattccatgtgtctcattttgcacccagacaggaggtacagcaaaatcctgaagtatattttctcataaggaaaatcggaaactcccagatagggtagtgagaatagttgttcataagggttaggtttggcacactctcactctcatctactgggcagaagtccacaggccagggcaatatctgggcttaaggtagtatctgcttccatggaggtattaggtgtgggtagggaataaatatttctcaaacaatagcatatcccacctggaaatattaagatataagtcactatttctgatgcaattaatatgaaaaataataatttgttgcaaagcttgcttgcttttatattttcctaagctgtgcacaataaaaagatcttctttcttcttttatacatgccttagtttaagaaagcttaatttgattgaaatatgccagaaagaactaagatagtatatatataacacaattgggtgtagaagtcatagcattacatttttatcctctgaaattctcataattctgccctcactttctagagatcatttgttaatttatgaaaaggtaataatataagaaatcaatcacaaatttatgctgaatattttgctccttcaaaaagcttatatatttgttaccgatttgactcttacatcaatcctataagtatagatacagatataaatatagatagagagactggaaatttatatgtttaaaaataaaggaaatccaagaagttctgaaaatttaaatgaccaaagtcattccactaggcttaaacttaaagcttttggctctaatcctacacttttcttctactcagcaatctttaagacaactcaatagatccaataataacaggcacaaattgtatacacatgaagactacttaccgtaatattgtaaaattgtaaaaattactttattattcatataacttttcaaagaaataaaaatatattctat

SEQ ID NO: 763 - DNA, 2165 bp, Homo sapiens
agggcatggctcatgcaatcaccagctaagaaaggaactgagacttctcttcatttgttgttttttccttccccacctttccctagaaactattagactgccacactgtcccgttgtgtgacacgggacactttaagtgacggggtagacaaaagctggaacaaaagagcctctattaagattacatgaagcagatgacatttgaagcccaagcctttttagaagctgtgcaattcttccgacaggagaagggtcactatggttcctgggaaatgatcactggggatgaaatccagctcctcgaggaggcctacaccctggttcagcatcaagtttcagaaggattaagtgccttgaaggaggaatgcagagctctgacaaagggcctggaaggaacgatccgttctgacatggatcagattgtgaactcaaagaactatttaattggaaagatcaaagcgatggtggcccagccggcggagaaaagctgcttggagagtgtgcagccattcctggcatccatcctggaggagctcatgggaccagtgagctcgggattcagtgaagtacgtgtactctttgagaaagaggtgaatgaagtcagccagaacttccagaccaccaaagacagtgtccagctaaaggagcatctagaccggcttatgaatcttccgctgcattccgtgaagatggaaccttgttatactaaagtcaacctgcttcacgagcgcctgcaggatctcaagagccgcttcagattcccccacattgatctggtggttcagaggacacagaactacatgcaggagctaatggagaatgcagtgttcacttttgagcagttgctttccccacatctccaaggagaggcctccaaaactgcagttgccattgagaaggttaaactccgagtcttaaagcaatatgattatgacagcagcaccatccgaaagaagatatttcaagaggcactagttcaaatcacacttcccactgtgcagaaggcactggcgtccacatgcaaaccagagcttcagaaatacgagcagttcatctttgcagatcataccaatatgattcacgttgaaaatgtctatgaggagattttacatcagatcctgcttgatgaaactctgaaagtgataaaggaagctgctatcttgaagaaacacaacttatttgaagataacatggccttgcccagtgaaagtgtgtccagcttaacagatctaaagccccccacagggtcaaaccaggccagccctgccaggagagcttctgccattctgccaggagttctgggtagtgagaccctcagtaacgaagtctttctctgaaaaaagccaaagcgttataggggtacacttaggggttgcatgcaagctgttaccaaaaaatttttaagtattttcttaatttgaataataaaaccagaggaaatgcatacagggcatgagcaactgaggcaaacctttgtggacatgaattgttctacgatgaatttttgctttagtattttaataagaattacaaagacaatggcatacttggggtgagagggagctgaggatgtctgaggagggaatagtattgcagggaagactgagaaaacagtaggatgacagttttgagtatactctgcacttttcaattgtgcaatcttcttgtgcactttaaggctttttaattttgtttgagaatgcaaatgtatactgtaagtctacctttactatctactatgcctacttcaccatctcttaaggactcggcatttgtccacagtcagactgcaagagagggtaggtcatgaacagtcacccatgctggctgtagcccccacagaggcaatcatgcccaatagattcaagagaagctaagcggaaatggagggcggaaggtgtgatctgtgggactgtctgggcctgttactcatcctgctatcaatttcttattaattaatcttgatgattcttattaattaatcacatttgcaggaaattcagatgaggcaagaaaattttattggcctgggtaagactgaaagcattccaaattaggcttagactgtgcaaagggcttagctaagttatcgagcttaaaacccgtcaattaaacaaacattatttgaacagttactgcatgccacgcactgtgttgggcttagt

SEQ ID NO: 764 - DNA, 2351 bp, Homo sapiens
gtgcacctagctcaggaagccttcctttctagtctctacagctgtttccctcttttcccatctcattcttccctcttcatttctggcctatcttttaacagctccatccctttgatgcctcatccatctcctcttcaccgtcttgtctttgcctgttcccttttctgcttctctctgctcctcttaaggctgggttttcctcctgcgtctcctctgtgcgcctgtgagtgtcccctgtctgctcatcctctctccctctgtccacctgtttctctttcttccagcgtttctccatctcacgcgctgcctctgtcattttctctctttcttcgtctttctctctctctcattgttctgagacatagcagtgcctggcccagcggggacaacatgtttcacagacaaatcatccaacaaaagagaggaggaacgtgcttcagctggctgtccccatgccttctgctcccgcttctggaagggaagacagggcagggaccatgtccagctgcagaaaatcccagtgtttttctgtggcattgcctggtaaaggctgaacgtggctttcgtgagagctaatctgcctgcccaaccagattgtgctgtggctaaaattgctgtgagctcgacagtgcctgaagactggagaaaactgagccatgtcttggatgctcttgcggggcctaggggagtgccaggccagaaggagaactgcctgtggactctcagtaggaaagcagctaacgaggtgatgagtgagtgtcgcctggaagtctgggggccattccatgtgggtcacatcgcctgaccagagggttgggtgcctggacagggctgagcttgggactcctcccagggcctggcctcagctgctgggcctgccgagcatgccccacaagcacccacgcacacatacaagtatggaggcagagtggaagtttgacttttgcagatctcgtacagcctggagtagagaagagaattgggaactctcaatgttgtgtgaccctaggcaagtcccttccctgccttgtgcctcagtttccctttacataccatgaggatgttcccagtgttggtgttttaatgcctgcagacaagctaagctcatcatctggttcccggaagagatcctccttttgtggaaaggccacagccactctgccaccctgaggctcccactcctccttctctggaaccctctcccttgcctgtaagtcacgggaatgtcaagagcacccagagaagtgcctgctgccagtcatcactcactgattatgtgacagcagaggagccaagaagctgctgggaatcgagacacccccccattcagtccccaccatctctgtcttcatgaggttccctgggagaagctcctatgtctgggaatggaaatgtctccacctggatagggacaaacaggagctgggggctgcatcttaagacttcttgtcccattagtgctgacctctggagacggctcctgaattgtgcccactcccccacctcctcaccacacacatgctctgggccgtgcgaggctcagcttgtcacggacaagctaaaatgaggtggcctgaatgccccttatcatagacagcttatctcctgtggtcactcacctgacagactccagagagccactcagcgggcctctcccagccgcctgcttctcagctctgactctcccttgccttaaggggacactggattccagtgaccctcctattggtcagagttgggctgagcacagagaaggggtagaatgctcctgggaactcggaaagctctgggatgccagcttttcccacatgttctcactcacccctctgtaatacagattctgcacccctgccccccacacacacactcctacacctctgctctcaaagtgaagaagtaggctaatatctgtggtacatttatttacctactccctgagactgcagctcccttagtcagtgttgtgtcctccactcaggctggggctccctgaggatggggctgtgtctcccctcagactggggttccccaaggacagggctgtgtctctccttaggctggggtccctgagggtggggctgtgtctccctgcagattggggctccctgaggatggggctgtgtctccctgaagactggggctccctgaggacagggctgtgtctcccctcaggctggggctccttgaggatgggacactttaaagaagagaaattgacaggttgaccctgggggatctttgggtcaataaaacattctatagaccctcagtggtcagactaggaaaaaaaaaaaaaaaaaaaaaaaaaaaaaaaaaaaaaaaaaaaaaaaaaaaaaaaaaaaaaaaaaaag

SEQ ID NO: 765 - DNA, 2687 bp, Homo sapiens
gaccaagcattttcaggagttgaaagagaaaatggacgagctcctgcctttgatccccgtgctggaacagtacaaaacagatgctaagttaatcacccagttcaaggaggaaataaggaatctgtctgctgtcctcactggtattcaggaggaaattggtgcctatgactacgaggaactacaccaaagagtgctgagcttggaaacaagacttcgtgactgcatgaaaaagctaacatgtggcaaactgatgaaaatcacaggcccagttacagtcaagacatctggaacccgatttggtgcttggatgacagaccctttagcatctgagaaaaacaacagagtctggtacatggacagttatactaacaataaaattgttcgtgaatacaaatcaattgcagactttgtcagtggggctgaatcaaggacatacaaccttcctttcaagtgggcaggaactaaccatgttgtctacaatggctcactctattttaacaagtatcagagtaatatcatcatcaaatacagctttgatatggggagagtgcttgcccaacgaagcctggagtatgctggttttcataatgtttcccctacacatggggtggattctctgacatcgacctaatggctgatgaaatcgggctgtgggctgtgtatgcaactaaccagaatgcaggcaatattgtcatcagccaacttaaccaagataccttggaggtgatgaagagctggagcactggctaccccaagagaagtgcaggggaatctttcatgatctgtgggacactgtatgtcaccaactcccacttaactggagccaaggtgtattattcctattccaccaaaacctccacatatgagtacacagacattcccttccataaccaatactttcacatatccatgcttgactacaatgcaagagatcgagctctctatgcctggaacaatggccaccaggtgctgttcaatgtcacccttttccatatcatcaagacagaggatgacacataggcaaatgtgacatgttttcattgatttaaacagtgtgatttgtgataaactctataagaccccttccgtttttttcttcactattatttttcatcatttctccaaagcaaagcatttttattgtaaagttggtgtttcaaaaacatagctgagcttgtctaacttaccatgttggaaacacatcttaacttctaaatttacaaggcctatcatgtccttgtcatgaaaagcactaaaaaaaaaaagagtttaagtggctaaagtcatagttttgcaagagattaatgatctgccttatattagagtcagagactaatggtggcttaaatgcacgaatgtctttttttttaaaactgtcattttttactgtcttttgctccatatcaggaaatattttggtaggaattaggagaacaaaaagcacttttatcccatttatttctttaaaaaatgtaaggatttcatttatattgaaaaataatattaatcattttgctgttaacacaattctctgatgcggtgctgtacagtcatttttaaatctcttgctaacattttattggcagtatgtatttctaccattgtaaccaccattgtgctattgtatctcttcacttctgtgaaagtaatattttttataaaatacactgaaatttaacctcagtaattgagtccattttcaagtgtggtcaagaataatcttcttggcttacccctttacataagcattataaactaaaatgaaaaccaaaccagacacctgacatagagtctttattttaccccaagttttttgggccactgacattgaatgcaacaactgatttcatacaactgagttactctgttcactccactgaatgcaacccatatagtttcttgcacaaggtgcatctggattccaaatattggatttgagttgactctactcatttattatacactaaagaaattttgttcttcatagttaaatgtactagcatttaatttatattttacatacaacttgcaataatgaaattccttatgtcaggaccctgaaaataagcacatttgaaaactcttagaaaaaaaaaattctgtaatgtcctctagatttagattatgagccctgaggagttattggcaagatttgtgcaaaataaaatatggggagacttgggagttgtctttgtggtttcaaaagtgtaaataaccaattcagaaaacaaaatggaaaaacgaccccttgttaccttgattcactgtatgtggaaaaataatgtaaccaaaagggaagagctttaataatacttatgttaataactctatgaaacatataagctaactatatatcaaacatttcattgagtttggatgtattttccacatattaaaaaaatagttccctaaggcagctttatggaaactaatataggttggttttacaatttaaaaagtatattctataataaataataaaacaaattgttttaaatgtttagtttcacacatacatagtaccatgattttctttgaaagataaggatgtaatgatttagataaagcatcatgtaaagaaatcctaacatttaagtgtaattcatttcaaatgtcacaagtaaagcatcatcctcaaatatctcactgtcaaaattgtagaattaaataacccaatcttgaaactg

SEQ ID NO: 766 - DNA, 2695 bp, Homo sapiens
tattactgatgcttgtgaacacgtctgctgtagcctgcactcacggaggcagagggccgtgggggaactctgcagcccaagcttgcgccgcgctcgcccgtggcccaggcaggacccttccgcggcctcccagtggcagccacagatgtacggagcgcaagaggacggcagcgtcggcgaaggtgacctgtcctgcatcctcaagacggccctgggggtggcagagctcactgtgaccgacctattccgagccattgaccaagaggagaaggggaagattacattcgctgacttccacaggtttgcagaaatgtaccctgccttcgcagaggaatacctgtacccggatcagacacatttcgaaagctgtgcagagacctcacctgcgccaatcccaaacggcttctgtgccgatttcagcccggaaaactcagacgctgggcggaagcctgttcgcaagaagctggattaggacccagggttgcggagagacgcggcccctcccgcgtggacatcaccgccatgagcctctttgcgagtgacctctgggctccgctcctcactcctgctgtacaggcactgtcttcagcccgagttccaggggcctcgggggctgtttgtatcttgttcctttgtgaagtgtgttgcagaaccgacgcttactgtgcgagaatcggagggcgcgcacgcggatcccccgcctggcctggaccccgtggggtcaggttccctgccgggcggggggcaccggtgccgccccgtgttctcccacggggccctggtttcgagtctctgtcacagcctcttccggcggcagcgtgcaccgggcgggcctccgtgcacactcagcacacgcctgccacacagcgtgcgcttgcgtgtcactctggcacgaaacctgtctgcctctgtggatccacagcctggcagagccgagccgtcacctgatttttcagtgtttctacctgtgtgctggagctcatgagtattttataaactccatttaggtacttcaggaaacatgcagcatttttaaaaaaatgaaaattgtttttctacttcatttttccttttagagtcaaaggatatttatttataggccttttttttttttaatatagaatctgaggctgtttgggctttgacttaaatttccatcaggcctctctccagcaggtaatccctctccttccgctgggtcccctggggaggtgtgaactcaagggcctagccccaaaacactttttctgcttttcttaatccttttccagtcccctctttttttataaacgttggcagtttggtgtttctgtttcggcataacgtaatccatttcactgtagcctaaactccagtccgaggttggatattgttcaaatgagcagggcccgagctggaagcgcaaggcagccgccgccgtgccgctcctcccttgccctcaggccaggtccctgctggaagcggctgcatcttcctgtcagccctggtttccatggtgactggcgtgacgcagccacctgagtatggctgaccttcctgcagagagaggagccgcagtcttttgcttgtggaaggagacgctgggctgtgcggtgcggagggtgatgaggatgtctggtgacagccgtgcggacaccactcctctctgcagcactgcctcccagcgccagggtcgcgggcacatcccactgagagcgggggtcctgccccatcttagagtcaaaggcagaggggcttccaggccctggatggggtattttggtgtcacctgaagtccctctgacatcaccttgtttcatcattttttatgacagaattagaaacccatccttcaagcacaataatcatcacagacttgagtttgcttcctaaagcaaaggctccgggtttgtttggaaaatttttttgatttctgaaatgaattgatttttatatttggggcatctctatagaaagtgaccaccaaggccagtaagtacgggaaaaaatgtttactaacttcctcagagattcgtgatacgcgtttctccactgacagacatttaaaaacaaccttcagctccgtttcaatcaatcacctcgacttgttttttagcatggacactgccagcaggacagacagggatggagtaaaccgaagccaatttcagggctcttggcgtgttggacacagaagaaatcctagtgcagcctttggtagctaacagtcactgattttataattggagaatgcgtaaagattcatttttcaaggagaagagcctgcaaatggccaatgaaggaggtaaataaactaagatattccgagggaagggacccaggccacctcccttccgcaggtctgcagatgaagggttttttgaatgaaatgccactgtgcattttcagaaaaaaaaatctctgataaacagactttgaatggatgtttgttcctcctgattctcttttctcttcgtggcgacttagagttggcggatattcggaactgtgaatgtacatagcgttgagttaaactccttgtgtgtgagacagaacgcagcgggcccctggtggcctgggggccagacccgtgggcaggtggggcatgggccctggcctgcggggacctgctggggtgtgagggcagagggagggttgccatgaaggaacttgggattttcaatggaataaataaaacataaagtctatacttggg

SEQ ID NO: 767 - DNA, 1991 bp, Homo sapiens
aggtctatcaggaaacctgagaattggagtgagaatcccagtgtggaaaatcaggaaagaggctggtatgagcgacagagaagtcattcaggaaagaggttattgaattcattggagaatgaatgctgttctaaatttgtttacctcaacaaatagcttacacctccaatcctgtcttggcgtgccctgctcagaagacacaagacacaccaggagtgacgtgaggaaacaggcagtaaagataagcctttgcgactgggttactcagaccctccctgacaaggaggagcccatcttgagtgtcccaggagacctggaccttgtggacatcctgcagaatggcatatggatccattacaatgatgacatcatgctgactgggcaagatgacaagaggttgctatacaccagagggcttgggaagacacatgccctgcagaagaaaaacctgctcctgattacaaggatatgtcgattgcagggaggcagaggaagaaatacaacaggatgtctatcgaacacaactttggagtaagaccttgggacccaactcctgtttgcttcatatacaagctttgagacgtgatgagtttgcctcgattctctaagcctcagtttcctcatctgttgttgtgagggaaataatgcatggaaagcttttaacacaatggctggcacacagtgaaagtgcaagacgttaaccattatcatgagagttttcaattggaatgaataggagacttaaatttgcatgattgtacttttacactaagccattaatgatgcattcatttagttttctactcccaaagaacatagatttgattaattataacaagaatttaaaaatatttccattattcagaaataacctacagagtctaagcctgtcctttccttcctccctttttcccaatctttttttttttttttttttttttttttgaaagaaatagcaattatgtagtcagattcactggctctttcttcttctccctggtaacaggctaagtcttaaccttgattaggcagcatcgcatctgatctaagttcttcccagctttcagcccagcctgcttccccaggcttcagagcgcagctctgcaccaccctctccacccctgcttagcatcagaacattgccaaagctaagcatctatgcaatgtttcttttgaatagttgtctacctacttggatatttttttccttctcccagaggcaaaaattggaccacttaatctatgctgtaggacagtcttgcccctcagaaaatacttgagcatattaagttgttatgaaatggatctgagaagcagagttctgaaccatgcccgtgaatttcccagcctcatcacactggcattctttcatagccccgaaatactttccacttgcccttcctatgaatgcaagtaaagcaaagcctcttgacaaagcaaattaagagtaatcaatggtttgggtttttttttttaattattatttcctgtgactcaaatcaaacctatttctcaactgtaacgtacgaaaagagagagatcaagttgacatttaggaaaattgaacattgataagtaaattgccttcactcagtctcttaggtcctctctcctttccccctaccccacgacaccccgtggccctgctctctctcacacacacagctgaaggtatctttaaagggtacctatttcctgcagatcacgcttatgttaatctcacttcaagtacagatgcaccgaggacattacagggtcagtcattcttatccacaaagctttagattccactacattattcaaactggacaatggacttccccattttgtgcccagacttgctcactaatagagtgacctccttgttatgggtgaggatatatttgatgctaaaactgctacaaatttttatcagcatttaatcttgagactgtgaattactacatcctgcatgtgttggtaccttactttgattaaaaatgggataaatc

SEQ ID NO: 768 - DNA, 2136 bp, Homo sapiens
aaagtcccgcccccctctcctcgctgcttaggctccgcggcctccaagctgtagctatgacggcgcgcgggactccgagccgcttcttggccagcgttctccacaacggactgggtcgctatgtgcagcagctgcagcgtctgagcttcagcgtcagccgcgacggcgcctcgtctcgcggcgccagggagttcgtggagcgggaggtgatcgacttcgcccgacggaatccaggggtcgtaatatatgtaaactcgcgtccgtgctgcgtgcccagagtagtggccgaataccttaacggggctgtgcgcgaggagagcatccactgcaagtcggtcgaggagatctcgacgctggtgcagaagctggccgaccagtcgggcttggacgtgatccgcatccgcaagcccttccacaccgacaaccctagcatccagggccagtggcaccccttcaccaacaagccgaccacgttccgcgggctacgcccccgagaggttcaggatcctgccccagcccaggacactggcctgagactgtctgcagttgcaccgcagatcctcctgcccggctggcccgacccaccagacctccccacagtggatcctatctcatcctcattgacctctgctccagcccctatgctgtccgcagtttcttgcctcccgattgtccctgcactgaccactgtgtgctcagcgtgaaggctgcatagaagtgtgtacggcttgaggtttcagcatccaggctgcagaccccacgcagtgtctcatacagtggaatgtggcagatgagacgggctttcaggaaggaagtccacttcttctgcaggatcttcttccctcccaggtctccctggggaggtagaggcacgggataaggggccagggtcagaggtccagcctctatacccgtgccccaacgtcagcccaatccaccttgcagacacgagccacacgggccacacggtgactgctgcggctctgagtgaagctgccagagccctcctcagtggcacgctccgtgaagaagtagtacaccttgtcatcatcacccactgcactggccttgctctcccgcacgaggacggagaacacaaactccgcatctgtgggtcaggcagtttgagaggcttttgagacaggctggggattcctttcccccactctgaggctgacccctcacttgacaacacacaggaatggaatggacaggctcacctggggatttgggggtggggtggtcagctggccaagggagtaaaaatgaagaaatagtcccctaccccccatcatcctgtgcctcatcctcctaaccattgagccaatgcattggtgtctcctcagttctcagggagtgtgggtggcggctccggcggatgtcaggaatgctccggaattcatacctagtggctgtgtagaggcctccatctggcgtggggatattccaggcatgagagacatgtcatattcaacagggcacatgacatatacatggtggcaggtcctagagatgagatccacatcctaaaaataccatgtctgtgatagggaagaaggcctgctcaccaatgatgaggcctgtgaagccacgggctgggtcataaggacacttctccttcccctcctcgaagctggttggcaaggtgaaggcctcagcatcctagggaacaaggaaccagcagtaagcggttccgaagacaggcagggacagtggctcaaagtcagatcagtctggggtcagggatcagcgatcagggataggggcaggttgtatggcagatgcacctgacagcaataacttaagcatcccctgagaatgaccttatggcctcaaaacaatgtatgtttggagttccaaatctgcaagtggccaacctagagattcactccttatctatgaagaacatctgagcccctagcccatcctgtggaacacatgctgtccaggggatcaaggccctttgttttgggttaaatgaagtttgccaggtggaggtgattagggggaggatgctaagtgaaaatgctataaaaactgcatggtttttacaaaggggaatggttctccagtgcagcccgccgccactggagtgccctgtatggaagtccccttaataaaccatccgtctccttc

SEQ ID NO: 769 - DNA, 2156 bp, Homo sapiens
tttatgtacataggagaattcatactggagagaaaccctacacatgtgaagaatgtggcaaaacctttagacagtccgcaaacctttatgtacataggagaattcatactggagagaaaccttacaaatgtgaagagtgtggcaaagcctttggacggtacacagacctgaatcaacacaagaaaattcatactggagagaaactttacaaatgtgaagagtgtggcaaagactttgtatggtacacggacctgaatcaacagaagaaaatttacactggggagaaaccttacaaatgtgaagagtgtggcaaagcctttgccccatcaacagacctgaatcaacacacgaaaactcttactggagagcaaagttacaaatgtgaagagtgtggcaaagcctttggatggtccatagccctgaatcaacacaagaaaattcatactggagaaaaaccttacaaatgtgaagagtgtggcaaagcctttagtaggtcaagaaaccttactacacataggagagttcacactagggagaaaccctacaaatgtgaagatcgtggcagatcctttggatggtccacaaacctgaacgaatataagaaaattcatactggagataaactctacaaatgtaaagaatgtgggaaagtgtttaaacagtcctcacacctgaatagacatgagaaaattcatactggaaagaaaccctacaaatgtaaggaatgtggcaaagtcattacgtcatcctcaagctttgctaaacataagaggattcatacaggtgagaaaccctttaaatgtttagaatgtggtaaagcgtttactagttccacaacccttactaaacataggagaattcatactggagagaaaccctacacatgtgaagaatgtggcaaagcctttagacagtcagcaatcctttatgtacataggagaattcatactggagagaaaccctacacatgtggagaatgtggcaaaacctttagacagtctgcaaatctttatgcgcataagaaaattcatactggagagaaaccctacacgtgtggagactgtggcaaaacctttagacagtctgcaaatctttatgcacataagaaaattcatactggagataaaaccatacaagtgtaaagaatgtggcaaagcctttaagtcatactacagcattcttaaacataagagaactcataccaggggaatgtcttacgaaggtgacgaatgtcgcggtctttaaatgctcctcaatcctttctaatcataagataattcataatgaagagaaactctaaaatgtgaaaaatgtgagaaggcttttaatcacacctcaatctgttgtagacataagagtaattatattgatgagaagccaaattaaaattaaaaatgtggcaaagacttccaattctagtcagttcttaatgtaattcctactgaagaaaacacctggaaatacaaaaaatgtggcaaaacttgtaaccaatgcttagcatttttgcacatgatagtatttatatgtgagactacttgtacaaacataaaaatatacaaaagctattgtctacttgaaatttatagttaataaaagcattataaatgtaatttctgttgaaagaccttttagaaaatataggccattaaagtgaatagtcttaagacagagaatacaaagataaagagggctctagtacctgtacttgtatcccagaacttactatatgcattttgtactagaggaaaactctgaagcagttgcttaaactttgttcaacatcagagaatttatattggagagaaatcctacaaatgtaataaatgtggaaaaacctctgttcagaaactgcaggttaagaaaccagaggccaggcgcggtggctcacgcctgtaatcccaacactttgggaggccaaggagggtggatcacctgaggtcgggagttcaaggacagcctgaccaatatggagaaacctcgtctgtactaaaaatacaaaaattagcaggacatggtggtgcatggctgtaatcccagctactcaggaggctgagacaggagaatggcttgaacccaggaggtggaggttgcggtgagctgagatcgtgccattgcactccagcctgggtaacaagagtgaaactctgtctcaaaac

SEQ ID NO: 770 - DNA, 2168 bp, Homo sapiens
tgggctcacagcgaaggcagcctcgccgcgagctgccgctgccgctgctgccgccactggtgttgccgctctcaggcgccaggctccccgtcgccgccgccgccgcctcgccagccagagttgggctccgtgggcttcccccctcgcagcctcggtccttccccgctgcctgcaagtcagcctggctccgagtcacgtgtcagtgcctgaggcagagactgcgagaaaaaaacgcgcttcattccttcttccaccgccatactgtattttatactaaatctcatttttattccaacattttactcccgctcgatatagcccttggcgaggtgcctggctccatagattaaagcaaggagagccaatcatgactggcaaaacacagaccagcaacgtcaccaataagaatgaccccaagtccatcaactcccgtgttttcatcggcaatctaaatacggcaattgtcaagaaagttgacattgaagccattttttcaaagtatggaaaaatagttggatgttccgttcacaaaggttatgcatttgtacagtacatgagtgagcgacatgcaagagctgcagtggctggagaaaatgccagagtcatcgccggccaaccacttgatatcaacatggcaggagagcccaaaccatacagaccaaaacctggaaacaagaggcccctttctgcactttacagacttgaatcaaaggaacctttcctgtctgttggcggttatgtctttgactatgattactacagagatgatttctacaatcggttatttgattaccacgggcgtgtgcctccacctccccgtgcagtaattccgctgaagcgtcccagagtggcagtcacaacgactcgcagggggaaaggagtcttttccatgaaaggtggatcgagatctactgccagtgggtcaacaggttctaaattgaaatcagatgagttacagaccatcaagaaagaattaacccagatcaaaactaaaattgactccttgctagggcgcctggagaagattgagaaacagcagaaggcggaggcagaagctcagaagaagcaattggaagagagtctagtgctgatccaagaggaatgtgtgtcagagattgcagatcactctacagaggagcctgctgaaggagggccagatgccgatggagaagagatgacagatgggatagaggaggacttcgatgaagatgggggtcatgagctgtttctacagataaagtgatctgaaataacgcatgatgccacaaagcagaaaagagaaactgtgacaacccccagaaatgtgaaaggaggtttcttactggacagcagcatctttggttcaatttatataaaaacccaaataaataaaatggacagtattgctcagttttagaaattccatttcttctatgttttaagctgtacaattgtcaggtttttatggtttaaattgtaaatgtgttttcccctttgctaattatgttttttttttcagtcttaaaatgtgaaaggcatttatgaatggtaagggaaacactatatacaaatgtatatttgtaaaagctatttttatgattagcatgtttcactgttgatcatatataaagtcaggtgatattgcaattctgtatttaaagcttatttccaacaatgtcatgtaagaaaagatgcatcttatgctagtttttataatttatttataatttatagtttaaagtacttcagatcataatgataaaatacttgaaaaagttatatttctgccctgtataagcaccctttttattaataaagaatgcagatatttcagatgtgatataatagttaaagaactgttggtttgatctgtgattaagttgagcatgctccgctctactgaactaaatgatccaattattacttcagtctgggtatgagattccatggacaagtaaggactagattgccaaggaaaagactgtcttgcccttggatccaaaagtttaaattagtgcatacatcatgtcatttcacctcctgttcctaggaactctccattcccaagcattgccagtgttttccagataatcttagctgttgtcttgtgctgtggaaatggaagaaaccatcttcacagactgtaggagaattcaacatataatttcttaataaatactgtttctttt

SEQ ID NO: 771 - DNA, 2137 bp, Homo sapiens
aaaaaaggccgcgctgtactgcggcttgtgccgcttccgcaagaaggtttcctggcctgttgcagccatggtgcattgcagttgcgtgttgttcagaaagtacggaaatttcatcgataagctaagactcttcaccaggggaggatccggtggaatgggttatcctcgtttaggtggagaaggtggaaaaggtggtgatgtctgggttgtagcccagaacagaatgactttaaaacaacttaaagacaggtatcctcggaaacggtttgtggctggagtaggagcaaacagcaaaattagtgcactgaaaggctccaaaggaaaagactgggaaatccctgtgcctgtgggtatttcagtaactgatgaaaatggtaaaattataggagaactcaataaagaaaatgacagaattttggtagctcaaggaggtcttggtggtaaattacttacaaatttcttaccattgaaaggccagaaacgaataattcaccttgatctaaaacttatagctgatgtaggcctagtaggattcccaaatgctggaaaatcctctttgctaagttgtgtttctcatgcaaaacctgcaattgcagattacgcatttacaacattaaagcctgaacttggaaagataatgtacagtgatttcaaacagatatcagtagctgatcttccgggtttaatagaaggagcacatatgaacaaaggaatgggccacaaattcctcaagcatatagaaagaactagacaactactttttgttgttgatatttctggatttcagctttcttctcacactcaatacaggacagcttttgaaaccataatactgcttacaaaagagttggaattgtacaaagaggaacttcagacaaaacctgcactcttggcagttaataaaatggacttgccagatgcccaagataagttccatgaattgatgagccagctccagaatcctaaagattttctgcatttatttgaaaaaaacatgattccagagaggactgtagagttccaacatatcatccccatatctgcagttactggagaaggaatcgaagaattaaagaattgtataagaaagtcactggatgaacaggccaaccaggaaaatgatgcacttcataagaaacagttgcttaatttgtggatttctgatacaatgtcttctactgagccaccatcaaagcatgctgttactacttccaaaatggatataatttaaatatattaaaaatggtattgatggaacagtatttaatgcttaaaaacaaggaaatcctttcatctgtgacaacctggaggacatgttaagtaaaataagccaggcttagaaagacaaatgctgcataatctcactgtggaatcttaagttgaactcatagaaggagagaatagaatggtggttatcaagggctggtggggcagtggaggattgaggagatattggtcaaaatttacaaaatttcagttagacaaggcaactgagttcaagagatctgttgtacagcttggtgactgtaattaacaacaatgtattttgaaagtcactgagtaaattttaagtggtttttccaaaaaagcacataaggtaatgcacgttaattagctatattgagccattccacaatgtatagatatttcaaaacatgttacacatgataaatccagtttttctacgtcattttttaaaattatatttaatttttttattttgaaagttttttcacagatcttttttttagtattattaccttctgatatatgtgtcattattgaagaaccataccttttaaagttattattttgtaattaagtatgtcaacagtaaaaaataaccagtggccaggcatggtggctcatgcctgtaatcccagcacttttcggaggccgaggagggcagatcacttgaggtcaggagttcaagaccagcctggccaacatggcgaaaccccgtctctactaaaaatataaaaaattagccaggcatagtggcgcatgcctgttgtagccccagctactcaagaggctgaggcaggagaattgcttgaacgcgggaggtggaggatacaatgaacccgaggtcgcgccactgcacttcagcctgggtgacagagctagactccatctc

SEQ ID NO: 772 - DNA, 1964 bp, Homo sapiens
caagtcatcccttagatgccatcgtagacttcatactggaataaaaccttacaagtgtaatgagtgtggcaagatgtttggtcaaaattcaaccctagtaattcataaggcaattcatactggagagaaaccttacaagagtaatgaatgtggcaaggcttttaatcaacaatcacacctttcacgtcatcatagacttcatactggagagaaaccttacaagtgtaatgactgtggtaaggcttttattcatcagtcaagccttgcacgtcatcatagacttcatactggagagaagtcttacaaatgtgaagaatgtgacagagttttcagtcagaaatcaaaccttgagagacacaagataattcatactggagagaaaccttacaagtgtaatgagtgtcacaagaccttcagtcacaggtcatctcttccatgccatcgtagacttcatagtggtgagaaaccttacaagtgtaatgaatgtgggaagacttttaatgtacagtcacacctttcacgtcatcatagacttcatactggagagaaaccttacaaatgtaaggtttgtgacaaggctttcatgtgccattcttatctggcaaaccatactagaattcatagcggagagaaaccttacaagtgtaatgagtgtggtaaggctcacaatcacttgattgattcatcagtcaagccttgcatgtcatcatagacttcatactggagagaaaccttacaaatgtgaagcatgtgacaaagttttcagtcacagatcacgccttaaaagacataggagaattcatactggagagaaaccttacaagtgtaatgagtgtggcaaagcctttagtgaccagtcaacacttaccatcaggccattcatggtgtagggaaacttgactaatgtaatgattgtcacaaagtcttcagtaacgctacaacgattgcaaatcattggagaatccataatgaagagagatcttccgagtgtaataaatgtggcaaatttttcagacatcgttcataccttgcagttcatcagtgaactcatactggagagaaaccttacaaatgtcatgactgtggcaaggtcttcagtcaagcttcatcctatgcaaaacataggagaattcatgcaggagagaaatgtcacaagtgtgatgagtgtggcaaagcctttacttcatgttcacacctcattagacatcagagaatccctactggagagaaatcttacaaatgtcatcagtgtggcaaggtcttcagtccgaggtcactccttgcagaacatgagaaaattcatttttgagataactgttcccaatgcagtgagtatagcaaaccatcaagcattaattgacattggagtcaattcagcattgacttgagtttgtgttgacttaacattgagttcaagccttaattgacatgcaagtgtttatgataagaggattgggccaggtgcagtggatcacgcctgtaatcccagcacattgggaggccaaggcacataggtcacttgaggtcaagagtttgaaacaagcatggccaagagatgtgagccagttttcccagcttgtttattattattttttgagatggagtgttgctcttgctgcccactgcactccaggctgggcgacagagtgagagtctgtctcaaaaaaaaaaaaaaaaagatatcaaacccggggtgtctcatcccacagcactttggaagactgaagtgagtggatcatctaagatcagagttcaagagcaccctggctaacatggtgaaaccccatctctactaaaaatacaaaagttagccaggggtgggggtgtgcacctttagttccagctacttgggacactgaggcatgagaatcacttaaacctgggaggtagaggttgcagcgaatcaaaaccgtgccactgtactgcagcgaggttggcagagtgagtctccatctcaaacaaac

SEQ ID NO: 773 - DNA, 2043 bp, Homo sapiens
ataaacaatggctatatttgcttgtcatcagggggcttaccaatgcctggaacctcccccaggttcctcacaaagagaagggccaaggccgggtgcagtggttcacgcctgtattcccagcattttgggaggctgaggcaggaggatcacttgagccaaggagttcaagaccaacttgggcaacatagcaagaccccatctctacaaaaatttaaaaaattacaataaaggcgaatctcatcgatgggattctgccatactgatggggccgtgtttgctgatggtgggcaaacatgttaccaagttaaacgcctccacaggtggcttccctttctccctggcttacacctcctgctccttcctgcaggtcatgggatggcaggatgcttgtctccaggtgtggcctgaagggaaaagtgtggacagtttggtgtgatcaaggaaatggaaccacgcttaccagttgcccttgtccaggaagggctggctcccttaggacgcccacatggagcatgaggttgggccaggcacccccagaggtccccgccttggcaggttctgttttacctgttgaacgagacactgtatggggaagtgacatgcgcagtgcctggcccagtgctgtgcacacacgctgcttcgcttcctcaggttccggggatgggatgggacagaaaagctggttgcttagctggtggcgttctccagcaaagcagaagggatggtcctggcagccctgtgccgagcactggaccccgcgccctccctggctctctcagccccaaggtcccattagttatcaaacctggttttttgtttttgttttgagacggagtcactccgtcacccaggctggagtgcagtggtgcgatcttggcttactgcagcctccacctcctgggctcaagtgatcctcccacttgagtgccaccacgcccagctagtttttgtatttttggtagagatggggtttcgccatgttgcccagcaggctgttctcaaactcctaagctcaagtgatcctcccgcctcagcctcccaaatttgctgggattccagggttttgaagccacagccaagacgacatggccttccattcctgaagccgaggaaggggagaaagccacaaccttcaccactctccaccctttctgtctgtgtgacttggctttcatcggagctgaatgacgggaccccagaggtgccgggtgacagccaggtgcagagcctcaactaccccagatggtaaagctttaaactgatccactggccaggtgaggcgactcatgcctggaatcccaacactttgggaggctgaggcgggtggattgcgtaagctgagttcaagaccagcctgggcaacgtggtggtgtgcacctgtagacctagctacctgggaggttaaggtgggaggattgcttgggccctggaggtcaaggctgcagtgagtcaagacagcgccactgcactccagcctgggtgacggagaccttgtctcaaacaaaacaaaacaaaacaaaacaaaacaaaacaaaacacaggaaaacctggatctgcttagcattggccctagggcagggagtgggttaccttccaccgtggattaactcagttcaactgataactactcctccaggcccccagcctgggacagccctggggacacagtcacccagtagcagcactgtgcccagcacaggtaagcactcaataatgacgacggttactaagtactccacccccaccaaacagtaggcagagactgtctctcctgttggccatcataaccccagtactcagtaggcgctgaatgtttggtgaatgagtaagtgaagggaaagctgaggcaccaaccctcagggagccctcagtctggtggatgtaaccaacaaccacagaactacagaactgtatactttagatacatgaattgtgtggtatgtgaattatatctcaaagccatttgaaaaaataccaaatgtgccattaagatttggatgggaagttatgggtaatgagaatataatgacatcttgcaacatt

SEQ ID NO: 774 - DNA, 2340 bp, Homo sapiens
gcttgtctcctgcgagagccgcgggggccgcggagctggagccggagctgaagccggagccgggttggagtctgggcgggggccgggccggagcgggctccagagacatggggtcgaccgactccaagctgaacttccggaaggcggtgatccagctcaccaccaagacgcagcccgtggaagccaccgatgatgccttttgggaccagttctgggcagacacagccacctcggtgcaggatgtgtttgcactggtgccggcagcagagatccgggccgtgcgggaagagtcaccctccaacttggccaccctgtgctacaaggtgagggctgcccagtccctcctgctactcttccaccctcccagcccacagcaggagaaggcaggcgcatccagggcctcccgccccacaggggcaggcagccctgtggcctcactcagctcttccacttctctgtggttctctttgctgggcgttgggaccacggcagccgtcatttatgggggagtcctccaggccacatctgactgagcaccttccacagatcagttcatttagctccctctgtggggtgggtactgccagggtcgccagtttacagatagggaaactgaggctgggagactcacttagcaaggcctcagccatccagtggctagctgggccctggctgtcctgatgctccaagctgctctggcctgtgtcccagtcccccaaggctggccgaccccaactccaggtggctcctctgcctgtggccccactgtctctcctctgcagcctgggtgccccccctgaccctcctctgcagcctgggtgcccaccctgaccccaagtgccagggtcctttccccaccttccagcctgccctctgctcctgcctgcccccacaggccgttgagaagctggtgcagggagctgagagtggctgccactcggagaaggagaagcagatcgtcctgaactgcagccggctgctcacccgcgtgctgccctacatctttgaggaccccgactggaggggcttcttctggtccacagtgcccggggcagggcgaggaggggtctgtgggcctggccagggctgggtgggaggcagagttggcggcacagggagagcgccctttagggccggccatgctcctccaagcctcttctgggatttgggaagtacaggggtggggccagtgggtgctgctgagggatggtgttcaatgccacctccttgggccctcagttcccctcccatgggggtttctgtgcccacagtctggaggaagtagggtatggagagaagctgagagccaggggtcactgggcagaggtggaggcagaggagctgggccctctgagggccggagagggaccacactgtcctctctcccccacaccacctgccctgggtttatgtccaggtgaggtgctgagggatgcaacacagtgattcctagcagggctgagactcttgatgttggggtcaccgcccggccccctccagtcagtaggggaggttccctcgctgttcccggcccggctccctgctgtgccccacttctgccttgggaggtttggggcaaccaggagtccacttcctgtcccttcattcctctgcccatgggtgcccgcctgggctcagcccctgtcctccaccacccccaagccctgggccacctcttcctggccagctatcactgaggcagcctgtgggtgctgtgtccccagcagggagaagaggatgatgagcatgccaggcccctggccgagtccctgctcctggccattgctgacctgctcttctgcccggacttcacggttcagagccaccggaggagcactgtggactcggcagaggacgtccactccctggacagctgtgaatacatctgggaggctggtgtgggcttcgctcactccccccagcctaactacatccacgatatgaaccggatggagctgctgaaactgctgctgacatgcttctccgaggccatgtacctgcccccagctccggaaagtggcagcaccaacccatgggttcagttcttttgttccacggagaacaggtgagggcccttggcctttctgcgctctcttccctcttattccaggcaatccagagctgagtccattcgccagctctgggtctcgtttgaggggaggtgctgccccctggtggtgatgaactttaacttaccagccacacctcacactagccccgtctctccttggagtcctcgacaggacagaatctgggggcccctcagtaatccgtccctgggtcctccatcaagagccgcctgtccagtagaaataggatgcaaaccacgagtgcaatttt

SEQ ID NO: 775 - DNA, 2916 bp, Homo sapiens
aggtgtagttcttagggggatggtggtgggacccgtgttggacgcgttgcatttgcagcgtctgtggagtgtgcaggatgcttgctgtatacttggctgcacaggggtgaagctcagggacaagtctgggctggagactcagcgtgtgtttggcaaccgaagccacgggagtgactacgataggccgggggagcgtgagtctctcggctgccgagaacagagatgacacatcttctcaccttcgttttttatttcccttaagcgcctgtcgtcatcacacaaaacgccctacgtcgacgctgccaaatattgcttttttattcctcacagctcctcccgtctttccgagactgcggacagagggagctcaacgccattccctgccgggggcggccctcgccgcggcgacgtcacggaagaggcgggatacggaggcggccgcggcgcgggctgcaggactgaccccgggctgcgcggccccaccccgggcggtccgctccgttcccgccggtccccgcagccgccgtcttaggccagctggagcaggccgcgctcggccagcaggctctgggtgcggttgtagacatcctccaaggtgccggcggcccggagcagcgcggcccgcgcctccgcctcggtggctccgggacacgccagctccagcaggcggcggcgacccgggaaggcgaggaaggcgaggcgggcggtctgtcggaccagccaggggtgatgcggacccagggccgcacggtaggcgtcgctgcactgcacgcccgcttccgggcctcccagcgcgccggtcgccacccggtggaggcagagctgggaccagcgcagcgcgcggtgcagcaggagcagcgtgcgagagcccgagctccgggtcgggtcccggggggccgcccccggctgctccagcagtcccgccctccgctcccacgccgccatggccgccagcgaccagtagtgctccgcgtccgggccgtgcacccgagcctccaggtctgtcaccttggtgaaggcctccctagtggcgaaggcgaagacggagccgaggggagtcaggaatctgcgggcgagacgatttgagagaatggagatggagccgccaaggaggcggggaccggctggggggcgggaggccactcactcgacgagtgccctccatcccgccaggtacggcgacagccccacatccccttcgggtttcagactggcgtggaaccgcctcatcatgcggcccagcatcccccgagggcccagacacggaggctgtttcctctccggggcctccagggttcccgactcctgccggacctggtggggagacacgatgggaagaggtgggagcagattctgccctgaagaaattgttccgaaggtttagctggcggctcttctgctgtgcgctcagcttccgacgggagagggtagaccgggggaggacccgccctttgccggaccctcagcctggctccacgtccccctgttctggtccctcctggagcgcccgcgcccaatcctgcgcctagcgtacctggaagggcgccgtttcccctggaacgcagggctgcgccctgggtccgcagcccgagcgggcgcctgggtagaggagaagcggagcggtgagggctcgagaaagaggcttgagtcgtgagggcctggattccgggcttcctcccggagcaagtgagggaaggggcagctcacctaggctccgaacactgagataaagcagcagcagcgcgaagatagcgagaggaattgagtggctgaaccagtgccgcagggctgggggccgcgccgccactcccatgcctgctgctgggaccgccgccccctcaccagcgcctagccagtccgtgtccctccgcctccaggaggggacagaagcccgtggtgccctgaggcgcaaaggattaataattaacctactaaggccccttcccctgtgcccttcgccccaaagggcagctaccctgggtgcgaggaactgggtgaagggaatttgggggattcgacagcagtgacagatcagtgcatttcccttccctgtagggccagctgtagcaagaggcactctgagtattgggaagagaggcagggcccagaacagctcccctactgagcagtggtgtgggccctaaattcactctgggcttgagttccctccactgtaaattgaggataataataggtactttgcaagcctcatgtgaggattaaatgataacgtatgtgaaaacactaaatggaaaagctgaccacaattgccctataaatcttattaagttcaagcattgtccggctctgggatccagggaacacccacttctctctcgctctctttttttgtttgtttgttttttgtttttttgttttttgagacttcgtctcaaaacaaacaaacaaacaaacaaacaaaaaacatacttagccagattttctcgctttttgttttgcaaattaggagtccatctggtggtcacagggggaaaggcattccaggaaaggatataaggatacagaaagcaatggaagaaacagcatgatcttttcttaggggttcttagtctcctgtccccaaacttcttagagttattcctgttggaccgggcgcggtggctcatgcctgtaatcccagcactttgggaggccgaggcaggcggatcacaaggtcaagagatagagaccatcctggccaacacggtgaaacccggtctctactaaaaatacaaaaattagcggggcggcgtcttggcgcgcgcctgtagtcccagctactcgggaggctgaggcaggagaatcgcttgaacccaggaggtggaggtagcagtgagccgagatcgcgccactgcgatgccgccactgggcgacagagtgagacttcgactcaaaaaataaaaataaaaaagaatt

SEQ ID NO: 776 - DNA, 2470 bp, Homo sapiens
atgcgctcgcccctctactcctccacgccccggcccttgggtccggctcggaagcagccccggaaacgacggcatttgttggggaaacaagaccggaattgaccaagaacaggaagaggaggggccaggcctgcaattcccagaatgctcgagggctaaccgacagccaggctggcttcccgtggtctcagcgccacctgccggaagccgcgagaacagcggccgcctcaggcaggaagtgcgtcatctcgcacggaggacgaatgccgttcccggcacttccggtcctgaccggaagcggtaaccgtcactccttctgggctctgtcagtgcaccgaggcggggctccccaggatcccacggtcccgctcaggccagacgcagaggcagtcccagcccgcgatgaggacgtggggtcgtgaccgctgggccacggtgaagggggcagccctgctggacccgctagctgggccgacgctttcccacccctaggggtttgctgggccctggccgcaaacttgtggggcgccgtcctcggggccactgcccggccaccctcacacccttgggccctcagctctggtgcattggtccgggctccgggaggcactgagacgtccccctagggcgctgcagggaagcgagggccaggcccttccaggtccccggtcctcccgggcaggatggaggctgctgaacgctcctcaagcttccaagtcagccgtggctgggcgggcggcagcagggagggtttgggctccgccatgcttgcgagccagcagcctggcctcgcctgtccgcagcagagggcaggtcagctgcccgccctgaaagggaggaccagggcccagattctccctgcgacaagccgcgtcttccttggccactgggccctagatggttggcaccttgtgccccttctcagctgggagagttcctgccccacacactcaaggattctgagttctccttggctgctagacctctggtccctctgaaaggctcgagagagaactcccccagggcctgctgtcctggcatccgctgggaaataggattcaaggacctgctgtggctcagcctagaaaaaaggaggggaagcaggacccactcctcggcccccggtctgctgtgcgcctttgggattccttatttcttaaactgctcttccctccccacagggaacacagcggaaagtagagagggggctccttggaccattatgttctcccaaccagtgcaggcttgcaagttgggagcagcaggggaggagggcctgctgagagactctgtaaccccctaaaatgcagggctggggacagtttccaaattggcctgcaaagaggctgctgggagccctagatatgaattcccaggcactcatttcctccagggaacagtgaaatgtgccagcacccccctccccacaactagggaaaagtagcctaacccagagcaagccccaccccacgatgtggggaaagataggagagtctagaccaagcccactggctggaggtgctcagacaaagggaaaaggacgggggagtgcaggggctccttagccccacagcctgtctgcccccaaccaccgctcgctggtgggctgggggggctccctagtaggatgaggtctttcttcccctccagaccctctgagatgtggctcaggcctgagccatcagctcctcaaaggaacatttacaggtaacagatgggcagggcagagaccctcaaatgctcgggagggggcagtgtgtccatcctttaccatccctcaggaggaagaggagtcctgcagcgcacccagcccctaccccaagcccatctcactgcattccctggctgcccgacccctcctgcccacctgcttacactgtgtgccccttgtgtgcccaaggggcagggtggaagtggctgcaggcaacacagggcctctcccaaaagagaatagagagaacgctcccaaaaagggcccttgctacctggagttgctccctggtttaaacccaaagtaaaattctaagcaaccccaaccaactgaatgggcacctcttggccaaatgcattctaaagtaaacctgaaaagctcgttgaggccatgatgactgtgggtggccgaacatgcctcataggcacagctgaccagcattcacattaaaacagagaccttagtccggtgtggtggctcacacctgtaatcccaaaacctggtgtgtcacgtgaggtcaggagttcgagactagcctggccaccgtggcgaaacaccgtctctactaaaaatacaaaattagctgggtggggtggtgcatgcctgttgtcccagctactcaggaggctgaggcaggagaatcgcttgaacctgggaggtggaggggaggctgcagtgagctgagatcacgccattgcactccaacctgggtgacaagagcaaaactctgtctaaaaataaaaagaccttaagactcac

SEQ ID NO: 777 - DNA, 3126 bp, Homo sapiens
ccttcttggttctgtctctaagtgtatggtatgtggaaaggtatttcttttgtgtattgctgtggatttgttaaaccctctaatggtttttcagtggattcatttggatttcctaggtggaaaatcttactgcatgcaaataacaattttatattatcctttttattatttatatgtctgttttcatttcatggcttgttgtctagctagaaagtccagtgtacttgttggttgtagtagtgacaatggggaatcctttttctattattggttgttaatacaacaccactgttctggtgttttagtcaggattacacatgagtttgtcatagtcatgccaagttactgatatgcaagttagagcactcacagggaaagaacaggaccctgaaacttggaatgagaacacctgctcagattcggatgaaactggcaaatcactttaaagctcccttggcagcggaagtaccctgccctcctgtgtctgaggacaccgcacttcctttgcctgaagatcctgtgataacttcatctgggaggatgccttggaaagggttgctcgctcttcagacctggtacagtcacccctgtgataacttcatctgggagggtgccttggaaagggttgcttgctcttcagacctggtacagtcacccctgtgataacttcatctgggaggatgcctgggaaaggggtcactcttcagacctggtacagtcaccacccctgtgatgacttcatctgggaggatgcctgggaaagggttgctcgctcttcagacctggtacagtcaccacccctgtgataacttcatctgggagggtgccttggaaagggttgctcttcagacctggtacagtcaccacccctgtgataacttcatctgggagggtgccttggaaagggttgcttgctcttcagacctggtacagtcacccctgtgataacttcatctgggaggatgcctgggaaaggggtcactcttcagacgtggtacagtcacccctgtgataacttcatctgggagggtgccttggaaagggttgctcttcagacctggtacagtcacccctgtgataacttcatctgggaggatgcctgggaaaggggtcactcttcagacgtggtacagtcacccctgtgataacttcatctgggaggatgccttggaaagggttgctcttcagacctggtacagtcacccctgtgataacttcatctgggaggatgcctgggaaaggggtcactcttcagacctggtacattcacccctgtgataacttcatctgggagggtgccttggaaagggatcgctcttcagacctggtacagtcacccctgtgataacttcatctgggaggatgccttggaaagggctcactgttcagacctggtacagtcacccctgtgataacttcatctgggaggatgccttggaaagggttgctcgctcttcacacctggtacagtcaccacccctgtgataacttcatctgggaggatgcctgggaaagggttgctcttcagacctggtacagtcacccctgtgataacttcatctgggaggatgcctgggaaaggggtcactcttcagacgtggtacagtcacccctgtgataacttcatctgggagggtgccttggaaagggttgctcttcagacctggtacagtcacccctgtgataacttcatctgggaggatgccttggaaagggttgctcttcagacctggtacagtcacccctgtgataacttcatctgggaggatgccttggaaacggctcactcttcagacctggtacagtcacccctgttgtcgctggatccataactagggtcaaatcttagcatgttacagtgggacataaaactcagataactaactcagaaggaaatcacttacacaccaaaagaatggtaagattttgctaataaatattggaagaaacctgggaaacatgtcgagttgattctaagagtgttagatccaacagggtaggctatcacactccatttgtttaattcattgatatagatgcacttaccggagagtctggatttcatggtttagcttgagcagcaggaggtgactcaacatttgcctacatttgatgaggtggagatgtcagagcttccctgctatgatttgggggagagaatccaaagatgtagggagacaggaatgtcacagtggatttatcatgtttgacttacacgtctaccaccaagcacccattcctaaccatgagaaggcccagaagacacttctttactaagacattgagaaatagaatagtgaggggagcatctgcctctctaaaagctctgtgcttgctttcctacataggcaggtgtgaccctaaggatgttgtcattgagatgagcttcctggtatcagtggggtgatgggatcctgaagtgcctccggataattgggagcacttaattgtcagagataaggtgggcacatttaccacgaagggcggcagagatgtaatcagaatgcctttggccactgggattcttggcaatggctaatgaatgatggtatctctaggaacaaaattgttgggctgcctactcaagtataacagaaaaaaattctgggtctggtagccagaaacctgatttgaatcaccacagcagagagtcacggcctctcccctagctcttaggactgagtcagttcacagccccagggcccctttatgaactggggtgtgagggtgtggggggatttcccccaaagaatgaactctgcagccctgctgcaagtacctactgtaagtctccctctaggccctactcagaagacctgtgctatttacagagtgactgtgcactggggaaagcaaactacccaggccttctgagatgactgaagcattggctctgaattgatgttcatgcacggggacccaaagtgacagcgtggccactagtcaaaatgggagattaatggtggttaggtgacagataccttactaaaagttttttttgttgttttgttttgttttcctaatctggatgcgtactcaattagggaaaaaaaaaaagaaaaacagtttttttgtccattgagttattttttctcctttaatatgttaataaagtagaatacattg

SEQ ID NO: 778 - DNA, 2666 bp, Homo sapiens
aatataatatgcaaggaagccacccttcttccacaagcaatgaagtaatagaaatggaattaccaatggaagattccactccgctggtcccttcagaagaaccaaatgaggaccctgaagccgaggtgaaaatcgaaggaaacacaaattcatccagtgttacaaattctgcagcaggtgttgaagatcttaacatcgttcaagtgactgttccagataatgagaaggaaagattatcaagcattgaaaagattaaacagctaagagaacaagttaatgacctctttagccgaaaatttggtgaagcaattggcgtggatttccctgtgaaagttccctacaggaagatcacattcaaccctggctgtgtggtgattgatggcatgcccccgggggtggtattcaaggcccccggctatctggaaatcagttccatgaggaggatcttggaggcagctgagtttatcaaattcacagtcatcaggccgcttccagggcttgagctcagtaatgtgggaaaacgcaagatagaccaggagggccgtgtgtttcaagaaaagtgggagagagcgtatttcttcgtggaagtacagaatattccaacatgtctcatatgcaaacaaagcatgtctgtgtccaaagaatataacctaagacgccactatcaaaccaatcacagcaagcattatgaccagtatacggaaagaatgcgtgacgagaagcttcacgagctgaaaaaagggctcaggaagtatctcttaggctcgtcagacaccgagtgtcccgagcaaaaacaagtgtttgcaaacccaagtccaacccagaaatcccccgtgcagcctgtagaggacctagctgggaacttatgggagaagttacgtgaaaaaatcaggtcttttgtggcatattctatcgcaatcgatgagatcacggatataaataataccacccagttggccatattcatccgtggtgtcgatgagaatttcgatgtgtccgaagaacttctggacacggtgcccatgacgggtacaaaatctggcaacgagatctttttgcgtgttgagaagagcctgaaaaagttctgtatcaactggtcgagattagtaagcgtggcctccactggcaccccagcgatggtggatgccaataacgggcttgtcacaaaactgaagtccagggtggcgacgttctgcaagggtgcggaactgaagtccatctgttgtataattcatccggaatcactctgtgctcagaagttgaagatggaccacgtcatggacgtggtagtgaagtccgtgaactggatatgctcccggggactgaaccacagcgagttcacaaccttgctctatgagctggacagccagtatggtagcctcctgtactacacggagattaagtggctcagtcgcgggctcgtgctaaagagatttttcgaatccttggaagaaatcgactccttcatgtcatccagagggaaacccctgcctcaactgagctccatagattggatccgagacctggccttcttggttgacatgacgatgcatctgaacgctttgaacgtctctctccaaggacactcccaaatcgtcacgcagatgtatgacctgatccgggcgttcctagcaaaactgtgcctctgggagactcatttgacgaggaataatctggcccactttcccaccctgaaattggtttccagaaatgaaagcgatggcctgaactacattcccaaaatcgcggaactcaagaccgaattccagaaaaggctgtctgatttcaaactctacgaaagcgaactgactctgttcagctccccgttctccacgaagatcgacagtgtgcacgaggagctccagatggaggttatcgacctgcaatgcaacacggtcctgaagacgaaatacgacaaggtgggaataccagaattctacaagtacctctggggtagctacccgaaatacaagcaccattgcgcaaagattctttccatgttcgggagcacctacatctgcgaacagctgttctccattatgaaactgagcaaaacaaaatactgctcccagttaaaggattcccagtgggattctgtacttcacatcgcaacgtgatggagagaaaactcctggcagggccctatggtgggaaaggctggagtcttctagtcccaagggattgggagatgacaaaatgaatttttttttttcttttttgagatggagtcttgctctgtcgcccaggttggagtgcagtggcgtgatctcggcttactgcaacttccagctcctgggttcgaacgattctcctgcctcagcctcccgagcagctgggactacaggcatgcgccaccatgcccggctaatttttgtattagtcggctgtggtagtgcaggggcttccggaaggcgttgcctttcaacaccctgagaattacgaccttgcaactcctgacctcaggtgatccacctgcctcgacctcacaaagtgctgggattacaggcatgaaccactgtgcccagctgacaaaatgagttcttaaactttttttttttttcagttttttttccactttgaatcagaaatataatctgcagtatcatacttgtttatattacattgtatgcctcactattcattaaaaatcaagaaagttttattgt

SEQ ID NO: 779 - DNA, 3344 bp, Homo sapiens
gtcattgcaatgcttttcattttttttttttgttattgtttcatttcagttccgtcttgctattcttcctaatctatatccatagatctaaggggcaaacagatactagttaactgcccccacctctgtctccctgtcttctttagatcggtctgattgattttaaaagtggacccaaacttagggaattcttgatttagggtggctggtggcaaggaggggcaggggatatggggacgtgactgggacaggttcctgccttatcattttctccctaggacattcccttgtagcccccagaattgtctggcccaaattgaatagaagcagaaaaacatttagggataacatcaggccagtagaattaagcctctccacctgtcccaaccataaaaagggtctcccagctttccatctctggctctatatgctttatcccaaaacaaagcagataacgttcagacgtcggccatttagtaatttaaagcgaatttccagcagcaagcatgctttgatatctggttcagactatcatcaggaagaaaaaaaaatcccacagtacctgaaatgtgattgttgcagtgttcagtttccttgggggcctgctcccttcacaccttgagcccaagtccttttccgttggctgattcagctcccagaagagacgaggaagtgtgtggcaagggactggaaaacttcacttgcttagattaggcaaggctccactcattgttgatatttgcccagcaggaaaatcatgtaagttataccaccagaaagcaaaaggagcatggtttggtggttaaggtttagtgggatgaaggacctgtcttggtgggccgggccctcttgtgccccgtaggctaggtcttagggcaactccttgccctcctgctcagcacctccatttccccatccttggtgagataacaagctatcgcgaaaagcacttgggagatttggatgatttgagaagagtgacttaaaaaaaatgcttctgtgctctaagatatatatgtgtgtgtgtgtgctacatatatatttttaagaaaggaccatctctttaggatatatttttaaattctttgaaacacataaccaaaatggtttgattcactgactgactttgaagctgcatctgccagttacaccccaaatggctttaatcccctctcgggtctggttgccttttgcagtttgggttgtggactcagctcctgtgaggggtctggttaggagagagccatttttaaggacagggagttttatagcccttttctactttcctcccctcctcccagtccttatcaatcttttttcctttttcctgaccccctccttctggaggcagttgggggctatccctgtttatgcctcactattggcagaaaagaccccatttaaaacccagagaacactggagggggatgctctagttggttctgtgtccattttcctctgtgccaaagacagacagacagaggctgagagaggctgttcctgaatcaaagcaatagccagctttcgacacatacctggctgtctgaggaggaaggcctcctggaaactgggagctaagggcgaggcccttcccttcagaggctcctgggggattagggtgtggtgtttgccaagccaaggggtagggagccgagaaattggtctgtcggctcctggttgcactttggggaaggagaggaagtttggggctccaggtagctccctgttgtgggactgctctgtcccctgcccctactgcagagatagcactgccgagttcccttcaggcctggcagacgggcagtgaggaggggcctcagttagctctcaagggtgccttcccctcctcccaacccagacataccctctgccaaactgggaaccagcagtgctagtaactacctcacagagccccagagggcctgcttgagccttcttgctccacaggagaagctggtgcctctaggcaaccccttcctcccacctctcatcaggggtgggggttctcctttcttccccctgaagtgtttatggggagatcctagtggctttgccattcaaaccactcgactgtttgcctgtttcttgaaaaccagtagaagggaaacagcacagcctgtcacagtaattgcaggaagattgaagaaaaatcctcatcaatgccaggggacataaaagccatttcccttccaaatactcgacaatttagatgcagaacatttctctgtattcagacttagagtaacaccagctgaaaactgcagtttctttcctttggatacataaggcttctctatcggggtacgggacagggaggaggcctcatgtctgaagggggatttaggggcgagagccccagccctgaccctcggtcctgtgcaccgctttggggcacagtctgatggcgcctttgctggcgccttagtatggttgactccggatggacaaaagaaaaaaaattttttttcttgaatgaaatagcaggaagctcctcgggagcatgtgttttgattaaccgcaggtgatggatgctacgagtataaatggattaactacctcaatccttacagtaagattggaactaagggcagggactcatgcataagggtatgaatcccagccaggacaagtgagttgaggcttgtgccacaaaaggtttgtccttggggaacaggcaggcctgccaggatcccccccatatcgattgggctgggagggctggccatgaggtccccactttctgctttccttgcccatgtgtcacccctttggcctccagcttgtccctctctcactttctatagctttgttggaccagatggtgaggaaaggaatggcctcttcccttctagagggggctggctggagtgagacctggggcttggcctggaacccaccacacagccccaaagtcaggaagcctggggaaaccagagctgagacctcttcaacagggtttctttgagatcctacacctccattgggccctttttcagtcttcaatgggggcccagttggctctagaaggagaagaggtgaagcaggatcctttgccctgggggagtctgagggcgcggtccttggactcattcaggccgtctttgtagttgggggagttccactgggcgatcccagcccctccccacccaccctctaatggacctcctcatagaagccccatttcacttttgttttatctacctcttagcaaaacaatagataaattaggtagtggcagctccacttgcttaggttagggggggaaaaagatttctttttccaaaggaaaaaaatattaccttgagaatactttccaaaaaataaaattaaaaaaaaaaaaaacc

SEQ ID NO: 780 - DNA, 2875 bp, Homo sapiens
cattgtctctcgctgacgccagagatccagctatcgtcttcactgctctgtgctgtcagctcctagaggcccagcctctgtggccctgtgacctgcaggtattaggagggtcacagctaggacgccgggaccccctggaagcctagaaatgggaccattgcaatttagagatgtggccatagaattctctctggaggagtggcattgcctggacgctgcacagcggaatctatatagggatgtgatgttagagaactacagaaacctgatcttccttggtattgttgtctctaaaccaaacctgatcacctgtctggagcaaggaaaaaaacctttaactatgaagaggcatgagatgattgccaaacccccagttatgtattctcattttgcccaagacctttggtcagagcagagcataaaagattctttccaaaaagtgatactaagaagatatgaaaaatgtagacatgacaatttacagttaaaaaaaggctgtgaaagtgtagatgagtgtccagtgcacaaaagaggttataatggacttaaacaatgtttggcaactacccagagaaaaatatttcaatgtgatgaatatgtgaaattcttgcataaattttcaaattcaaacaaacataagataagagatactggaaaaaaatcttttaaatgtatagaatatgggaaaacttttaaccagtcttcaacccgtactacatataagaaaattgatgctggagagaaacgctataaatgtgaagaatgtggtaaagcctataagcagtcctcacaccttactacacataagaaaattcatactggagagaaaccctacaaatgtgaagaatgtggcaaagcctataagcagtcctgtaaccttactacacataagataattcatactggagagaaaccctacagatgtagagaatgtggcaaagcttttaaccaccctgcaacccttttttcacataagaaaattcatactggagagaaaccatacaagtgtgataaatgtggcaaagcctttatttcatcctcaacccttactaaacatgagataattcatactggagagaaaccctacaaatgtgaggaatgtggcaaagcttttaaccgttcctcaaaccttactaaacataagagaattcatactggagatgtaccctacaaatgtgacgaatgtggcaaaacctttacctggtactcaagcctctctaaacataagagagctcatactggagagaaaccctacaagtgtgaagaatgtggcaaagcctttactgcattctcaactctaactgaacataagataattcatactggagagaaaccgtacaaatgtgaagaatgtggcaaagcttttaactggtcctcagcccttaataaacataagaaaattcatattagacagaaaccctgcatagtgaagaatgtggaaaatcttttaaatgttcctcaacccttaataagcataagataattcatactggagagaaaccgtatgaatgtgatgaatgtgggaaagcctttaactagccctggactctgactaaatatgagaatttatatggaacataaaccctacaaatataaagaatgtgacaaagctttttaaggaagttctcaacccttattacacataatttatactggacagaaaccctacaagtgtgaagaatatggcaaagcctataacaacctgtcaactctttttgttttttgagatggagtttcactcttgtcacccaggctggagtgcaatggcacgatctcagctcactgcaacttctgcctcctggtatcaagccattctcctgcctcagcctcccaagtagctgggattactggtgcccaccaccatgcccagctaatttttgtatttttagtagagatggggtttcatcatgtttgccagactggtctccaactcctgacctcagatggtccacccacctcggcatcctaaagtgctgagatgacaggcatgagccacgacgcccagccacaagttctcaattcttaagagacatggcgataattcatgctgaagaggaactctacaaacctgaaagatgcaacagtgcttttaccaccacctccaacttttgtatacataaaaataaattatactaatgtgaaaccctggaaatgtatgaaatgagacaaagcgtttatatggttgccacacttgattgtagatggagtctcggtctttcacccaggctggagcgctgtggcgcggtctcggctcactgcaacctccgcctcccgggttcacaccattctcctgcctcagcttcctgagtggctgggactgcaggcacccgccaccatgcccggctaatttttttgtatttttggtagagatggggtttcactgtgttggccgggatggtcaatctcctgaccttgtgatccgcccacctcggcctcccaaagtgctgggattgcaggcgtgagccaccgcacctggccattatgccactaactttaacctatcccaccttaatcaagggtgtacttaaaagatggtaacaatatactgtttggtacgtagtggaataacatctctactcgtcactttgccagtggctttaaactgcaaatgagttgaattgttcccatagcttaaattttttttcttattgaaatctattactagtatttgtgggtatacagtatgtgtatatctttatgccttatatggcatattttgattcaggcctacaatatgtagtaattacattagggtaaagtatccatcacctctagcatttatcctttgaattacagtgtaattatacatttttaattattttaaaatgtacaattaaattgttactgactacaggtttatttttatggtcataat

SEQ ID NO: 781 - DNA, 2629 bp, Homo sapiens
cccgtctcctcctcttgctccctcggccgggcggcggtgactgtgcaccgacgtcggcgcgggctgcaccgccgcgtccgcccgcccgccagcatggccaccaccgccacctgcacccgtttcaccgacgactaccagctcttcgaggagcttggcaagggatgataccctctttttaatctttccttccccgaccttcaactgttcctgctgagagaagggcagggtctctctgctcccttctgccctggttctcttggccgggaccgcagggctgtctgagatgcagcaggggtgctttctctgtggtccgcaggtgtgtgaagaaaacctccacgcaggagtacgcagcaaaaatcatcaataccaagaaattgtctgcccgggatcaccagaaactagaacgtgaggctcggatatgtcgacttctgaaacatccaaacatcgccactgtatacatcagattctggagagtgttaaccacatccaccagcatgacatcgtccacagggacctgaagcctgagaacctgctgctggcgagtaaatgcaagggtgccgccgtcaagctggctgattttggcctagccatcgaagtacagggagagcagcaggcttggtttggttttgctggcaccccaggttacttgtcccctgaggtcttgaggaaagatccctatggaaaacctgtggatatctgggcctgcggggtcatcctgtatatcctcctggtgggctatcctcccttctgggatgaggatcagcacaagctgtatcagcagatcaaggctggagcctatgatttcccatcaccagaatgggacacggtaactcctgaagccaagaacttgatcaaccagatgctgaccataaacccagcaaagcgcatcacggctgaccaggctctcaagcacccgtgggtctgtcaacgatccacggtggcatccatgatgcatcgtcaggagactgtggagtgtttacgcaagttcaatgcccggagaaaactgaagggtgccatcctcacgaccatgcttgtctccaggaacttctcagttggcaggcagagctccgcccccgcctcgcctgccgcgagcgccgccggcctggccgggcaagctgccaaaagcctattgaacaagaagtcggatggcggtgtcaagccacagagcaacaacaaaaacagtctcgtaagcccagcccaagagcccgcgcccttgcagacggccatggagccacaaaccactgtggtacacaacgctacagatgggatcaagggctccacagagagctgcaacaccaccacagaagatgaggacctcaaagctgccccgctccgcactgggaatggcagctcggtgcctgaaggacggagctcccgggacagaacagccccctctgcaggcatgcagccccagccttctctctgctcctcagccattacgtctgtgctggaggatgcctttgtctgctgcttttcctcccaccatctatccttgcagagtttctaagcacaaccctcttcgcccgtggggccccagtcaggtcatccagatgggtctggtggggttggagagggtgtgtgtgttgtgggtgcacacctgcctgctgcttttggaagccgatcgaactccttgcttcccttaacctgctgcttgctcacctggagctgtggcctagcggggctgacggctgtggggccccctcctggatgtgcctttggctgcgctgccctgtcccaactgtgctgcttggctgtgctggcccggctgggccgtggtggtgctgttctaacgcttgcagttgtcttgcagccttttgctcctgtgaggaaagggttgtggcctggccccgcccagggctcgggttaggatgagcccaagctcaacccaagctctcccttaccctggtggcagcccctgctggtagtggcattccctataagagaagcccatgccggcaggacatcaccagctgtcccttggctttggatgggttggggaggaggcctctggagggcaccacctctgcctgcctgtcagtctgagccctgtctggttttcctgaggaacacgtcctggcaatgagagctggtgtgaaatgtgcagctttcccaagcctcgagagtgcgaaaacaggagatcattaagattacagaacagctgattgaagccatcaacaatggggactttgaggcctacacgaagatttgtgatccaggcctcacttcctttgagcctgaggcccttggtaacctcgtggaggggatggatttccataagttttactttgagaatctcctgtccaagaacagcaagcctatccataccaccatcctaaacccacacgtccacgtgattggggaggacgcagcgtgcatcgcctacatccgcctcacccagtacatcgacgggcagggtcggcctcgcaccagccagtcagaagagacccgggtctggcaccgtcgggatggcaagtggctcaatgtccactatcactgctcaggggcccctgccgcaccgctgcagtgagctcagccacaggggctttaggagattccagccggaggtccaaccttcgcagccagtggctctggagggcctgagtgacagcggcagtcctgtttgtttgag

SEQ ID NO: 782 - DNA, 2409 bp, Homo sapiens
cgctctccctgactaggggtagctagcggcctccctcctttgggttctgtatccctacttccattaccctcggctcctcccactcctcgggggctccgtgctttccgcgggtctgtccgggggctccggaccctcggcgcagctgagttgatggcttccggagaactggcatagctgcagaatatgagtagtgtcccaagaagagtgctttgcctttggcacaaggatcagaataaaggtgaattgctattacatagggtttttcggtaaaagtcactgaaaattatttgccatacagtaaccagagacctccaactaggggcccccaaactgtatcctgcctgtagccagaagcaatttttaaagaaaatatgtctcctctgaagatacatggtcctatcagaattcgaagtatgcagactgggattacaaagtggaaagaaggatcctttgaaattgtagaaaaagagaataaagtcagcctagtagttcactacaatactggaggaattccaaggatatttcagctaagtcataacattaaaaatgtggtgcttcgacccagtggagcgaaacaaagccgcctaatgttaactctgcaagataacagcttcttgtctattgacaaagtaccaagtaaggatgcagaggaaatgaggttgtttctagatgcagtccatcaaaacagacttcctgcagccatgaaaccgtctcaggggtctggtagttttggagccattctgggcagcaggacctcacagaaggaaaccagcaggcagctttcttactcagacaatcaggcttctgcaaaaagaggaagtttggaaactaaagatgatattccatttcgaaaagttcttggtaatccgggtagaggatcgattaagactgtagcaggaagtggaatagctcggacgattccttctttgacatctacttcaacacctcttagatcagggttgctagaaaatcgtactgaaaagaggaaaagaatgatatcaactggctcagaattgaatgaagattaccctaaggaaaatgattcatcatcgaacaacaaggccatgacagatccctccagaaagtatttaaccagcagtagagaaaagcagctgagtttgaaacagtcagaagagaataggacatcagggcttttacctttacagtcatcatccttttatggtagcagagctggatccaaggaacactcttctggtggcactaacttagacaggactaatgtttcaagccagactccctctgccaaaagaagtttgggatttcttcctcagccagttcctctttctgttaaaaaactgaggtgtaaccaggattacactggctggaataaaccaagagtgcccctttcctctcaccaacagcagcaactgcagggcttctccaatttgggaaatacctgctatatgaatgctattctacaatctctattttcactccagtcatttgcaaatgacttgcttaaacaaggtatcccatggaagaaaattccactcaatgcacttatcagacgctttgcacacttgcttgttaaaaaagatatctgtaattcagagaccaaaaaggatttgctcaagaaggttaaaaatgccatttcagctacagcagagagattctctggttatatgcagaatgatgctcatgaatttttaagtcagtgtttggaccagctgaaagaagatatggaaaaattaaataaaacttggaagactgaacctgtttctggagaagaaaattcaccagatatttcagctaccagagcatacacttgccctgttattactaatttggagtttgaggttcagcactccatcatttgtaaagcatgtggagagattatccccaaaagagaacagtttaatgacctctctattgaccttcctcgtaggaaaaaaccactccctcctcgttcaattcaagattctcttgatcttttctttagggccgaagaactggagtattcttgtgagaagtgtggtgggaagtgtgctcttgtcaggcacaaatttaacaggcttcctagggtcctcattctccatttgaaacgatatagcttcaatgtggctctctcgcttaacaataagattgggcagcaagtcatcattccaagatacctgaccctgtcatctcattgcactgaaaatacaaaaccaccttttacccttggttggagtgcacatatggcaatttctagaccattgaaagcctctcaaatggtgaattcctgcatcaccagcccttctacaccttcaaagaaattcaccttcaaatccaagagctccttggctttatgccttgattcagacagtgaggatgagctaaaacgttctgtggccctcagccagagactttgtgaaatgttaggcaacgaacagcagcaggaagacctgg

SEQ ID NO: 783 - DNA, 3167 bp, Homo sapiens
cttttattccaccggatgcagcttccattgttactgaggttaactttactacaacaagaagtggattacgagggcagcttttagctttaaccattcagcatgagaaacctgatttagaagaacagaaaacaaaactattacaacaggaagaagataagaaaatacagctagccaagctcgaagaatctcttctagagacacttgccacatctcaaggcaatattttggaaaataaggatctgattgagtctttgaatcagacaaaagcaagcagtgcacttattcaagagtcacttaaagaatcttacaaactccaaatttcccttgatcaagaacgggatgcctatctccccctggctgagagtgccagcaagatgtacttcattatttctgatttgtccaaaattaataacatgtaccgttttagtttggctgcttttctccgacttttccaacgagctctacaaaacaaacaggattctgaaaatacagaacagagaatccagtcacttatcagctcattacaacatatggtatatgaatatatatgtcgttgtctatttaaggctgatcagttgatgttcgctttgcattttgttcgaggcatgcatcctgaactttttcaagaaaatgaatgggatacgtttacaggtgtggttgttggagacatgttacggaaagctgactctcaacaaaaaatacgtgatcagcttccgtcttggatagatcaggaacgaagctgggccgtggcaacattaaagattgctctccccagtctttatcagaccctctgctttgaagatgcagctctgtggcgtacttattataataattcaatgtgtgagcaagagtttccatctatccttgcaaagaaagtttccttatttcagcagattcttgtagtacaggcgctaagaccggacagattgcaaagtgccatggctctttttgcatgtaaaactctgggactgaaagaggtgtccccactgcctctaaatctcaaacgtttatacaaagagacactggaaattgaacccatcttgataattatttccccgggtgctgatccttctcaggaacttcaagaactagctaatgctgaaagaagcggagagtgttatcaccaggttgccatgggtcaaggtcaagctgatttagcaattcaaatgctaaaagaatgtgcccgcaatggagactggctctgtttgaagaacttacatcttgtggtatcttggctgccagttctggaaaaggaattgaatactcttcaacctaaagatacctttcgtctttggctcactgcagaagttcatcccaactttactcctattttactacagtcaagtctgaagataacatatgagtcacctccaggtttaaagaagaatttaatgcgtacttatgagtcttggactcctgagcaaattagcaaaaaagataatacacatcgagctcatgctctcttcagtcttgcatggtttcatgctgcatgtcaagaaagaagaaactatattcctcagggttggacaaagttttatgaattttctttatcagatcttcgggctgggtacaacattattgacagactttttgatggtgccaaagatgtacaatgggaatttgtacatggtttacttgaaaatgctatttatggaggacgtatagacaactattttgaccttagagttcttcagtcatacctgaagcagttttttaattcttcagttattgatgtattcaaccaaaggaacaagaaaagcatttttccatattccgtatctctaccacaatcctgcagcattttggactatcgtgctgtcattgagaaaattccagaggacgacaaacctagtttctttggtctgcctgccaatatcgctcgctcatctcagcgcatgatcagttctcaggttatttcacagttgaggattttgggcagatccataacagctggttccaaatttgacagagaaatctggtctaatgaactttctcctgtcctcaatctctggaagaaactaaaccagaattcaaacctaatacatcagaaagtgcctcctcctaacgatcgacaaggatctccaatactgtcattcatcattcttgaacaatttaatgctattcgtttagtacaaagtgtccaccagtctcttgctgctctcagcaaagtcatcagaggaactactttactgagttcagaagtacaaaaattggcaagtgctttattaaaccaaaagtgtcctctcgcatggcagagcaagtgggaaggcccagaagatcccttacaatacctgagaggtcttgttgcccgtgcccttgcaatacagaactgggtagataaagctgaaaaacaggctcttctctctgaaacacttgacctatcagaacttttccatccagacacatttcttaatgctcttcgccaggaaactgcaagggcagtgggtcgttctgtggatagccttaaatttgtagcctcatggaaaggtcgactgcaagaagcaaagctacaaattaagatcagtggcttgttactagaaggatgtagttttgatggaaatcaactttctgaaaatcagcttgattctcccagcgtgtcatcagtgctcccttgttttatgggctggattccacaggatgcatgtggtccatattctccggatgagtgcatctctttgcctgtttacacaagtgctgaaagggatcgtgtggttaccaatattgatgttccatgtgggggcaaccaagaccagtggattcagtgtggagcagctctattcctaaaaaatcagtagaatctaatgacaacaaaagccatcttcacaaaagggaacattgattctttaagctttaaatcaaacatgtggtcagtctacatttgaaatgttagttcaaaatattaacatatagttatgttgttgatgtcactgaaattttaatgtgtaaaagcagcactgtgcatcttttaaagtaataaattaatggagttattgttaaaacagagtattcttttgacaacattaaatatttctgtgagaaagttcacttttccagtggctcaaaaatttgttttaggtcagagattttaagtggtatattaaccaataataaatattttggctgtcatttgtgtcataattatttaataaaagagcattcataatttt

SEQ ID NO: 784 - DNA, 2507 bp, Homo sapiens
ataacctgcacattgtcctgggcatgtcgccagtgggggacaccctgaggacctggtgcagaaacttcccaggtatggtaaataacactggtattgactggttcatgccctggcctccccaagccctccatgcggtcgcaaagtcctttctagggtataatccaatgatcccggcagaaaatatagaaaatgtggtgaagcatgttgtcttggttcaccaatccgtggaccactacagccaacagtttctacagaaattgaggcgcagcaactatgtcactcccaagaactaccttgattttattaacacctattcaaaattgctggatgagaaaactcagtgtaatatagctcagtgcaagcgtctggatgggggactggacaagctgaaggaggccaccatccagctggacgagctgaaccagaagctggccgagcagaagatcgtgctggcggagaagtccgccgcctgcgaggccttgctggaggagatcgccgtcaacaccgctgtagccgaggagaagaagaaactggcagaggaaaaggccatggagatagaggagcagaacaaagtcattgccatggagaaggccgaggccgagacgaccctggcagaggtcatgcccatcctggaggccgccaagctggaactgcagaagctggacaagtcggacgtgactgagattaggtcgtttgctaagcccccgaagcaggtgcagacggtctgcgaatgcatcctcatcatgaaagggtacaaagagctgaactggaaaacagccaagggcgtgatgtccgacccgaatttcctgcggtctctgatggagattgattttgattcgattacccagagccaagtgaaaaacatcaaaggcctcttgaagactcttaataccacaactgaagaaatggaagctgtcagcaaagccgggctggggatgctgaaatttgttgaagctgtaatgggctactgtgatgttttcagagaaatcaagcccaaaagagagaaggtggccaggctggagcggaatttttacctcactaaacgggaactggaaaggatccagaatgagttggcagcaattcagaaagagctggaaacattgggtgccaaatatgaggccgccatactggaaaagcagaagctgcaggaagaagccgagatcatggagaggcggctgattgccgcagacaaactcatctcgggtctggggtcagaaaacatcaggtggctgaacgacctggatgagctgatgcaccggcgcgtgaagctgctgggggactgcctgctctgcgcggctttcctcagctacgagggagccttcacctgggagttccgtgacgagatggtcaatcggatttggcaaaatgacatcctggagcgggagatccccctgagccagcctttccggctggaaagcctgctcacggatgatgttgagatcagcagatggggatcccagggccttccccccgatgagctctccgttcagaatggcatcctcaccacccgggccagccgcttccctctgtgtatcgacccccagcagcaggccctcaactggatcaagagaaaagaggagaagaacaatctgcgggtcgcttcctttaatgaccctgacttcctcaagcagctagagatgtccataaagtacgggacccctttcctgttccgcgatgttgatgaatacatcgatcctgtgattgacaacgtcttagaaaaaaatataaaagtctcccaaggacggcagtttattatcctgggagacaaggaagtggactatgattcaaatttcagactgtacctgaacaccaagctggccaatcccagatattccccatccgtgtttgggaaagctatggtgatcaattacactgtcacgctgaagggcctggaggaccagctgctgagcgtgctggtggcttacgagaggcgagagctggaggagcagcgggagcacctcatccaggagaccagcgagaacaagaacctgctcaaggacctggaagattccctccttcgggagctggccacgtccacggggaacatgctggacaatgtggacctggtgcacaccctggaggagaccaaatccaaggcaacagaggtctcagagaaactcaagctggcggagaagacagccttggacatcgacaggctgcgggatggctaccggccagcagccaggaggggggccatcctgttcttcgtcctgtctgagatggccctggtgaactccatgtaccagtactccctgattgccttcttagaggtcttcaggctgtcactgaagaagtcgctgcctgattccatcctcatgaaacgcctgaggaacatcatggacacgctgaccttcagcatctataaccacggctgcacagggctgtttgagaggcacaagctgctcttttcttttaatatgaccatcaagatagaacaagcagaagggagagtccctcaagaagaactagatttctttttaaaaggaaacatttccctggagaaaagc

SEQ ID NO: 785 - DNA, 2781 bp, Homo sapiens
aaccgatgccgccgggtacgagctgtgctgcacgcggacgcgagctcgcgtcccacccgttttccccttccatctactttgtccccaaccctctccccgagtctcttcctttccccggtaattcccagtctccggtggcgcgcgagcctgcggacggtgcgagacgcgagggaccgggccccgagaagagcggtaacccgactggtcggagcccgcctctcgccgccccgcgcctctccccgatcttctcggtctccggtgcgcgggccgtctcgccgctcgagccgcgctcgcgcacccgttggctgccacagcctcgagcttggcgcgccggattcgcgccggcgcgagtacgcgccctgagctctggctggctggctggcgcgcacgcgcccgagagggctccggggcggggcgagccgctgcctgggcgagggtcggggtgatctgctggatctccggcagcatcctgcagtccggcccaggagagaagtggggaggcggcggtgggggcggggcggcgtccggctctgagagagctgggggaggagcgcggcggcgacggcggcggtggctctagaaggggaggtggaggatctcctttcctcttctcagacccgggagcgtccgggacgcggagcccggagctggggcgacgaggcgattgcgggggcctgggctagctgctggctaccaatattctactttctgtctctatgaatgtgactaccctggttacctcatataatctccctggaaaaggagacatgaatgtctgcaatgatacttcctgacaagaagttgatacaagaaaaggaaaggagattaacagctagtgagcagaatttcgaacagcaggatttcgtattttttgcttccaactgcacacttccgttgcccgcttttaaatcagagatacctacactcaaaacccagacaaggcaaaaggatacttttcttgtatattttttgagatcgaagaaacgacaatgtccaggaaacagaaccagaaggattcatcaggattcatttttgatttgcagtccaataccgtactggcccagggaggagcttttgagaacatgaaagagaagataaatgcggtacgtgcaatagttcctaataagagcaacaatgaaattatcctggttttgcagcactttgataactgtgtggacaaaacagtacaagcattcatggaaggtagtgccagtgaagtactcaaagaatggacagtaacaggcaagaaaaagaacaaaaagaagaaaaacaaaccgaaacctgccgcagaaccaagtaacggcatcccagattccagtaaatcagtttccattcaagaggaacagtctgcgccttcctcagagaaaggtggtatgaatggctaccatgtcaatggtgccatcaatgacactgagtctgtggactcactcagtgaaggtttggagacactttcaatagatgccagagaattggaggatcccgagtctgccatgctagatacgctggatagaacaggatccatgctgcagaatggtgtctctgattttgagaccaagtctttgactatgcactctattcacaattctcaacaacccaggaatgctgccaaatctctctcaagacctaccacagaaactcagttttcaaatatggggatggaagatgttcccctcgccaccagtaaaaagctaagttccaatattgaaaaatctgtaaaagacctccagcgccgcacagtgtctcttgcacggtatcgagttgtagttaaagaagagatggatgcctccattaagaaaatgaaacaagcctttgctgaattggagagctggtattccaatgctgctagagttcttggagcaaaatattgccaagtttaatggatcgagaagtggcgttgcttgctgaaatggacaaagtgaaagctgaagcaatggaaattttgctcagccgacaaaagaaggctgaacttctaaagaagatgactcatgtggctgttcaaatgtcagagcagcaattggttgagctcagagctgatatcaagcactttgttagtgaacgtaaatatgatgaggatctgggacgagtagcccggttcacctgtgatgtagagaccctaaagaagagcattgattcatttggacaagtgtctcatccaaagaacagctattcgaccagatcccgatgtagctcagttacatctgtgtccttgagtagcccaagtgatgcctctgctgcttcctcttccacctgtgcctctcctcccagccttacaagtgctaacaagaaaaactttgcaccgggagagactcctgcagccatagcaaactccagtggccagccctaccagccacttcgggaggtattgccagggaacagacgaggaggacagggctataggccacaaggccaaaagtccaatgaccccatgaaccaagggcggcatgacagtatgggtcgttacagaaacagctcgtggtattcatctggttccaggtatcagagtgctccatctcaggcaccaggaaacaccattgaaagaggccagactcactctgcagggaccaatggaactggagtcagcatggagcccagccctcccacgccttcattcaaaaaggggctcccccagcgcaaacccaggacctctcagactgaagccgtgaactcttgagagaaaatccagttggcctctctcctctatccacacaattcaacttgataactggactttaggaaacttacagttagatgtaataacaaaaagaagtttatgcgtatcac

SEQ ID NO: 786 - DNA, 3604 bp, Homo sapiens
atgtgtgtcggggcgcgctggggccagggtatggctctccgccctggctggctctgcaggggtggtccctgttcaagcccgctccgtgggagctgccccctggggaccctgctcctcggtcacagggggcccctttagttttcccatccccatcctgctcgtgtaaagcttggtttatcttctcggcgttctgtgtgtagcgtagtcttggtttggtctccacagctcttcggggtggggtgtgagtgtggtttttcccaggcaggggccgtctgcccttgtcccccagctatctcctggtctgctgggtgggagggtctctccaggccccagaccccacttggaggggcatgtgtttctcagaggggctccatccgcagttgcatggaactccttacctgtttgccgtccatcccccggaggtaatcagaggagtgggcctgttgtcttggcgctggcggatggggcaggtgcctggcgggggaggaagagggctctctatgatgtggaatttttttttttttttttttgagacggagtcttgctctgtcgcccaggctggagtgctgtggcatgatctcagctcactgcagcaacctccacttcctgggttcaagcgagtctcctacattggcctcccaagtaggtgagattacaggcactcaccaccacacgcggctaatttttgtatttttggtagagacggggtttcaccatgttggccacgctggtcttgaactcctgacctcaagtgatccacccaccttggcctcccgaagtgctgggattacaggcatgagccaccgtgcccggcctcatggaatttctaggggtgagcaggtgaccctggggctgccacttgagctcctggagtgtgtgtcttggcccctgtgtggttctccattaagaagagctcagatagtctcaaccccaccctctccccttgctgcactcagagtaccagtgggagctgaaggatggggaggaacagagcagtgaccacccctccctgccactgataagttctgcctcgtcgtggggctcccctggttcccaagacaccccttcctccctcagcccgtcgtcctaacccagcaaagatctgggcattgctgactctgcacctccttcctccatgggcatctccaggaccgccctccttcaaggggcactgcccacaccaccgtcctcagcccgaggcatgcatctgagctggagaggcttgcaggcctgaccctggtagcttcccctccccaagattcagaggcggggacccaaagcctcactccaaaccactggcattctcacctcctctcacctccaggcaccaggctgctggtgggaaaggaaggagctgggggatcagaggcttccagtgtggcctccggaagcagcagcgtagccagggtgacatttgttcagcaggaggaggcttggtctggaggggcttgcccctctgaggtgacagaggatgccctggaggtcaggagagaagactgggaagacaggaagggccaggcccctgttaaagcccagggcactatttggtgatcttcaaaggtgaacacaggccacctcccactggccccctcctcctggccacattttccagggataccctggggagtcctaaggccaccctgggcccctttctgagcctagagatctggatgtggtgacaaccagggcttttcccagccccagctaagagagggggctttagggcaagagcacctcagccctgcaatggggggatctttttttctttttttttttgagacaggctggagtgcagtggtgcgatctcggttcgctgcaacctctgcttcccaggttcaagtgattctcctgcctcagcctcccaagtagctgggattacaggcacccaccaccacgctcggctaatttttgtatttttagtagagacagggtttcactatgttggccaggctgttcttgaactcctgacctcaggtgatccgcccactttgggagaccaaggtgggaggatagcttgaggccaagatagcaagaccaccctggtcaacatagcaagaccctgcctctacaagaaaataacgaaagaggccccagggaaggaagccagccaggagcagcctggagcagaggcaggagcctgaggcctgagccatggcatccagggacagcctggtggccgagagagcttgtggctgtcactataagggaagaggagctatggaaattggaagtgcagggtggcctgtgtgctaggagtgggggtgcaggcctaggtgtgtttatgcacacgtttgtgcatgtacgtgtgagcgtggatgtgttcctatgcattagagtgtgtgcgtgcacgtgtgcagagcccacacctgagatatgggactggctcttggagtattttgagttctcagtagcagtcttgttgtcaggccttgagtgcagaaatgattaggtgagtgagggcaggactcgaatgcagaccctggctccaggggagagggtggggcgtctctggtaggacggcctcaccccacttgtcagaactactctggaggggggcaaaggtgtcaggaacagtttgagcagttctggctcagggtcactcatgaggttgctgttgtctgaaatcttagctaaggattggaggatgcacttctaagtgaggcctggctgtaggcaggaggcctcagtccttccccaggtgggccaacccacagggctgcttgagtgtcttcacaatatggcgctcggcttccccccagagcaagagattcaagggcccagggtaaaagccaacgtgttatttttatccctagcctcagaattcacacgccgttgcctccaccatgctctggtttgatacagcccagctctgattggaaggggctggggctgcccgtgctgactcttcaaaggcatcccatcctgcagatggtgttcacagggagagtttgtgggggccggcactccctcatctactggggctcattctggaagaaggtccagaagaattggagacccctgcccctcacccaaactttggaggtggcagggtgaacagcaggccaagttcaggtcccaagacaggccaaggccagtgcggtttcccttccactgcctcagtttacctgtattcagaagacagtctaggaagagttgagcagagttccctctaaaagagtagggagctgataacagtcccaagccctcctctttctctatgccaaaatcatttccgttatcctgagatgggggtgagtggatggatggtgtactgaggggcctctgccctgcccagagcccccaccatcgtagtgggggcaggggacttcctgcccacaaccccctccaaccctcacctggcgtgcccgggtcaccagcagcagcagcggcgttccatcgctcccaagatctgggtgaaggggagaacctgccatcttatccctacccccccggggccctcaagcttattttcttgttgaagaaacacaaaaccctcgagattcatgtactgtatgttggagaaaaaaaattacctaatgttcccccaaaaaagacagtatattttgtactttgtaaagtgttaattaaaatgaaaaaaaaaacg

SEQ ID NO: 787 - DNA, 3402 bp, Homo sapiens
aaaatgcagttaatgctgaagcttcattaaggaggaattctcccagtccttggctacatcagcccacccctgtgacctcagcagatggtattggattacttagtcacattcctgtcagaccttccagtgcagagcctcatcggcctcttaaaattacagcccattccagtccaccattgacaaaaactttagtagatcatcataaggaagaattagaaagaaaagcttttatggaaccattacggtctgttgcatccacatcagccaaaaatgacctggatctaaataggtcacagactggaaaagattgtcacttacataggcattttgtggatccagtattaaatcagttacagaggccaccccaggagactggagagaggttaaacaaatacaaagaggaacaccgtcgaattcttcaagaaagtattgatgttgctccctttacaactaaaatcaagggacttgagggtgagagagagaattattccagagtggcatcatcatcttccagtcctaaaagccatatcatcaaacaagatatggatgtagaacgctcagtatcagatctttataaaatgaagcactcagtgcctcagagtttaccccaaagtaactatttcactacattgtctaatagtgtggtcaatgaaccaccaagatcatacccatccaaagaagtttcaaatatttacggtgataaacagagtaatgcccttgcagcggcagcagctaatcctcaaactctgacttcatttataacatctctttcaaagcctccacctttgattaaacaccaaccagaaagtgaagtaggcaagataccagaacatcttccacatcagattgcatctcactcagtaacaaccttcagaaatgattgtaggagtcctacccatttgacagtttcttctacaaatacactccgcagtatgcctgcattacatagagcaccagtatttcacccaccaatccatcacagcctggaaagaaaggaaggcagctatagtagtctttcccctccaactttaactccggtgatgccagtaaatgctggtggtaaagttcaagaatcacagaagcctccaactctaatacccgaaccaaaagactcccaggcaaattttaagagttcttcagaacagagtttgacggagatgtggagacctaataataacctcagcaaagagaaaactgaatggcatgtggagaaaagcagcggaaagttacaggctgctatggcatctgtcattgtgcgtccatcttctagtacaaaaactgatagtatgccagcaatgcagttagcttctaaagatcgagttagtgaaagatcttcagctggggcacataaaacagattgcctcaaactagcagaagccggagaaactggaagaatcattttgccaaatgtgaattcagacagtgttcacacaaaatctgaaaaaaactttcaggctgtctcacagggcagtgttcccagttcagtcatgtctgctgtaaatacgatgtgtaataccaaaacggatgtaatcacatctgctgccgatactaccagtgtttccagctggggtggttcagaagtaacttcctctttatcaaataccattttggcctctacatcatcagaatgtgtatcttcaaaaagtgtcagtcagccagtggctcaaaaacaagaatgcaaggtcagcaccacagcaccagttacattagccagtagtaagacaggaagtgttgttcaacccagttctgggttctcaggcacaactgattttatccatttaaaaaagcacaaggcagcattggctgcagctcagtataaaagtagtaatgccagtgagactgaacctaatgctataaaaaatcagacactttcagcctcccttcctctggatagcactgtaatctgtagtacaattaacaaagcaaactctgtaggaaatgggcaagcttcccagacaagtcaaccaaactaccatactaaactgaaaaaggcctggctcaccagacactcagaagaagataaaaatactaataaaatggaaaattcagggaattctgtatcagaaattattaagccatgttctgtcaacttaatagcctctacatctagtgatatacaaaatagtgtagatagtaagatcatagttgataaatatgtaaaagatgataaagtcaacaggagaaaagccaaaagaacttatgaatctggctctgaaagtggagactcagatgaaagtgaaagcaagtcagagcaaaggactaaaagacaacctaagccaacttacaaaaagaagcaaaatgatttgcaaaagagaaaaggtgaaatagaagaagatttgaaacccaatggagttctcagcaggagtgccaaagaaagaagtaaactgaagttgcaaagcaacagtaatactggcattcctcgttcagtattgaaagattggcgtaaagtcaagaagctgaagcaaactggggaatcctttttacaggatgactcctgctgtgagatatggcctaatttacaaaagtgtcgagaatgtagacttattcgcagtaaaaaaggagaagaaccagctcactcaccagtattttgtagattttactactttagacggttgtcatttagtaaaaacggagtagttagaatagatggtttctcttctcctgaccaatatgatgatgaagctatgagtttgtggacacatgaaaattttgaagatgatgaactagatatagagacttctaaatatatcttggatataataggtgataagttctgtcaattagtaacatctgaaaaaacagctttgtcctgggtgaaaaaggatgccaaaattgcctggaaaagagcagtgagaggagtccgggagatgtgtgatgcatgtgaagcaacattgtttaacattcactgggtctgccaaaaatgtggatttgtggtctgcttagattgttacaaggcaaaggaaaggaagagttctagagataaagaactatatgcttggatgaagtgtgtgaagggacagcctcatgatcacaaacatttaatgccaacccaaattatacctggttctgttttgacagatcttctagatgccatgcacactcttagggaaaaatatggtattaaatcccattgtcattgtactaacaaacagaatttacaagttggaaattttcctacaatgaatggtgtatctcaagttttacagaatgttcttaatcacagtaataaaatttctctgtgcatgcctgagtctcagcagcaaaatactcctccgaagtctgagaaaaatggtggcagcagcccagagagtgatgtaggcacagataacaagttaactcctccagaatcccagtcaccactgcactggttagcagatcttgcagagcaaaaagccagagagg

SEQ ID NO: 788 - DNA, 3116 bp, Homo sapiens
gtatctgatgactctttcccaaaaccgactttgagcctcactcccaaagcctgatgcctgtggccctccttgacaggcaagaaagaaacatggctaggcccttccttaccatccctctgcttccccgccgcctcttccacccagcccccagaatacatgcagtgagtagctttgttgtaatcgctgcagataattttagtgtacaatacagattgttaaagggagagagaggccaggcacggtggctcacgcctgtaatcccaacactttgggagaccaaggtggtggatcacctgaggttgggagttcgagaccagcctgaccaacatggtgaagccccgtctctactaaaaatacaagaattagccgggtatggtggtgggtgcctgcggtcctagctacccggaggctgaggcaggagaattccttgaacccgggaggcggagattgcagtgagccgggactgcgccattgcactctatcctgggcaacaagagcaaaactctgtctcaaaaaaaaaaaaaaaataaagggagagagagtgtgtgtatgtgtgtgtgtttctgcagtgtgaagggaaaactcctggtctttgggtaagtagcacaggtttactcttatgattaaatacacattttatcccagttttgtcagagtactcgagagttagattgatggtcatcttagttctttctgtagccttaattccaaaggtttaagagcagctataagcacaaagtaaggttattttgtttaatagtagccatccactgtggaactagccaaccactgtggaaagaaatacttgccttaaatttcttttcttcgccgagcatcaggaagtaagtgcttatctcttaggatctgttagagttcttgtttctagtaaattttatttcagttttaaagtttaaagtggtttgacttcaaaaaaggttaagcactgtatgagagcctgcttacaacgcccgttgttgctatagcctcagtaaatcttcttataaagcttggtttgtatggctttctaagattttgtttctggttgaatgaatgaagttatgattcaagtttattttgtttcaggcctgtttaaagaagaaaacccgtatgctagatttgaaaacaactaaagcgctccagcacatcagtcccgacgcttcctgtgaggtgcacactccgcagcccagcccagccgggagaccacgtggccattgcggtctcctgaccttggccagtgaacctgccagccttccaggacaggcggccggagagctgcccctgaaggacagtcctctcgtcttgcagactggtgaccttctattccctgttcatctctgtttctagatttagtcacttgaaataagaaatctttggggtttgggctttttttatactcttctcagtttgtgaaacgctaactgcacacgaagccgcctgacggcacccagcgctgtggctgtcattctcccagggcagaaccctgcgtttctctctgtccactaacaagcttcacacgcaacacagggaagtcggtttgacttttgtcatgaggagaactgaccagccctcatcattccccataaaaccacggacagcgtctgtgtgcgcatcttgagtcttcacacctgttgactcacacggcttttgctgatgacacggggctccagtacacagtctgataaggacttaacgtcctaacctcaattgtattaaatagcattggggaatagctaaacctttttaaaaaaatttattggattttcctccctgcttaaaagatttcaccagaaaaccttcatataaaaattcaggccctttttggacaatttttaaaatttgtatctttactagaacatgagaatctttttcccttggaagcttgaattataaatgtggtgtttggcctgcctcagcagcaccagttgactgctcgtgtgccagcggtgtggggaggacggggcaggacgctgcagctctctccagccctgttggcatcctcagtgcctgcaggcctctcgctgcctgttgggctgtctggggggtggccatttagggatcgtggggacggggtccaccccaagaagaaagaaaggcccgtccacaggcccggctctgggccacgtgccccggaagcaggtgtgtccagagtcagctgagggctctccccacaccacccagcaggcgctggtgctccttctgcctcatgggaccagtccagcttccagccgctctggctcgagggtggtctgagcacttccttctgagtgggcttctctgggagctctccagtggcactgctggacctgcccacgtttctgtaaaatcaggatacgtggctttagtaagcagaccaagcgcttcgtggcagggaaagcagcgtgcggggaagtcactgaaaagtgctgcctaaggaagtttggaaatagtccccgttccagattgccttgaattttaaaacattttgctttgggaaagtaggtcagcagcacctaagatcaaggatgcgttccattttcacacttcacagtcatgaaaactgagaagactgtcttcagcgtgaactaaagttcacaggcagatcactgatccagaacacttcaagaactcgtcaaacagctcgataagcctttttgactgtgtacatctgtaccgggaataacattcctaggctgaaatttccacaaagaatagaacctgtacccagttcttcaggctgatttccctgacctcttgggcatttgtatttgtagtaaagtattgcagagattcctaagtattttatagcagccatcaaaattggactttgtattgtttattcataaaagacacttggtaatagacttcagtgaactctgtatgaatgcagtagtgtgcgtgcaaaatccgcttcctgagcgtagggtgctgagctggcgctagggctcggttgtgaaatacagcgtagtcagcccttgcgctcagtgtagaaacccacgtctgtaaggtcggtcttcgtccatctgcttttttctgaaatacactaagagcagccacaaaactgtaacctcaaggaaaccataaagcttggagtgccttaatttttaaccagtttccaataaaacggtttactacctgcg

SEQ ID NO: 789 - DNA, 2406 bp, Homo sapiens
atccctcagcctcaggctgagccggaccgagccgagaggacccgagtggggccgaggccagtagccccggggccctgagcagaggccgtagcttgcgccgcacccgcggccaggcggagccaaagatgccggcctctgctgcgcggccccgcccgggtcccgggcagccttacagcttggtatggggcagccagcgagatgctccgagccgggcccacacagtgggggcgggactggctggcttcttcttggggattctcgcagcatccctgactctcattctgattggtcggcgtcagcagcgacggcgacagagggaacttctggctagagacaaggtgggcctggacctgggggctccaccttctgggaccacaagctacagccaagaccctccctccccctctcctgaagatgagcggttgccgctggccctggccaagaggggcagtggctttggtggattctcaccacccttcctgcttgatccttgcccaagcccagcccacattcggctaactggggctcctctagccacatgtgatgaaacatccatctagagctgggcaaatgaccactagtgtataagtgatcactggaacggagtgaccactgagatgctgggggtcactgggcctggaagaccatcccagcctctgagttctctttgagtatgagtgattacttggattttagtatctgttctctctgagcctggatgggcttggggccagacctttgcctgattcctgattcccatgagaaatcagaactgctttctgcagcaaatcagggcttccccctaacatctgaactcctgtaaaccttcatccctggccccctatcttgggcccattagttttggggatggggcacagggcatagctatgactttgctttctggttggagcctggccggaaggaagagccctggaggtggttgggggcaaatgtgccctgagtccttggggtggttctgcttattcttcaagtttatctgaatctgtggggagtgcatgatccccatgttgcaatatggagtctctgccctgagatcttccccatctcagttttccttccatgaaagagtacgtgtaaatacatagtgttcataagagacctggccacatgtgcatgaatgactgggccgatgcttaggaatatttatgagggatggggagggagacgattggaatgggggcgttgcctgcagaactttagaccctgtagccatagagggaatggcgttcctttctaaaaggaactgaaacactgcccctctccccattgccccacaaccttactctaaatttgagtagagaaaagctcctaaagtgaccttccgggtgggaagggcagcagtacacatggccccatccttttctttgtttttaccccctggctgccaccactgccatgtcacagctgctttctctggctggagtgtaggctgtaccccatttccttggctcccattaaaaatcaacaacattctaatgattagggaacaacagaaggggaatagtcataggatatacgagcagtataaagatacgtttgcaatcagtgactactcagggtgacacccttgccctaaagcaggagtcccccctacctggggtccatggactccctgaaattgtatgcaaaatgttgtttgtacatgtgtgtctgtatgtctctgtggggaggttttatggcttttgtcagattttcaaggccttaacaaagttaaaggaccactgccctgaggttactgcactgaggccaagttaggatggcatcactctgtggcagctctccctggacttgccctgcctggaacagggtgatttgctggaatggagttaccactgagatgccaaaggttgctgggtctggaagactgttgtggcctctcagttctctttgagtctgactgactgtggccagtccctggactggtagctgctggaggccttcttgtttctccagtccctggaagctgagctctatgtgtatttgatgacattgtcagctcttaccaaacgtcaagacctcttcctgcttgaccactcgcacatggctctaggcttctcctgctgagtcctggtcttggcctgtgaatgtgcctcgttcatccctggtgcttgagcccctcaagctccagtcaatgatccagtccttcccctttgaagttttctgctctactttccttggcagcagcctgtgaactactcaaaagagtccccttgggtttggaattatcagtggctttgccactagtaaatgtgtgatcttcggcaagtaacctaacctagggacatcagtttactcatctgcgaagtggggataataaaacctacctcagggttgcttcaaggattaaatgagaaaatatgtcaacaataaagacctgtctgtacc

SEQ ID NO: 790 - DNA, 2264 bp, Homo sapiens
agtaatagcaggagcagcaacagaaggcgtcggagcgggcgtcggagctgcccgctgtgagagagagaggagacagaaagagcgagcgaggagagggagcccgaggcgaaaaagtaactgtcaaatgcgcggctcctttaaccggagcgctcagtccggctccgagagtcatggcgaccgcagcgtctaaccactacagcctgctcacctccagcgcctccatcgtgcacgccgagccgcccggcggcatgcagcagggcgcggggggctaccgcgaagcgcagagcctggtgcagggcgactacggcgctctgcagagcaacggacacccgctcagccacgctcaccagtggatcaccgcgctgtcccacggcggcgacggctccccgtggtccaccagccccctgggccagccggacatcaagccctcggtggtggtgcagcagggcggccgcggagacgagctgcacgggccaggcgccctgcagcagcagcatcagcagcagcaacagcaacagcagcagcaacagcagcaacagcagcagcagcagcagcaacagcggccgccgcatctggtgcaccacgccgctaaccaccacccgggacccggggcatggcggagcgcggcggctgcagcgcacctcccaccctccatgggagcgtccaacggcggcttgctctactcgcagcccccgccgcccccgcagggtccgcctggccacccaggcgcgcaccacgacccgcactcggacgaggacacgccgacctcggacgacctggagcagttcgccaagcagttcaagcagcggcggatcaaactgggatttacccaagcggacgtggggctggctctgggcaccctgtatggcaacgtgttctcgcagaccaccatctgcaggtttgaggccctgcagctgagcttcaagaacatgtgcaagctgaagcctttgttgaacaagtggttggaggaggcggactcgtcctcgggcagccccacgagcatagacaagatcgcagcgcaagggcgcaagcggaaaaagcggacctccatcgaggtgagcgtcaagggggctctggagagccatttcctcaaatgccccaagccctcggcccaggagatcacctccctcgcggacagcttacagctggagaaggaggtggtgagagtttggttttgtaacaggagacagaaagagaaaaggatgacccctcccggagggactctgccgggcgccgaggatgtgtacggggggagtagggacactccaccacaccacggggtgcagacgcccgtccagtgaactcgagctgggggaggggcagagcgcggggctccccctccccttcggtccttggccctttcccggccctcttgttccctctctaacttctgattgttcttttatttttaattattatttccccgtcccttaaaaagacaaaaaaaataaggcaaaaggaaagcaactaaggcactggactatcctttaaaggtagcaggtgtaatgatgtgttttgacctttgcaggcgagtaaccaggcaatggagtggagtgtctcctggagagagtgaggagagtgtgtgatagctagaaagagagagagacagagagatggcaagcactgagataaatacctggcaaaactaaataaattaccaaaaaggaaaaaaaatccaccaaaccatgataaacacaaaatgcagcttcctgatgcttagagttggcacatgctgctgtgtttatttattgtggattcccatcaggaaagaggaaaaaatacacatgttctttcatataggcaaaatttaaccacataaatttgcactgcaagaaaattgaagtttacgtgaacaaattcatgagcatattttctctttctccccaccgttaatttgggagttgccgttttgggggattttgttttgctttgctttattcatcggagagagttgaagccagcccttggccactctccatttctaatgttcttgtgttgccccttcttcgtactgtttgtgaactttggttaccttcacattccccttacgagggtgtaacatctatttgttcctcttaccaaagcaaaaggattggcttcatacaaaatagacaattctctgatttcaggaaatgtgcatggtctacccgctttatcgaaggcaagaatccggtttggaatataaaaataagcattggttgttcttaccagccacaaagtaaacttcattttcaggcagtgtttctgggggaggttatggaggg

SEQ ID NO: 791 - DNA, 3214 bp, Homo sapiens
tttcagtcaaagcctcttcctgtctcagggaacatgcctgttgcttctttaaaaaggagcgtactccccatgtgtcctcatgtctctgacgggaacgtgctccccacatgtcctcaggactgatgggaacgtgccctcaccacatgtccttgggattctggcgggatcgtgccctccacctgtcctcatttctctgacgggaacgtgcccccagctctcctcatgtctctgatgggaacgtgcccccagctgtcctcatgtctatgacgggaacgtgtcccccacctgtcctcatgtctatgatgggaacgtgtcccccacctgtcctcatgtctgtgatgggaacgtgccccccacctgtcctcatgtctcttgacgggaacgtgtcccccacctgtcctcatgtctatgacaggaacgtgtcccccacctgtcctcatgtctgtgacgggaacgtgtcccccacctgtcctcatgtctatgatgggaatgtgtcccccacctgtcctcatgtctatgatggaaacgtgtcccccacgtatcctcgggttttaccccacctcccgctcaggtcccagtccttggagcaccctctctggcctccttttcccggcactctctgtcccctcactctgcatctgtttctgcaggctgcccccagtgcctgtgtctgctgcatacagtctgtctacctgttgggtgtcttcccccataggtctcatggcgggcggggggaccagcaccctcaccccagccatcagatgtgccaggcacatcataggctctctgcgagcacttatctaaagagtgtgcgggcagacgacaggtgattgtgattctgcacagagccctgggctgccatccctagcttagcttcctgcagcgggagtcgataggagcttctcgtcctgtttcaggacccgccctccactgaagggccagcaggtcgcggtgacttgttcttcctgtctcctcttcctgcaggttgtggattcccagctggtgtgcatgatgaacgaaaacagcattgattacatttctcggttcaatgacctggcccaagagctgtccatcgctgagcctggccgccgagaagctctgtttgatggtggtggaggcggccccgctgtcagtgacctgtcccagtgaccacacgtcctggtggcggatgaagccctcttcgagctagagaaaaatagataagcccagcagccccagaagatggtctgaacagaggcatctccgcacccaagactgtgcaacgggcaggaacgtggtcacagagctgcttccccacgagcagcaggcaacggcgtccaaggagactaggatgagttcttggcaagggccagcgttagaaatcactgtggtactagagccgttcttcaccacgcctgggcccatgttagggtctgcataatgatcccatttcagcctgtgctctgcctcgattgttgtgttggacattccggtggcatttccttctgagacaagggagtatgtgtgccttggtgtagttgctgtgcactaggagctgtgatctccctctctgcagggaggccccagcccctgctgcttgctttctgccaaacctgtgctatgcatcagctgtgccctctgtggactgtaacgggcaggacagttgggtgtggcctgggctcatgcctggtggtgtcacatcccaaggcagcaagagcatggataccgatcacagggctgctgcggagtcgtggggccctgggctggtgcctcccctccctagaggttttgttcgtactcttaacagggagtggggtcaggaagagtcctgtactatgcaggttgtgtggactttacatgggaccctgctaagctggttgaaaatgtttttcttgtgttttaagaattaggagacatggaagaggaagaacaaagtcccctctgtagttggtttccttcctgtgtccctctgcaagcttccaggcgatctaaggtgtcatttctccctcctggggtgacccttaggcgctaatatgattacagcgaagactttcctgataagttctcaaactcgatgtgtgactgtttggcacttgagacaaacctgcctttgcagggaaagtgtctctcacgggcattggtgtgggcgtgcctgacatacgtgttcagtcccttgcatacctttgccttgagacttctgtgtctccttcccatttgggacacccaggtgagggcccagacatctggatgtggtcagacctcaccaaatatatgccttcgtggtggtctccctccttgcgccctcttgggtggccagcgttcctactgcagacggcccaacatccagtctttccccaggacagagctaacaagggcccctttgccctctcatcctcaggagttccaggcacatgagtcaccgtccatccacatccagtgtggcctggagctgctacagaggtgttgggcaggccatgcctgtgccgccatctctcccttcctgcctcatttcatcccccgcagcactttgggaggccgaggcgggcggatcacctgaggtggggagtatgagaccaccctgactaacatggagagaccctgtctctactaaaagtacagaattagccgggcgtggtggcgcatgcccataatcccagctactgaggagacttgaggtaggagaatcacttgaacctcagcggcggaggttgcagtgagtcgagatcgcgccagtgcactccagcctgggcaagaagagcgaaactgggtctcaagttaaaaaaagaaagcaaggaaagagtaatttacaacgaaggaaaaaaacccacagcacacccttcgcggctgtcagcgctctcctgatgtcacagtggctgcgtgtccttggggtgggtgaggtgtggggagcccagcccctggccctgcctcccgcgccccgctccccttctctcccttactcggttaagccatagcgaggcctccgctcgtttcagatatgaatttgttttatagattataaatatgcatatacagtgtatgcataaagcagaatgcctgcctttcctggttattttttgtaccatattgtaaattatattatttattctttaccaattttgggaataaaaggtgttttggttatttaatataataagagctgttaaacttctgtttaaatttccagttcaacttgtaaatgtttttattgtgcataaatacatactaatgttgatct

SEQ ID NO: 792 - DNA, 2563 bp, Homo sapiens
aaaaacatggaggagcgggagcggggggcgaggtcggctggcgccgggagccccgcgcgcccgcccagcccgcggctggatgtcagctctgacagcttcgacccgctgctggccctgtacgcgccccgcctgcctcccattccctaccccaatgccccctgcttcaacaacgtggcggagtacgagagcttcctcaggaccggagtccggggcggcgggcgcgggcgcgggcgagctcggggcgcggccgcgggctctggggttcccgccgcacccgggccctcgggcaggactcgtcgccgcccggacgcgcccgccccggaccccgagcgcatccagcgcctccgccgtctcatggtggccaaagaggaaggggacggggccgcaggagcgggccggaggggtccgggtcggagcaggaaggcgccacgcaacgtgctcacgcgaatgcccttgcacgaaggcagccctctgggtgaactccatcgctgtatccgtgagggggtgaaggtgaatgttcacatccgcactttcaagggacttcggggcgtctgtacaggcttccttgttgcattcgacaagttctggaatatggcacttactgatgtggacgagacctaccgaaaacctgtcctaggcaaagcatatgaacgggattcttcactgactctcactaggctatttgatcggctgaaacttcaagattcctccaagaaggaagcagattctaagtctgcagttgaagattccactctgtctagatactcacagacatccacttggaagttggcttcagtgtggggaagagcagacactggccggggctcacacaagcgttcccgctctgtcccttcttccctgcaggcctctgcaagggaggagtccaggtcagagctgtcagggaggactacacggacagacggctccagtgtgggaggtaccttttccagggctaccaccctttccagaggccagtcccgtaagaaaaagcgaaagcccaaagtggattaccagcaggtattcactcgacacataaatcagattttcattcgaggcgagaatgtcctgctggttcatcttgcacagtgaccagctcagcctgagctttggtttttagaaataaagtgcatgaattgctgctatgctgtatcctagtatcccagtgaaactctgagttggaatgattccctctggtcctgcatatgcagaggacggagcaggctcagccccctggaagatgagctcaaggggaggacaggccttgggagggcaggcgtttgcattaatatcaaggcaaaaagcattcatagatacatgcatctgatttggtattgtgatttacttcagaccctgaaaccaaatatctgatcttccattagacttaggggtcatgatatgagtggaatttacattttagatactataggggaaagaaaagtctcaaaaagaagtattgcatgtctaaaagctagtgccctgagtactcatgaattcgattccaagagtagtggtgtaaattgccttggagccctgcatccacgtcttgtaactaacttttgaattttgcctgacatgattctctcttgatgaagaaatgacatatattatctttgaatatctacaaggaaagttaccaacttatgtaggggtgaaatttggataggcggtatgctcaaagcagccagcaatgagtgctctgttttgatccttcttattattatggaaaggagtacaggacctcttcagtcttccccttaccagaggtagcctctgcaaatggcataccagatgggactctaagatgcttgtgtggtggcttcttgtccttctctttgacttctgtggcatggtgctagtgcatgtaccctgtggtattgcccctctgtccgtagtgtgaactgtcctgtgagctttatgtcaggagactgtgaccttcatgtccagcttcaaagagttgtgcatgaactcggtaatacacatcacacggctgagagtcccctttccaggcagggccagcatgtgtagaatatctttcagaatatggtttcaccatgaaacaggggtggtagatttattcccttgtgtcaggccaaagaagttcttacaaagtacagtgggtagtgtctaaagcgacactttactcacagcctggcttgagtcaacaggaacaccatagcacccacaaatacttctacttgaatcatattctgtgctttttcaatcactagtgcagaataggctgcatttgacacagactgttaggcaatattgatttttttgttttgtttttatttggttttatctgagataacttatgttcaaggtgagaataagaaatagccaactagttaaaatgtatgaaaagaaaactttcccctgctgtatttgttgtgtaacataaataagccttctgagaagcagggtgaataaagtttagggagctgggacacctggtcctgctagctggaccactggctcatcatgcaatgaaaaggtgagcagacttaacccctccgtgcctcagctttttccccacagacacctacctcacaggggcattgag

SEQ ID NO: 793 - DNA, 2742 bp, Homo sapiens
atgtggaactccattttaataggagcagcttctttgctgcatttttaaaaaatggtcttggaagcttcttacttccgagaagtggatctttgttgcggacaaaggattatttatgctaaaggaaaatgtattccccactgaattagctcgtgggaagcataacaagctcattaggaatgctcacttgtactttggccttttgctgtggtggagagaagggaaaatgacatcaaaaaggacattctgttgtcttttgccttcctgcaaagaaaatgtgttataatattaggcttttcagtatggtttagctcaggttcaactttggtactagaagaaatgttcctgcaaggaaagtgaaaagaaatttcatttcaatataggtgactatgcagcctgcaattcaagtatggtttggagaagatctgcctctaagtcctcggagtcctctgactcccagacacggaccaggattggctaatgtttgtcagtacgatgagtggatagctgtgaggcatgaagccactttgttgcccatgcaagaagatctgtcaatctggttatctggtttattaggtattaaagttaaggcagaaaaattattggaagaacttgataatggagtactattatgtcaactgattgatgttcttcaaaacatggtgaaaacatgcaactctgaagaatcagggaaagagtcttgctctgttgcccaggttggagtacagtggcacgatcatagcttactgtatcctggaactactgggctcaagtgatcctctcacctcagcctcctgagcagctgggactttagctacatgcaaccacgtctggctaatattaaaagaaatattttgtagagatgaggtcacactgtttcccaggctggtcttgaactcctagcctcaagcaatcctgcttcagcctccgaaagtactgggattacaaaattttccaatgagaaaagtgccctgtaagaaagatgctgcatcaggttcattctttgctcgggacaataccgcaaacttccttcactggtgtagggacattggggttgatgaaacttacctctttgaatctgaaggtttagttttgcacaaagatccaagacaggtgtatctttgtcttcttgaaattggtcgaattgtgtcaagatacggggttgagccaccagtgttagtaaaacttgagaaagaaattgagttagaagagactttgcttaatacttctgggcctgaagattccatcagcattccaaaatcatgctgtcggcatgaagagctacatgaagctgttaaacatattgctgaggaccctccttgtagttgttctcatcgattttctattgagtatttatctgaaggacggtaccgactaggggataaaatactctttataagaatgcttcatggaaaacatgtcatggttcgcgttggtggaggctgggatactcttcaaggatttttgcttaaatatgacccctgtcgaatattacagtttgccacactagaacaaaaaattttagcatttcaaaaaggagtttctaatgaaagtgtacctgattcgcctgccagaacacctcagcctcctgaaatgaatcctttgtcagcagttaacatgtttcagaaacaaaattcaaaacccagcgtgccagttagtattccaaaaagcaaagaaaaacagggacgtccaccaggtgcattggtgccagcatcttcactgaaaggaggtaatctgggctctatgtcagtccgttctaaattgccaaattctccagcagcatcttctcatcccaagctcaagtcttcaaaaggcataacgaagaaaccgcaggctccttcaaacaatgcatcatcttcacttgcttcattaaatccagtaggtaaaaacacttcttcaccagctttaccaagaactgcaccttgtatatctgagtcaccgagaaaatgtatttcatcccccaatacccccaaggccaaggttattccagcccagaattcagcagatctgcccgagtccacacttttgccaaataagtgttcaggaaaaactcaacctaagtatttgaaacataatcatatttcttccagagataatgcagtatctcacttagctgcacattcaaattcatcctcaaaatgtcccaagctgcctaaagcaaatatacctgtaagacctaaaccttctttccagtcctctgcaaaaatgacaaaaaccagttccaaaaccatagccacgggtctaggaacacagtctcaaccatccgatggagccccacaagcaaagccagtcccagcacagaaacttaaatcggccttgaatttaaatcagccagtttctgtgtcctcagtttctcctgtaaaagccacacagaaatcaaaagataagaatatagtttcagctaccaaaaagcagcctcagaataaaagtgcatttcagaagacaggacccagctccttgaagtctcctggccgtaccccactgtccatcgtgagcctaccccagtcttctaccaaaacacaaactgcaccgaagtcagcacagactgtcgctaagagccagcattcaactaaagggcctcccagaagtggcaaaaccccagcttcaatcaggaaaccaccctcatctgttaaggatgcagatagtggagataaaaaacctactgcaaagaaaaaggaagatgatgaccattattttgtcgtgactggaagtaagaaacctagaaaataaatacatactcattat

SEQ ID NO: 794 - DNA, 4213 bp, Homo sapiens
actggcccgccgaaagcacatggattacagtctgaggctgtaatgggaaagtcggttcctgggctgctgtctcatagacatcagcttgcagggaagctgggggctctccgaattgccctgctccggggcccctcctgctgcgtgactcacaggcacattgcagagagaagctgccgctcccagtaagtaatgaaaagagacatgaagaattggtatttcaaatgaccaccatgttgcaaaagtctgacagcaatgcaagcttcctccgtgctgccagagcaggcaacctggacaaagttgtggaatatctgaaggggggcatagacatcaatacctgcaatcagaatggactcaacgctctccatctggctgccaaggaaggccacgtggggctggtgcaggagctgctgggaagagggtcctctgtggattctgccactaagaagggaaataccgctcttcacattgcatctttggctggacaagcagaagttgtcaaagttcttgttaaggaaggagccaatattaatgcacagtctcagaatggctttactcctttatacatggctgcccaagagaatcacattgatgttgtaaaatatttgctggaaaatggagctaatcagagcactgctacagaggatggctttactcctctagctgtggcactccagcaaggacacaaccaggcggtggccatcctcttggagaatgacaccaaagggaaagtgaggctgccagctctgcatattgccgctaggaaagacgacaccaaatctgccgcacttctgcttcagaatgaccacaatgctgacgtacaatccaagatgatggtgaataggacaactgagagtggttttacccctttgcacatagctgcacattacggaaatgtcaacgtggcaactcttcttctaaaccggggagctgctgtggacttcacagccaggaatggaatcactcctctgcatgtggcttccaaaagaggaaatacaaacatggtgaagctcttactggatcgaggcggtcagatcgatgccaaaactagggatgggttgacaccacttcactgtgctgcacgaagtgggcatgaccaagtggtggaacttctgttggaacggggtgcccccttgctggcaaggactaagaatgggctgtctccactacacatggctgcccagggagaccacgtggaatgtgtgaagcacctattacagcacaaggcacctgttgatgatgtcaccctagactacctgacagccctccacgttgctgcgcactgtggccactaccgtgtaaccaaactccttttagacaagagagccaatccgaacgccagagccctgaatggttttactccactgcacattgcctgcaagaaaaaccgcatcaaagtcatggaactgctggtgaaatatggggcttcaatccaagctataacagagtctggcctcacaccaatacatgtggctgccttcatgggccacttgaacattgtcctccttctgctgcagaacggagcctctccagatgtcactaacattcgtggtgagacggcactacacatggcagcccgagccgggcaggtggaagtggtccgatgcctcctgagaaatggtgcccttgttgatgccagagccagggaggaacagacacctttacatattgcctcccgcctgggtaagacagaaattgtccagctgcttctacaacatatggctcatccagatgcggccactacaaataggtacacaccactgcacatctctgcccgggagggccaggtggatgtggcatcagtcctattggaagcaggagcagcccactccttagctaccaagaagggttttactcccctgcatgtagcagccaagtatggaagcctggatgtggcaaaacttctcttgcaacgccgtgctgccgcagattctgcagggaagaacggccttaccccgctccatgttgctgctcattatgacaaccagaaggtggcgctgctgttactggagaagggtgcttcccctcatgccactgccaagaatggctatactccgttacatattgctgccaagaagaatcaaatgcagatagcttccacactcctgaactatggagcagagacaaacattgtgacaaagcaaggagtaactccactccatctggcctcgcaggaggggcacacagatatggttaccttgcttctggataagggagccaatatccacatgtcaactaagagtggactcacatccttacaccttgcagcccaggaagataaagtgaatgttgctgatattctcaccaagcatggagctgatcaggatgctcatacaaagcttggttacacacctttaattgtggcctgtcactatggaaatgtgaaaatggtcaactttcttctgaagcagggagcaaatgttaacgcaaaaaccaagaacggctacacgcctttgcaccaggccgctcagcagggtcacacgcacatcatcaacgtcctgctccagcatggggccaagcccaacgccaccactgcgaatggcaacactgccttggcgattgctaagcgtctgggctacatctccgtggtcgacaccctgaaggttgtgactgaggaggtcaccaccaccaccacaactattacagaaaaacacaaactaaatgtacctgagacgatgactgaggttcttgatgtttctgatgaagagggtgatgacacaatgactggtgatgggggagaataccttaggcctgaggacctaaaagaactgggtgatgactcactacccagcagtcagttcctggatggtatgaattacctgcgatacagcttggagggaggacgatctgacagccttcgatccttcagttccgacaggtctcacactctgagccatgcctcctacctgagggacagtgccgtgatggatgactcagttgtgattcccagtcaccaggtgtcaactctagccaaggaggcagaaaggaattcttatcgcctaagctggggcactgagaacttagacaacgtggctctttcttctagtcctattcattcaggtttcctggttagttttatggtggatgcccgaggtggtgctatgcgaggatgcagacacaatgggctccgaatcattattccacctcggaaatgtactgctccaacgcgagtcacctgccgactggtcaagcgccacagactggcaacaatgcctccaatggtggaaggagaaggcctggccagtcgcctgatcgaagttggaccttctggtgctcagttccttggtaaacttcacctgccaacggctcctcccccacttaatgagggagaaagtttggtcagccgcattcttcagctggggcctcctggaaccaaattccttgggcctgtgatcgtggagatccctcactttgcggcccttcgaggaaaggaaagggaactggtggtcctgcgcagtgagaatggggacagctggaaagagcatttctgtgactacactgaagatgaacagaaaggtcgaagcaagttgcccatcagagtcaaaggcaaggaggacgtgccaaaaaagaccacccacaggccacatccagctgcgtcaccctctctgaagtcagagagacatgcgccagggtctccctcccctaaaacagaaagacactctactctttcctcttccgcaaaaactgaaaggcaccctccagtatcaccatcaagtaaaactgagaaacactcacctgtgtcaccctctgcaaaaacggaaagacattcacctgcgtcatcatcgagtaaaactgagaaacactcacctgtatcaccctcgacaaaaactgaaaggcactctcctgtgtcatctacaaaaacagaaagacacccacctgtttcgccttcaggcaaaacagacaaacgtccacctgtatcgccctccgggaggacagaaaaacacccgccagtatcgcctgggagaacagaaaaacgcttgcctgtttcaccctccggaagaacggacaagcaccaacctgtatcaacagctgggaaaactgagaagcacctgcctgtgtcaccttctggcaaaacagaaaagcaaccacctgtatcccccacttcaaaaacagagaggattgaggaaaccatgtctgttcgggagctgatgaaggctttccagtcaggtcaggacccttctaaacataaaactggactctttgagcacaaatcagc

SEQ ID NO: 795 - DNA, 4311 bp, Homo sapiens
ctacctcctgtcggctgccaccgggcgcatagtgagctcactgctgctggagccggaggactgcgcggcagccgtggcctactgcctgccgcgcgaggcgctgtggctgctgaccagggctgggcacctggtccgcgccaacgcggcgcgctgccccatgagcgtgctgcaccgcgtgtgcccgccgccgccccctgcgccgcagccttgctgtctgcacctgtacagccacctcacggatctcggaggcgccttctcctcctgggagatcgtgcgccagcactggggcgagttgcgctgcagctctgtggcctgcgcctggaagaacaagaaccggtacctgccagtggtggggcacacggacggcacgctgtcggtgctggagtggctctcgtcgaagactgtcttccaaacggaggcgcacagcccgggcccggttgtcgccatcgcatccacctggaacagcattgtgtcttcgggtcagtagctcccctgccaaaggccaggccgccacagagccccctcccctccgacaaggcccagccagattccgctgcccacaggtggggacctgacggtgaagatgtggcgcgtcttcccctatgccgaagagagcctgagcctgctgcgcaccttctcctgctgctacccggccgtggcgctctgtgcgctaggcagacgcgtcaccgcgggctttgaggacccagacagcgctacctacggcctggtgcagtttggcctgggcgacagtccgcgattagaccaccggccccaggacgaccccacggaccacatcactggtgagggggcagcatgggtgaagcccagccaccgcccagctccggttcctgaccctgaaccctgccgccaggcctgtgctgctgccccacgctcaaactgtatgcctgctccagcctggactgcaccgttcgcatctggactgctgagaaccgcctcctgcggctcctgcagctgaatggtgcccctcaggccctggctttctgcagcaacagtggagacctggtgctggcgctgggatcccgcctctgcctggtgtcccacaggctctacctgcctacatcctacctagttaagaagatgtgccggaaggccccagacgtggtggacgaccctccgctgccactgatgagccaggagtcactgacttccgcccaactgcagaggctcaccaacctccatggggcagccagcctcaggtcccatgcaggcctgctcagccctcctggaggccctcctttcccactctgggtgggggcctggcggtgtggggccctctggagttgatacaagcctgcctgagccctggcacacccgtttggggttggtccttgtcccagcctctgccccagcccactggcatgccacccagcatcccacctgtgcctgtccctgtttgcagcgaggccttgtctctcatccatcgtcggagggcaacatctcagcacctggtgccgaaggaggtggggtgggtcctccttagcccgccctgccccggctcaggccccagccgtcagccctggggcaggcctgggatccccatggttgcccgggcagcacatagcaaggctcaaggaagagcaggctgatccctgaaccctgactcaggacttggacgccatagtggcccgggaccgagaccttcagcagttgaggctggggctagtggtcccagcagcccagcccccaccctcctggcagcagcgccaggaaggctttgacaattacctccgtctgatctacggctctggcctgctgggcatgcagtctggaagggggtcccagcagtggagtgccgggaccctcagagtggagagagagacccgggatgtgtgtgctgtaccccaagctgcccactgtcttgcccgggctgaggtcagcactgcagcccaaacagtgccaacagccctgtccccacaggacctgggagccctgggccagcacttctcccagtctccccgagtcacagtgccgatcccacccacccaccgtagggtgcacagcaaggcatcccagatcccactgctgccaaagagatgggacaaggaacctctctctagcctcaggggcttctttcctgccaccgtgcagccccacaagcactgcctgaggcccatctgcttccccggctatgtgcccaactccgcggtgctacagcagatgtggctaaatgcggaggtcagcagcctcggatccccgactcagctcgcctcccagagaaagctcgaggcaaggggcagggctgggggttttgccggcaggggagggctctgctgtccttgcaacccatcaggcaccatctcttgcccctctgcagccaggggcaagccaggattccctgtggttgtggcgccccaggccatcccaagcccagtggcagaggaagctgctccaatggatgggggagaagcctggggaggagggggaggaagacaagaaggaagaggaggaggagaaggaagacgaggagctggactgggccttggcttccctgagcccgcactccaaccagcagctggattcctgggaactggaggatcagagtgctgtggactggacccaggagccccggcggcgcagctgcaaggttgccaggacccaccctcatccctggcaccgtcatgggagtttgctcttggatgagcattacgggcatctgcccaagtttctgcatttcttcatctaccagacctggttcaaaaagttgttccccatcttcagcctgcaggttggagggaactggggatgcatgagaagcatgggttagggtgagggacaggggagaaggtaggggctggcttgggtgtgacatgggagcagggcctcagcatgctaccctgcaggcatacccggaggcgggcacgatcgagggcctggcctcgctgttggtggccctgctggagaagaccacgtgggtcgaccgtgtgcacatcctgcaggtgctactgagactgctgcccaacatgagcagtgatctccaaggccagctgcagggcctgctcgtacacttgctcaacctggaccagccccccagcccccaggtgtgccccttgtcctgcccccagttttcctccccgcccaccggccctcagcaaccacatccccaccgcctgcctcaggaccagacacagaagaagttcgtgatactggcgctgcagctgctcctggcctgctccctggagtcccgggatgtggtgctggagctcatgtcctacttcctctactctcccgtgcactgccggccagagctcaagaagctgctgcacgggctgggccttcaggacccagagggcttcctattcaaggagatgatgacctgggtccagggcccagacctggactccaaggccggcctgcgcacttgctgccaccagaaactggaggacatgatccaggagcttcaggagaccccatcgcagacgtcagtggtctctggggcacccacacgcgcctccgtgataccctcgggcacctcctggtcggcctccggcatcttcgggaggctctcgcaggtctcagaggtgcctttgatggtggtctcacctgcggagccgcactctttagccccggagctccaggcccagcggatgctggcacccacgcgcagctgggggacccctcagctccgtctcagagtgctctccgagacgctgaagagcttctgcctggagcccgaggcccgcctgcaccctgccgggcctgctcagctgcccggagagccgccgccgctggaggagaccgactggtcgcactcgcagctgctggacttgggccccatcgacgcgctcaacttcttctgtgagcagctgcgggcgcagcagcggagttcgctccaggagaaggctgcgcacccacacccgccagtgccctacacggtggcgccggtgcccgacatggtggtgccacctccgcgggagcactggtaccaccccatcctccggctgcaggaggccaagccgcagaggtccgcgaggtccgcgatgagactgaggagccccatgccgtcccggctctgtgcgggccgcaccctggacggccccatccggacgctgaagctgccgttgccgcgtgtggagccgcagcctttccccctggactggcctatgcccccgcgcccgctgcccccgcggctcctgcagccggccctgcagcgctactttctgccagcggacgcggaccctgacacctacagctgaccgggctggtggcctcagcccgcctggctctggggcctgtcattggtatttggccaaggcctgcatcgggaataaagtccagagaatttctttctgc

SEQ ID NO: 796 - DNA, 4718 bp, Homo sapiens
tacattttcttgatgctcctgtcccttatctgatgggccttcagtcaaaagaaggaactgaccgttctaaactagaacttcctcaagaggctaatttgtgttttgtggacattgacaaccattttattgagttgcctgaagaatttccacagttccccaataaagtggattttatccaagaactctctgaggttcttgttcaatttgggatccctcctgagggcagcctacattgcagtgagagtaccagcaaactgaagaatatggttctgaaagacttggtcaatgacaaaaagaacggcaatgtctgtactaataacatcagcatgtatgagttactgaagggcaatgaaaccatagcccgcttgcaggctctggccaagcgtactggtgtggctgtggaaaaaatggacctctctgcttctctgggtgaaagagacaaggatttaaaactgaattgtgaagaggcagaactaagggactaccagctcaatgtacagctccgagaggtctttgctaaccgttttacacagatgtttgcagattacgaagcatttgtcattcagactgcgcaggacatggaatcctggctgaccaaccgggaacagacgcagaactttgacaaagcttcctttctgtctgaccagcctgagccttacctgccatttctttcacgcttcattgaaacacagatgtttgccacctttattgataataaaattatgtctcagtgggaagagaaagatcctttgcttcgggtctttgacactcggattgataagataaggctgtataatgtaagggcacccaccttgcggacatctatatatcagaaatgcagcactttaaaagaagcagcccaatcaattgagcagagactgatgaaaatggatcacactgcaatccacccacatctacttgatatgaaaattggtcaaggcaaatatgagcaggggttctttccaaagttacagtccgatgtcttggcaacaggaccaaccagtaacaatcgctgggtaagtcggagtgccactgcacagcgcaggaaagaacgccttcgccagcattctgagcatgttgggctggacaacgacttgagggagaaatatatgcaagaggcacgaagtttaggaaaaaacctgaggcaacccaaactgtcagacctctctcctgcagttattgcacagaccaactgtaaattcgtagaaggcttattaaaagaatgtagaatgaagacaaagcgcatgttggtggagaagatgggacatgaagcggtggaacttggccatggagaagcaaacatcaccggcctggaggagaacaccttgatcgccagcctttgtgacctgctggagaggatatggagccatggcttgcaggtcaagcaggggaagtcggctttgtggtcacatttaattcaatttcaggacagagaagagaaacaagagcaccttgcagaatcaccagttgccctcggaccagaaagaagaaaatctgactcaggagttatgttgccaacgctcagggtctctcttattcaggacatgaggcatattcaaaacatgagtgagatcaagactgatgttggacgagctcgggcgtggataagactgtctctagaaaagaagctcttgtcccagcatcttaagcagttgctttctaaccaaccactcaccaagaagctttataagcgatatgcttttctacgttgcgaagaagaaagagagcagtttctttaccaccttctttctctcaatgctgtggactatttctgcttcaccagtgtgttcaccactatcatgattccgtataggtcagtgatcatcccaatcaaaaagctgagcaatgcaataatcacatcaaacccttggatctgtgtatcaggagagctgggagacacaggagtaatgcagattcccaaaaacctcctcgaaatgacctttgagtgccagaacttggggaagctgaccactgttcagattggtcacgataactcaggactgttagccaaatggctagtggattgtgtcatggtcagaaatgaaatcacaggacatacatacagattcccatgtgggcggtggctggggaaaggcattgatgatgggagcctggagagaattcttattggagagttgatgacatcagcatcagatgaagatctagtaaagcagtgtcggactccaccccagcagaagtcacccaccacggctaggagattgagcatcacttcactgacaggaaaaaacaacaaacccaatgctgggcagatacaagaaggaattggagaagctgtgaacaatattgtgaaacattttcataaacctgaaaaagagagaggaagcctcaccgtgttgctgtgtggagaaaatggcctggttgcagcccttgagcaagttttccaccatgggttcaaatctgcccgcacctttcacaagaatgccttcatctgggacttcatagagaaagtggttgcttattttgaaacaactgaccagattctagataatgaagatgatgtccttattcagaaatcatcctgcaaaaccttctgccactacgtaaatgctattaatactgcacccaggaacattgggaaggatggcaaattccagattttagtttgccttggaacaagggatcgcctgctcccacagtggattccattgttagctgagtgtcctgccatcactcgaatgtatgaagagagcgctctcctgcgagaccgcatgactgtcaactcccttatccgaattctgcagaccattcaggacttcaccatagtcctagaaggatcactcatcaaaggagtggatgtgtaacccaactggctagaaactctcagtccaaaccttgctccttccccaactaggggaccgatttggacttgtctgacagtagtgagtcactgcaggggcagccaaacatatgccccatttggaacaatcctcactctacagacaaggcaaaatgttgtattgtagttcatttgaacctggaatttagtataaaatagagtattttcatgtgttagatgtgtgtaaatatgctatcttctttaagaaattatattactctaataagatgcttttcttagattgaatattcctgtgacttaaaataagtagcttaaaaatgtttggggttggggggaagagtggtgctagccaggaagaagccagtaaacatgtaaatatagtgcaacccagtcgggcttttttttttctccaggtgtcacaaagaaacccagaatgcattgttatgtagtagccatccatcttggagtctgatcctttgtattgtggatgcacacagctttacctactgtactggtagtcttcacttctatcttttaagttacaaactgttttatatatttgaatcgctagtcacttttccagtcttttggaaaaaaaattcagcccgcacaagatgatataattggagtattttaaacactagaccccaggagcttggctgaactggaaagagaacatacaaagctctgagaaatgtgttcaattgtgggattataacttctttacacttcggaaagattagcctagactaacttcattcttggcatttttgttcttgttatttgaggtactttgggaagatgtgaatttcagtgttagattcatagtgataagaactgcaaacagcaatttgattctgtacttttaatttggccatctaaactgtgcagtggtctacctcttaaggataaccatgagccctgtctttgttagggtctaatcacccacctctccagggcccatcccccctcgggaaatggaaggaatgtctaaggaggaggagggctgtgtgtggcttggaatgtttttgtgaaagcatttgttgaccatgataatgcaaataacagaaggagagagagaatgaaccctttctgggtgtttcagggcaagctttacgttcctttgtaggaaggggagtaataatgtaaaacaactgacccagagaagctaaaagccactggcagcacaggctgacaaaatggaagcaaagcaagaggtggcaacaattttgaaagaccaaaagttgtgagtaactttccagtttgatagtttataaagaagttaagtaaatgtagtattggctagttactgtaagtcctcatcttctggtaggtcctgtaactctaattaggcatttgtacatttttagcagcaaaattgcctcagcagagctcccagttttattcccagttgtggctgaaaagcaaagccatggcatcagtatccttgtgcaatcggaggttgctgggctttcaccacctgtgttgttaaccttatttcctggaggaagaaacaggtgaaacaagtgcctaactccctttatcaaacacagccaaggacagcctcttttaacatgtgacttcatacttgaggaaaaggagagttgacagctgtatttaaaaacccatggagccgggtgcggtggctcacgcctatgatcccagcactttgggaggccgaggcaggcggatcacaaggtcaggagattgagaccctcctggctaacaccgtgaaaccccgtctctactaaaaatacaaaaaattagccgggcgtggtggcgggtgcctgtacaggaggctgaggcaggagaatggcgtgaacccgcgaggcggagcttgcagtaagctgagatcgcgccactgccctccagcctgggcaacagagcaagactccatctc

SEQ ID NO: 797 - DNA, 4503 bp, Homo sapiens
gtttcgtgtccgctgcgtttgggttccggtctccgcttctccagtggccccggtggctccaccgcagcgtctggcgcgctgggacctgcacaggccggagagagccgtaggcaggaccccgggacaccctggaagccaggaaatggactcagtggtctttgaggatgtggctgtgaacttcacccaggaggagtgggctttgctgggtccctctcagaagaaactctacagagatgtgatgcaagaaacctttgttaacttggcctctataggggaaaactgggaggagaagaacattgaagatcacaaaaatcaggggagaaagctaagaagtcatatggtagagaggctctgtgaaaggaaagaaggtagtcagtttggagaaaccatcagtcagactccaaatcctaaaccaaacaagaaaacttttactagagtaaaaccatatgaatgtagtgtgtgtggaaaggactatatgtgtcattcatctcttaataggcacatgagatctcatactgaacatagatcatatgaatatcacaaatatggagagaaatcatatgaatgtaaggaatgtgggaaaagattcagctttcgaagttcatttcgaatacatgaaagaactcacactggagagaaaccctataaatgtaaacagtgtggtaaggctttcagttggcccagttcctttcaaatacatgaaagaactcatactggagagaaaccttatgaatgtaaggaatgtgggaaggccttcatttatcacacaacctttcgaggacacatgagaatgcacacaggggagaaaccctataaatgtaaagaatgcgggaaaacgttcagtcatcccagttcttttcgaaatcatgaaagaactcactctggagagaaaccctatgaatgtaaacaatgtggaaaagctttcagatattaccaaacttttcaaatacatgaaaggactcacactggggaaaaaccctatcagtgtaagcaatgtggtaaagctcttagttgtcccacatcctttcgaagtcatgaaaggattcacactggagaaaaaccctataaatgtaaaaaatgtgggaaagccttcagttttcctagttcctttagaaaacatgaaagaattcatacaggagagaaaccctatgattgtaaggaatgtgggaaagcattcatttctcttccaagctatcgaagacatatgataatgcacactggaaatggaccttataaatgcaaggaatgtgggaaagcctttgattgtcctagttcttttcaaatccatgaacgaactcacactggagagaaaccctatgaatgtaaacagtgtggtaaagccttcagttgttccagttcctttcgaatgcatgaaagaactcacactggagagaaaccccatgaatgtaaacaatgtggtaaagccttcagttgttccagttctgttcgaatacatgaaaggactcacactggagagaaaccctatgaatgtaaacagtgtggtaaagccttcagttgttccagttcctttcgaatgcatgaaagaattcacactggagagaaaccctatgaatgtaaacagtgtggtaaagcctttagtttttctagttcctttcggatgcatgaaaggactcacactggagagaaaccctatgaatgtaaacaatgtggtaaagccttcagttgttccagttcctttcgaatgcatgaaaggactcacactggggagaaaccctatgaatgtaaacagtgtggtaaggcgtttagttgttccagttccattcgaatacatgaaaggactcacactggagagaaaccttatgagtgtaaacaatgtggtaaggccttcagttgttctagttctgttcgaatgcatgaaaggactcacactggagtgaaaccctatgaatgtaaacaatgtgacaaagccttcagttgctcacgttcctttcgaatccatgaacgaactcacactggagagaaaccctatgcatgtcaacaatgtggtaaagccttcaagtgttcccgttcctttcgaatacatgaaagagttcatagtggagagtaaccctatgtatataagcaatatggcaaagttttcagttgtcctatttcctttttttttttttttttttgagttgaattctcactctgttgccctggctggagtgcagtagagtgatctcagctcactgcaacctctgtctcctgggttcaagcgattctcctgcctcagcttcctgagtagctgggacaacaggtgtgaacgaccatgcccacttaatttttgtatttttaggagagatggggtttcgccatgttggccaggctggtctcgaactcctgacctcagacgatccacctgccttggcctcccaaagtgttggattacaggtgtgagccaccacacccggcccccatttccttttgaagacatgaaattattcatatttcagagaaaccctataagacatgggaataccttcagttatttacatgtgaatatgaggaagcattcatactggacaggaaaccctgcgaatgtaggcagtgtgggaaaaccttcaatggtcatatgaccttttaaggaccatgagaaggcatatgaagtgtaaagaattttcatatgccctataaatgtaaagaatttataaccttaaaaatgtaaagaatgtggaaaaccctataaatgtaaaaaatgtagaaaaacctttatttgtcttagtttacttggaaaccatgaacaaactcacactggaaagcgacttcttaaatatagacattgtgagaaagccttcagttggcccacatactaatatgtgagaatgcagaccggatagaaatcctataaaagtgagatatagcaatgttttccattttaacaaatgctcatgtgatactcccttatgtgtgaaacttcaatctcatgttgaaactcccactagggaggtactgtataaatgtagataatatgggaaagcctgatgcaaattaattcatgtatattgttctagaaaattcacaacatgtcagaaatgtgataaaacatattatcagttactgattcttaaaatggatctctgaattatggatttctattactttcacaaaagaacactgagatgagataattctgtaagctcttatacagttgtacacaagttgaattgatagtattttttcattaaatcagtttctgaaattttgtctttccatattgaagtctgttagattcatgagtgaattgaagtgtatttataataagctagcagttttgatttttatgtattttttagttgtgctgtaatgggccatcaaaaaatgacaatttggtaatttttaggatttcctactggccttatgtggcaggtactagatatcattatatgtatttcatctttctgaccaaaagaggcttttttagaggaagacagagtaccctttttttctattttttatgctaaaaaataatcataataaatttttgagtctgcaaagtttatcatacagtatactctctcattggaattattattttcatcttctgtttgctgtttgtaattccttctggctgtgatttgaataatagactttgtattaataagagagatctgagatagaaccatataacctatagctggaaatggctgtcctggattgtgttaacatgggttatgttgtgacctatgttttctataatctaaccttttatggctccacggtataattcaccaatagcctacttgcaggagatatggaaggcagaagtgaagaaagcattagtcaggttttatagccaccatatgtggagacagatggatgcataggagcttcagggacacctgcttccaccacattgtcctgatcctttgctctgccaattgagagtattcttagaaccaccactaactgcttgactgccatattttccttccttccttccttctttctttccctttccctttcttttctttctttactttctttttccgagatggagtcttgctctgtcgcccaggctggagtgcagtggtacgatcttggctcactgcaacctctgccttctgggttcaagcaattgtcctgccccagcctcccaagtagctgggattataggtgcccaccaccaagcccagctaaatttttttgtatttttagtagagacagggtttcatcattgttggccaggctggtctcaaactcctgacctcatgatctgcccaccttggccttccaaagtgctgagattacaggcgtgagccactgtgcatggccccagctgccatattttcaaagatgtagttttccacaaattgtcttcaaaagttctactcaaagatgcactgcagtttggattttcctagaaactctaatgtgtccaccaggcaaccatttagactcttaaggttgggaatattctctgatgctctgactcacctcatctctaggttgaatttatccaaggtattatttatgtaataaacaccatgttttgttaacagt

SEQ ID NO: 798 - DNA, 3256 bp, Homo sapiens
acagccgctgccgctggcgccgctcctcctccgtgtcagttgttgggctgtaatggcgactgggccgcccctgacgaagtgactcccgggccggggagcggggccagacctgcgccagagagaactgcagggggccgcagctcggggggtggcttgccctgagggaggggaggcagcctttccgccttgtcttccttcccagcggaccggcggatccccggagccggtgcgaggagggcacccggtgcgtccccggagcggggaggccaggccgggcagccctggggccggtcggggcggcgtcactgcaccctccgccaggctccgcgggatgcaccgtggtagccgagggcggaggcgacactctcaggatgaggagcagcaaatcaaaagaggtgcctttaccaaatccaaggaactctcaaagcaaggatactgttcaagatataaccacatcgtgggatgcactttctcaaaccaaggctgctatggtagatacctggatgattcttgggttaatgctccaatctccaaatccactaaatcacgaaaagagaaatctcgtagtcctctcagggccaccaccctggagagtaatgtgaagaaaaataatcgtgtggaatttcgtgaacctttggtttcttatagggaaatccatggtgcaccttccaatttcagttccagccatctggaatcaaagcacgtatactgtgtagatgttaatgaagaaaagactgagagcggtaactcgatgataggcagtcgagaagaacggaatatacggagctgtgattttgagagctcccaatcatctgtcatcaatgatacagttgttaggtttttaaatgatcgaccagcaattgatgcattgcaaaattctgaatgtttgattaggatgggagcttctatgagaactgaggaagaaatgcctaacagaacaaaaggaagtgagaataatttgaagctttctgtgaataacatggcccatgatactgatccaaaagcgttacgactaactgactcttctccatcctctactagtacttctaattcccaaagattagaaaacagtgggaacactcagaagaaacaaatggccggggccagaagctgggtcatattgaccatccagtaatggttgttaatgttgataactcagtaacagcaaaagtcagaaaagtggcaacagcaccacctgctccagcatataaaggtttcaacccttcagagaccaagattcgaacacctgatgggaaagtgtggcaggaggctgagtttcaaaacatgagtagagaactgtatcgagatttagcacttcactttgcagatgatatttctataaaggagaaacctgctgaaaaaagtaaagagaagaaagtagtcaagccagtacgaaaagtccaaaaagtagcacagttatcaagtacagaatgcagaacaggtagtagtcatcttataagtacatcttcttggcgagatggacaaaaattagtaaagaagattctgggacctgctcccagaatggagccaaaagagcaaagaacagcatcaagtgacagaggtggaagagaaagaactgctaaatctgggggtcacattggaagagcagaatctgatcccaggttggacgttttacatagacatcttcaaagaaactcagaacgttcgagaagtaaatctcggtctgaaaataatataaggaaactagcttcatctcttccagataataagcaggaggaaaatactgccttaaataaggactttttacctattgaaattcgtggcattcttgatgacctacagctggattctacagctcacactgcaaagcaagatactgtagagttacagaaccagaagtcatcagcaccagtacatgctcctaggagtcacagcccagtaaaaagaaaacctgacaaaataacagctaatgaagatccccctgttatttccaaaaggcgccactatgacacagatgaggtacgacagtacattgttaggcagcaggaggaaaggaagagaaagcaaaatgaagagaagaaggctcaaaaggaggctacagaacagaaaaacaaacgattacaagagctctaccggaagcagaaggaagcctttactaaagtaaaaaatgtccctccttctgagccatcagcagctaggcgactacaggaaacttactccaaattgctactagaaaagaccttgcttgaagagccatctcatcaacatgttacgcaggaaacacaggccaaaccagggtatcagccatctggagaatctgacaaagaaaacaaagtacaggaacgtcccccaagtgcatcttccagtagtgacatgtctctctcagaacctccacagcctcttgcaagaaaagacttgatggaatctacatggatgcagcctgaaagattgagcccacaagttcaccattctcaaccacagccttttgctggaacagctggaagtttactctcccatctcttgagtttagagcatgtaggaattttgcataaggattttgaatctattttaccaaccaggaagaatcataatatggcttcaaggccattaacttttacacctcaaccatatgtgacctcaccagctgcttatacagatgccttgttaaaacctagtgccagccaatataagagtaaactggatcgtattgaagccttgaaagcaacagctgcttctttgtccagcagaattgaaagtgaagccaagaaattagctggggccagcattaactatgggtcagcatggaacactgagtatgatgtgcagcaggcacctcaagaagatggaccttggaccaaggctgtaactccacctgtgaaagatgataatgaagatgttttctctgccagaattcagaagatgctgggaagctgtgtatctcatgcaacttttgatgatgatcttcctggtgtaggcaatcttagtgaatttaaaaagcttcctgagatgataagaccacagagtgccatatcaagctttagagtgagatcccctggtcccaaaccagaagggctactggcacagttatgtaaaaggcagactgactcttctagctctgatatgcaagcctgttctcaagacaaagccaaaatatctcttggttccagcatagattcagtcagtgaagggcctcttcttagtgaggggagtctctctgaagaagagggagaccaggatggacagccccttttgaaagtagcagaaattttaaaagaaaaggaattttgtcctggag

SEQ ID NO: 799 - DNA, 4295 bp, Homo sapiens
acaggcgaggggttgggtggcgtttgagacagcggcggtactgggatgggtaggtgaggatcccgagactgagtgagcttctgcgcgcggtgcttttgggaacgcgggactggcaacctgcggcgccaggagctgggccgaggcgcggcggcgcggctgcgggccgccgtctggatgggaagttacggcgaggtccacccagcgtttctcaggcaatctgaaggcaaatcctgtttagacccaggcgaaggttcctggtgacccaggctctcaccagccaattgtcccttgccgtcctcctgagggtatctggagcttcagtgctgtgtgctcttggcctccacactggggatgccactgactcccactgtccagggcttccagtggactctccgaggccctgatgtagtaacttccccattcggtgcaccaagagcagcctcacatggtgtgggccgacatcaagagctgcgagatccaacagggagccttgggaggagcccgaatcactgatggaatcggacagtgcatggagatggttcagcaggacgaggtgctgaaaactcacccctgtgtgacctcaagtaagccacgtaactctgtgaacctgcagttttatcatttttaaaataaagaaacatgacagattttcattatgacacagaatgtcaggtctcccagatgccagaaaatacatttacttaaagccgttgatacgtcttaaagcggtttccttacagtgtcattggaggacagcgtggagtgcagagagacatgctttgaaatgggattgatccagtcctccttccttcactaccacatgaatgctgggcagcccaggatcacactcactgcaccctcaactcagaccgttacctggcacactggcctcactcttgtcggagactgagctattggcagtgccttcagctctgagctcaggcacctcgaacattgtttttgtcgttaaggatcctaaagtgctgcggggactgatcacatttttctcaacatccctggccccacctcttctgccacaaacgtcagcatggtggtatctgccggcccttggtccggtgagaaggcagagatgaacattctagaaatcaacaagaaatcgcgcccccagctggcagagaacaaacagcagttcagaaacctcaaacagaaatgtcttgtaactcaagtggcctacttcctggccaaccggcaaaataattacgactatgaagactgcaaagacctcataaaatctatgctgagggatgagcggctgctcacagaagagaagcttgcagaggagctcgggcaagctgaggagctcaggcaatataaagtcctggttcactctcaggaacgagagctgacccagttaagggagaagttacaggaagggagagatgcctcccgctcattgaatcagcatctccaggccctcctcactccggatgagccggacaactcccagggacgggacctccgagaacagctggctgagggatgtaggctggcacagcacctcgtccaaaagctcagcccagaaaatgatgacgatgaggatgaagatgttaaagttgaggaggctgagaaagtacaggaattatatgcccccagggaggtgcagaaggctgaagaaaaggaagtccctgaggactcactggaggagtgtgccatcacttgttcaaatagccaccacccttgtgagtccaaccagccttacgggaacaccagaatcacatttgaggaagaccaagtcgactcaactctcatcgactcatcctctcatgatgaatggttggatgctgtatgcattatcccagaaaatgaaagtgatcatgagcaagaggaagaaaaagggccagtgtctcccaggaatctgcaggagtctgaagaggaggaagccccccaggagtcctgggatgaaggtgattggactctctcaattcctcctgacatgtctgcctcataccagtctgacaggagcacctttcactcagtagaggaacagcaagtcggcttggctcttgacataggcagacattggtgtgatcaaggtgaaaaaggaggaccaagaggccacaagtcccaggctcagcagggagctgctggatgagaaagagcctgaagtcttgcaggactcactggatagattttattcaactccttttgagtacctggaactgcctgacttatgccagccctacagaagtgacttttactcattgcaggaacaacaccttggcttggctcttgacttggacagaatgaaaaaggaccaagaagaggaagaagaccaaggcccaccatgccccaggctcagcagagagctgccggaggtagtagagcctgaggacttgcaggactcactggatagatggtattcgactcctttcagttatccagaactgcctgattcatgccagccctacggaagttgcttttactcattggaggaagaacacgttggcttttctcttgacgtggatgaaattgaaaagtaccaagaaggggaagaagatcaaaagccaccatgccccaggctcaacgaggtgctgatggaagcagaagagcctgaagtcttgcaggactcactggatagatgttattcgactacttcaacttactttcaactacatgcctcattccagcagtatagaagtgccttttactcatttgaggaacaggacgtcagcttggcccttgacgtggacaataggttttttactttgacagtgataaggcaccacctggccttccagatgggagtcatattcccacactaagcagcccttactaagctgagagatgtcattgctgcaggcaggacctataggcacatgtaggtttgaatgaaactgtagttccctttggaagcccagtcataggatgggaaagtgggcatggctctattcctattctcagaccatgccagtggccacctgtgctcagtctgaagacgttggacccaagttaggtgtgacacgttcacacgactatgtagcacatgccgggagtgatctgccagacattctaatttgaaccagatatctctgggtagctacaaagttcctcaggggtttcattttgcaggcatgtctctgagcttctatacctgctcaaggtcagtgtcatctttgtgtttagctcatccaaaggtgttaccctggtttcattgaacctaaccccattctttgtatcttcagtgttggtttgttttagctgatccatctgtaacacaggagggatccttggctgaggattgtatttcagaaccactgactgctcttgacagttgttaacccactaggctcctttgagtagagaagccatagtccttcagcctccaattgatatcaatacttaggaagaccacagctagacggacaaacagcattgggaggccttagtcctgctcctttcaattccatcctgtaaagaacaggagtcaggagccgctggcaagagacagcatgtcacctgggactctgccagtgcagaatatgaacaatgccatgttcttgcagaaaatgcttagcctgagtttcataggaggtaatcaccagacaactgcagaatgtagaacactgagcaggacaactgacctgtctccttcacacagtccacgtcaccacgaatcacacaacaaaaaggaggagagatattttgggttcagaagaagtaaatgataatgtagctacatttctttagttattttgaaccccaaatatttcctcatctttttgttgttgtcattgattttggtgacgtggacttgtttgtagaggacaggtcagctgtctggctcaatggtctacattctgaagttgtctgaaaatgtcttcatgattaaattcagcctaaacgtttcatcaagaacactacagagtcgatactgtgagtttccaacctcagcccatctgtgggcagagaaggtctagtttgtccatcagcattatcatgatatcaggactggttacttggttaaggaggggtctaggagatctgtcccttttagagacaccttacttatgatgaagtatttgggagagtggtttttcaaagtagaaatgtcctgtattccagtgatcatcctctaaacgttttatcatttattaatcatccctgcctgtgtctattattatattcatatctctacgctggaaatttgctgcctcaatgtttactgtgcctttgtttttgctagtgtgtgttgttgaaaaaaaacattctctgcctgagttttaatttttgtccaaagttattttaatctatacaattaaaaacttttgcctatc

SEQ ID NO: 800 - DNA, 5088 bp, Homo sapiens
tcgctgcccattctgctggacgatgtgcgctgcgcgggctgggagcggaacctgctggagtgccagcacaacggcgtgggcacccacaactgcgagcacgacgaggatgcgggcgtcgtgtgcagccaccagaaccccgacctgtaggcaacacgccgctgccccaggccatcccgccggcgggggagcctggcaggggccgctccgccctgtgtgcgcccagcgggtgcacacgtgttctagagtgaagggggtgcgggtgtgtgctgtcctggggacatgtgtgaggcgctgcagtgcatgtgtgtcctctgcagacccaaggcaggagtgtgtattgggggcggtgtgggctctggaagtgcatggtccatcatgggcgggaggagttcctttcttacctccaagcgtttcagacaccagcaggaacagcagccgggctgtgggaccctgaggagggagggcagccaggcttcgaggacggacatggcccctggctgtgctaacagaggcacagcttgcagactgagggcggtggggagaaccaggcttgtcctgcccacagctggaatggaaggtgcaagaacagccggagggtggcctgaggaatgtggcccggacagcatggcctggtgcccgcatcccccccaccccctggcagtcagaggcgctggagagaaccggaaggcatccagtggggaagggaaagccttctggaaggtgggagcagggtgagctgcaggcctggggccccactggaggggcaggctgcgtggaggagccagcacctgctcagggaggatggctgtgaggactggatgacctccaaggccgtatgctggagaagccactcagcagcatactcagtccttgtgggtgctcctgggatgggaccagcctcctccaaccctgaggcctgattctctcttgctcttggggcagaagccacccacactagctgggcagagctttcaccctggccctccagtgagtcggtgggcctccactactttcaaagctgtgtttgggccctggggccacctctgtcctttccatccccatccctgctcagtgtaaacccaggagacctgattcctccagccctacctcggggctgaccaggctgggggtccagtgaaactactgacactttttcacccagggctatgccaataatgtggctgtttacacaccactttcctgcctcctctctgacctgcacctgtgtgggagccggggtgggaaccaggagaaaggggtgaggcctcccgcttcccacctgcatcacaggtggaagctccttcactccagggatgctcggccctggctctgtgccaggccgcagaggggcacttagtatgactgcgctcagcctcggatgggagcacgggtgggggtgggtaagcagatgagtcaccaggcagtgaggacaggatgtggcccatgtcgggggttggaagaggtctgggtggggcacccaaacccaacctatgggggggctttgggagggggtgatgctgtgccaagttctgggagctggcaccaggggtggctgggcaggccttggggcaggcatgagtctggcagggtctcctagctgctagtatagggtctcctagccactagtataggatcctgggctgcagcagaaagctttaggtcactgtcttggactcctcatactctgtgctttacagaatgggaaactgaggcacacagaggttagatatcttagggcaccaagccagggaagggagaagtcaagtttgaatacagcagcttagtttagagtctccgcaccctaaccactgccctccccagctccactatgcctgcagagagcggtgtgctggggctcctgcctggtgtgggagtgccagcctggctgggaagcagctgatggagatccctgggggctcctcttgcctggcaggtgcccccgctgctggcctcatgctcctctcgggcctccagtggcccaggggaggttgagtgggcatcttcctgggatgcaggggagttctgagctctgacgccgggcgtgttaggagatagcaggccgttaatgaccatcccagccgaattcctcactgtgcagatgaggaagtgagcgcagggaggctgagtgtcccaggcctgttgccagatgaggccacgctgagactggagccagggaaggtgcagcaagccttgaggccctcaagaatgcagccgagccagggccctgcttgcccggccccagaagctgttttgctcagagctggattaggagggttggcaaagggagctctgggtgcggcctcaggccctccagtacttctctgggcagttcgggctttggccttcagtcttccaggccaggcgctcttcctccccagcctccaactcatcacctctcaggccccaaaccaggcctgggctaggctgcagcctgcctcctggggactcactccacagtccccaggtcagtggtccccaacctttttggcatcatggactggtttcatgtaagacaatttttccatggatgggggttggggggatggttttgggatgaaatgtcccacctcagatcatcaggcattagattctcataaggagttcacagcctagatccctcgcatgcacagttcatagtaggtttcatgttcctatgcggatctaatgccactgctgatctggcaggaggcagagctcaggtgggaatgcttgctccccacactaccctgccccactgccactcacctcctgctgtgtggcccggttcctaacaggccacccatcagtactggtccgtggcccagggtttggagacctctgccctaggtagtaataagagtggacagctgttatatgtaaatacttgttccccgatgctggaaagaaatagcactaaaacataaatttaattctttcagcaaggcaattttactttctgcagaaagggtgctcatcgcagatggaacaatagtgagaggacacctgaacaaaggagggaagcaattgttagcccttatgcagtttgtccctgctactgtgtcctatgtccattggcagaagccagaccgcacaatctaaactaaaacccgattggctgtttaaaatttttctaaataggtaaaagtaatggaaggataaaggaaaagaggaagttgcttacgaaaggacttagaaaagtaataatattcccaaataaggaaggggtataggctgtgagctgggacatgcctgtgagcacgtccagcacagatatcttggttaaagtataaggacatagaacgtactatgtgcctgtgagcacgtctaacagttacatagaatagggcttgacaaagagttattagcataaagcaaggaggtttgaaggaagttcgtctttaaaagaaaccattatttctaacacttacgatttattctttaacaagaagggaaactttcaagaggaacttttactttctacaacagctgacctctgctgagcgcttactacatgccaagcactgctctgaaagtttaacataccattcactcatgtaatcctcatattaatgcacatttactcacgtggaagccgagttccagggcatttgtcacttaccaaatgtcacatagccaaaatttgaatttgagcccaggtagtccagctctgggaccctgctgtgggccttcctgctgggccacctcaagggcattgaaagccagccccaccccactgggacacaagttcagagaagggcagagctggctgcctgtccagtgcttctttcactccaccacctacagctggccgctgagggagcattcacatgtgactctgtccccagggactccgatcttgccttaaagtcctccagggcctctggggatgggggcacagccttcaccctcaccccctctaatccaacctctagtcaatagccaggatcagattctcagagaggggctgccctgcccagtgccacacagcttagtgctggagcctcagggtcaatgctgcaggggtggcccagtgtccaggactgtgttcaagacatcagtcagaggtcacaacatcccaggccctagactgagcctaggggtcaccatgttgataccttagaaatgtttgggaggttcaaggaagctggaaactgggttccagtcctggctctgtgcctctctgagtctcattgcaaaatagaggtcaccagaaggattactggatgaaaaatgaggtagcattgcagacgtgcatggcacgtacactctaggttgcttcctagacagaaagctcagttcgaggctggtggcatccatgctggcagcagccaactgtctgcgacagagtgaggaggggcatgccacgtgaaggaccagcatcagaatgacatgggaagaaactctcacaatagcagaagaaagagctccttcagcctaacatgtagaactcaagtcttcttgtcgcgcttctgtcccctcgcccctcctcccccactgagaactagcttttactgagcagttattacatgccagctacctcgggtgtgtcagctcatttaatcttgacaacagctccacgagacaccctcaatatcactgtccctgttttccagatgaggggacagattcctagggtgttatgtaagtggtccccggggctttagaggcaggtttgcaccaaggcccattctcccagagccggatccttctccttccctgggatacagcacctccaccctgccaggccacccatgtaaaggcagccaattcagagccacctcttatgcctgcatctcccccaacaattcctgctgggaaaccactcctcgtatggtgtcatctacaccagtgggtttcaagcttgagaagaatcaagttctacagggctgcttaaaacacaggttgctgggtcctgtctctcagagtttttgactcagtcttggttgagaattttcagttctagaagctcctgggtaatgctaatcctcctgttctaggggccatagtcattgtccatactggtgctatccaatagaaacataatgtgagccaaataggtaatttaaaatctgcttgtagccatgttaaaaaagtaaaacaggtaaaatt

SEQ ID NO: 801 - DNA, 2660 bp, Homo sapiens
attaaacttcctgacaaccatcatattagcaacgttactggctatcttacagttttacaacagtttttgaaagtggacaattttctgcatacaactggaattactctcaataaaccaggttttgaaaacattgaattgactcctcttgctgcaatatgtgtgaaaatatattctggaggaaaagaactaaaggtcaatggctctattcaagtttctcttcctcttctacgtctgaatgatataagtgcaggggatcgcatacctgcttggacatttgatatgaacacaggtgcttgggtaaatcatggtcggggaatggtcaaggaacataacaatcatttaatctggacatatgatgcaccacatttggggtactggatagcagctccacttccaggaactagaggttcaggtataaatgaagattccaaggacataactgcctaccacacagtgtttcttacagccatattaggaggaacaatagtcattgtcattggattttttgctgtactactttgttattgcagggacaagtgtggtactccacagaaaagagaaagaaatatcactaaacttgaggtcctcaagagagaccagacaacttcaacaacacacataaatcatatcagtacagttaaagttgcattaaaagctgaggacaagtcgcagttattcaatgccaaaaactcctcatatagtcctcagaaaaaggaaccatcaaaggcagaaacagaagaaagagtttccatggtaaaaactcgggacgattttaaaatctacaatgaagatgtttcatttctatcagtcaatcaaaataattactcaagaaacccaacacagtctttggagcccaatgtagggtccaaacaacctaaacatattaacaacaatctatcttcatctctaggtgatgctcaagatgaaaagaggtatctcacaggtaatgaggaggcgtatgggcgttcccatattcctgaacagcttatgcatatttacagccaacccattgccatccttcaaacatctgaccttttctccacaccggaacaattacatactgctaagtcagctactttgccaagaaagggacagttagtctatggccaattgatggaaccagtaaatcgagagaactttacgcagaccttgcccaaaatgccaattcattctcatgcacagcccccagatgccagggaagaggatatcatacttgaaggtcaacagagcctgccatcccaggcttcagattggagccgatactcaagcagcttactggaatccgtctctgttcctggaacactaaatgaggctgttgtaatgactccattttcatcggaacttcaaggaatttcagaacagaccctcctggagctgtccaaaggaaagccctccccgcatcccagagcctggtttgtgtctcttgatggaaagccagttgcacaagtgaggcactcctttatagacctgaaaaagggcaagagaacccagagcaatgacaccagtctggactctggggtggacatgaatgagcttcactcaagtagaaagctcgagagggagaaaacattcatcaaaagcatgcatcagcccaagatcctttacttagaagatttagacctaagcagcagtgagagtggaaccaccgtctgttcccctgaggacccagctttaaggcacatcctagatggagggagtggagtgatcatggagcaccctggagaagagtcgccaggaaggaaaagcactgttgaagattttgaagctaatacatcccccactaaaagaaggggcagaccaccactagccaaaagagatagcaagactaacatctggaagaagcgagaggaacgcccactgattcccataaattaactccaatggggattgtgtgtctgctgtctcgtgctgtttattcttgcttcttgttgtaaattgcagtacgaacttaagaaaatgagactgagcaatctcatggttcttggacatgtctcaagcagagtaaatggtaattcagtaatcagagagaaagataccaaggaatgctttttctggcctattcatttatttttgggtgatgaatttacagtatctaagttttcaaaatgtaaaatagcttcaagatgttagttatctgaaaatgttgctcagccagccagtttggccttgactctcttaagaataacagtgaaatatatactcctcaagttgcctccaaaaatgttgcctctaccatggtgactaccccatggaacatttagaaacaaaactgacttcaggcatcatattattttaaatgttactattacgtcttcttctgcctatacttaaaaataacttgataaatgacttggactgatgttactctggagttatcacaaagaaaatgttgtttggtctttaaagagcatgtgtattgtatcatcccaaacgtaaatcctacatttatataagatgggcaagaagctacttggtcattagagagggagacaccagctctttggttgtttttggatataactttacaaaataagtaagatgttaatttagaaatttgagaaattaatgctctaatactgagtttttatttaaaaattattttttcttcccctcaacaatgaagcaagcttagctgtcaagggaaactttttacaaatctg

SEQ ID NO: 802 - DNA, 3666 bp, Homo sapiens
tgccaacagccccgaggtcccagtaaagatcctcaactgtgacaccatcactcaggtcaaggagaagattctggatgccatcttcaagaatgtgccttgctcccaccggcccaaagctgcagatatggatctggagtggcgacaaggaagtggggcaaggatgatcttgcaggatgaagacatcaccaccaagattgagaatgattggaagcgactgaacacactggcccactaccaggtgccagatggttccgtggtggcattagtgtccaagcaggtgacagcctataacgcagtgaacaactccaccgtctccaggacctcagcaagtaaatatgaaaacatgatccggtacacgggcagccccgacagcctccgctcacggacacctatgatcactcctgacctggagagtggagtcaagatgtggcacctagtgaagaaccacgagcacggagaccagaaggagggggaccgggggagcaagatggtgtctgaaatctacctgacccgactcctggccactaagggcacactgcagaagtttgtggatgacctctttgagaccatcttcagcacggcacaccgtggctctgccctgcccctggccatcaagtacatgtttgacttcctggatgagcaggctgataaacatggcattcatgacccgcacgtccgccatacctggaagagcaattgcctgcccctgaggttttgggtcaacatgatcaagaacccgcagtttgtgtttgacatccataagaacagcatcacagacgcctgcctctctgtggtggctcagaccttcatggactcttgctccacgtcagagcaccggctgggcaaggactcgccctccaacaagctgctgtatgccaaggacatccccagctacaagaattgggtggagaggtattactcagacatagggaagatgccagccatcagcgaccaagacatgaacgcatacctggctgagcagtcccggatgcacatgaatgagttcaacaccatgagtgcactctcagagatcttctcctatgtgggcaaatacagcgaggagatccttggacctctggaccacgacgaccagtgtgggaagcagaaactggcctacaaactagaacaagtcataaccctcatgagcttagacagctgagaaccgtccttccagggtcgccctggagggggacacaccaagccgtgcctcagtctagattatcatctttaccaagtgcaagttccgactggcatcagcagcatcccctgagcagcgctatttctctctctttctctctgcctctttccgtttctccctccttcctggatctcttctcttccagttgctctgccaacacgattggaccaagccactgaccctcagttagtccaagaatggccaggcccatggcaagggagctgaccagaagatgtcagagaggcctctgtctcccaggtgctcctgaccctgtgcatgtcagcagcagggtgcaaataacgaatgaggagccagggacagggggcatttctgtgctgctacttcaccttccactttggcagcccctgctttggtctgagccttggcctagggaagaggcaaggaaggacttcagtattatctttactgggaagacatcacctggctctcccttcccacagttccatctccagtggttcagccagtggtctgatcgctttgcagctgtgagaagaaaggctacacctcctgcatgtggctggagcagggcatgtgtgggcagctgggaggtgctccttgaggctccttctcccccactgggctggtgtccagaggcttcctgtccttttccaggtctccagagggacctgcctgccctgcctgctcccctgccagtagaaagccaggcaggagaaagaatagcaattacattccaccatggagatgctcctgaccttttcatctgaatcctagtagcagaaatgtaacacagggggaaaaaaggaaagagagttgcatctaccctggaagcagaatttgttttccatttaccctcaaattcaaatgagtcacaatcatagtcataggtctagtccactaccagagccctgagtgctgtcaagagaaagcatctatctccaccctcctttgtcaaccttcatcaagggtcaacgtgaaatgcagagtgcatctaggagattctacctccagccatctccatggctccatccccaccatccttcctgagaactccatagacggctggggccaacagcctagtccctgttccctctgcagaatccggtgccattgctatgcagatgactttgtcactgggctgtccagacctctttgggaatgatttcatcaacatctcagctgtctctcatcattctccttcctcatctcttcagcagtcatccttgaaagaaacagacttaagcaaagcctcacggagacagcccaaaatgccagccaacctcagcctccagcttgtcagatctgggagggacaaagagtcgagctgatgggcctggctggaattaagaagagggacatacaaatgaccttggccttggcatccatctccccatctgttcttacatctacagatgcacgattttagccaggcaggcaaatgtgtgcctagaaattgatactaggtaagcagaggctatggggagagatggtctaatggagggttctaggaacctttcatcctaaggagaccttaggtgctgtctggtgcagtctcccatcctaagcaggagtctctgttggcacctctgctctggagttgttcaccactatgggagacaaggagaaacatcttaggtgaggttgaggagaaggattcacagtcttgccttcactccccaaacatcagacatcattccttgtcacccactcagaatgagccccccttggggaagaaaccacaccatttccagcaaagttcatggagcatccggtacttttaagaacacttgcccctttggatatgaatatgtgtacatgtgtgtgagcacatgtatgtgtgtgtgtgtgtctgccccaggtgtaggcggaaagctcaaaaggatttcttgtcctttgtaggaggatttttgaagtgttccccttgctcatccattcatcctgcagcttcaggacatttcaacacttacttgctttctatgctgagagctggtgggtggaaggagagggcgcttgtccataggaaatcagggtggtcgcctgccgaggcctggaccttggaacagggcatcatgtgacatcgcagaggacagatggtggaaaagacatgagcaacctaatgggaagaggaaaatgggaaacaatgcattggaagaggaagaaaaaaaataaataaccaaaggttttggcaagtgcagtaccaggtggagaagcttgacttttctatccttgatcattttattccctcccaagaagtcagtcacaggacctggaaggccagaaagggtgcatgtgggagacggtctgaggaagtacctcggtcactacaatatttttgcacatataaagggttggggaggaaagagacacaaacgtatttaacacagatttgctggatggaagctgcgtgtgtgaacgtgtgtatgagtgagtgcattttgatttttttttttttttttttgcacagttaagagaaaaaatcaaacaagcag

SEQ ID NO: 803 - DNA, 2690 bp, Homo sapiens
acagtcttgttgaccatcagcgagttcacactggagaaagaccttatgaatgtgacgaatgtgggaaatcttttagccataagcgcagccttgttcaccaccagcgagttcacactggagaaagaccttatcagtgtggagaatgtgggaaatcgtttaatcacaagtgcaacctcattcagcatcagcgagttcacactggagaaagaccttttgagtgtacggcatgtgggaagttatttaggagcaactcccacctaaaggaacaccagagagttcacactggagaaagaccctatgagtgtaaagaatgtaggaaatcatttaggtacaagtcacacctcactgaacaccagagagttcacactggagaaaggccatatgagtgtagagaatgtgggaaatgttttcatcaaaagggcagtctcattcaacatcagcagatccactctggagaaaggccacatgagtgtggagaatgtgggaaatgttttcgtcaaaagggcagtctcattcgacatcagcagattcactctggagaaaggccacatgagtgtggagaatgtggaaagtgttttcgtcaaaagggaaacctcattaaacatcaacgagttcacacgggagaaagacatcatgaatgttgaaaatttggcagatctgttggtaaaaagagcaccctcattcaacattcgtgagatcacactggaaagcacttatgagtatggagaatgtgcaaaatcatctagccaaaaggttggcctcattcaacaatagcaagattacactggggaaaggctttctgagtgtagagaatgtatgaaatcctgtacatagaagttttgcctcaccaaataccagaagggtcacactggagaaagaccctatagttatggggaatttgggaaattacctaacaagaagtcccacctcactgaacactactgagttcacagttgagaaaggccatatgactgtaaggaatttgtaaaattatttagccagaagagctgcattactattcatcagataatttacaatggagaaaggccacataataatttctcacataataaatgtgagaaatcatttccgtacagctctgcgctccatgttcgtaagagttcacactggacaaagccttatgagagcagcgagtagaaaatcctttgtgggaaaactctggtttcattaaacacaggagagttcatgctagagaaaggcctcaacagtgtagcaaatatggaaagacattcactagaagctctgccctgcaagttcacactagagaaagcccttctcagtgaagtaaatttggaaaattgattagtcaaacctctatgctccttcaaaatcagagttcacactggatcaaggctttatggtgtgacaaatatggcacattctttatctaaatgtctaacatattatgcacagacaagctcctgctgtggaagtgccttttgagtgcagagcatttgcgagggcttcactcttctttcactggataccagaatgttgacaggagaaaaataacatagatgtgtgggaatattacttcttgtccagtgtaactgtgggagagagcccttatgaggacaccatcaacctatattgaatgtcatatgtccagtagctgcataaattccagggaaatgatgtcactctgaaactcaggctggaatacactggcatggtcatacctcactgcggcctcaaactcctgggctcaagtgatcctcctgcctcagcctcccgagtacctgagattagcccaggtaatttaagaattttttatagagataggtttttgctattttaccctgactgatgttcaactcctggcctcaagtaatcctctagcatacgcccttgaaagcactaggattacaggtgtgagccaccatgcccagcccaaaaataatttttgtagaattagcatttctaggtagtgaagcagactgcaacagaatagatgtggcctttgcaaccagccagcattccaatttaatcaggtggaaatgatcttcctggctcataagtatttggtatcacacaggctaattgccccccttagggcgtgatgagagttaggagagtcaatgtaaaatcacataacctatttgtcaaaaataatgttaaatccagatagttctttcaaattaaatttttaaagctgtaataagactgggcatggtgactcatgcctgttatcccaacactttgggagtccagggtgggagtattgcttgaggtaagaagtttgagactagcctgggtcccatagtaagaccctgtctcttaaaaaataaatactatctttctctctggcctctccatcctccagacaatcactgaattacaatatttgcttaacagtagattaatgtcaattttctggaattttatatgactgatataacatgtttcctcttttcatacctgagtactctcctgagccctatttatttagatgttcttcttttttctttattattatttttatttcacatagcagggatgcatattttgacattcatcaatcatgatatatgagtagttcattctttttatcttagaatatgacatgctatggaaatcactgtatacgaattcatctgcttatggatatgttgttgcttcttatttttgtctgttaggaataaaactgcttgttaagcacatttgaatgc

SEQ ID NO: 804 - DNA, 3955 bp, Homo sapiens
tgtcttcaccgcggtccgctcggttcaccgcctgccccctctccctgccgcccggcccggctcgcccagtccagtggctccagtccgcatctcgccgccgcccggcccaggtggtgctgatcctgggcacgtccatcctagacctcatcgagctacgcgcgcccttcggcaccacgggcttccgtctcaccatggcgctgtcggtgcccctgctctacagcttggtgcgggccatcagcgaggcgggcgcgcccccgggatcggcaggacccctgctgctgcagccccagcggcaccgcgcggccggatgcttcctgggcacgtgcttggacctgctcgacagcttcacgctggtggagctgatgctggagggccgcgtgccgctgcccgcgcacctgcgctacctgcttatcgccgtctacttcctcaccctcgcctcgccggtgctctggctctacgagctcaacgccgcggccgcagcggctgcatcctggggccaggcctccgggcctggcagctgcagccgccttctgcgcctgctgggcggctgcctggtggacgtgcccttgctggcgctgcgctgcctcctggtggtcagctaccagcagcccctctccatcttcatgctcaagaacctcttcttcctcggctgccggggcctggaggccctggagggctgctgggaccggggcaatcgggcctccccgagtcgggccagagggggctacggtgctccgccctccgcccctccaccacctccgccaccacctcagggaggctcccagctgggccactgcatctcggagaacgaggggggtgctcatggctatgtcaacaccctggctgtggcctctcagaattgagggtgaagggcacgggtccttgtttttgggttgagagtccccaacccccttgtcttctaccttctgtcacctagatttgatcagggtctatttggaagaggtaacccttttcagggctaagggccagggtgtccttctgcaccctggggtgaggacggcttggagggagaccagcagttaacggtgagggaggtaggtgcacttaccctctcctctcttctcctatcctaccccaatcctgacctccaaggggctggtacctctgcttcttgctttgcccacctccactctaattcccatccattaggaggagaggggtgctgggccttggaccttctcccttgcttagaagtgccagcctcttttaggctgtggttagtggccattgtcccatgccttgaaattgacccagaacccactttccactgatgtgtctcttggatttcttccaggtgatagatacaaagtgtatgtctctgtgtgtgtagtgttgttttctcgtgtccaccctgtggccctttgcaatgggtaggagatctggggaggccctgccccctacaccatacttatcaccaccctcctcttttctgcctggatttgtgaccatgaattcccaggaagagctgggcccctgggagctgcccaggtactccccttgaagggagaatctcacccaggatcttcctcaatactgctcctctcttctcagctcagggagaggaggggatccattctctaaggaccaaactgcaccctttcttgggtgagtgagcatttctacctccgtgctttcaacttttgttgcatcatgcactgatgctgcttgcaaaaaatgaagacaaaatactcagaagttgcatttgccatggccactggctccagctggggtttggtgccagtgttattacagggtctgcggagtatcagccattggcttggcctctctctgttcctccctctgcacctagaactcttatccttcctgtggtttggtgccgactgggttggatctgggcttagagtaatagctttggtgggtttcctggatggatgtgaagttgggcctcccatgggcccaagggagtaagaagccccattccccacctgtccttcctctaggaagtgtagatcagaaagtgaggtggtgacctcccacctctggtctggttaagagtctcactagggccaaggcaggctgcagaactttccctcttcctctcattgagggtgatgacaagagacatccggggactgtgcacttacagtcggtgtggaatgtcactcttgcagtctttgaggcaggataagtatttttacatattttaagggtgcaggaggacagcagctaacaaggccaggaaatactcacttccctccaccctcaacaggatgtggtgggggtgaaacttgaagaatttttgtttccccttctcccttcttacgtttgggaagttttatgtagtgtaacaaactctagacgagttaccagaagatgtggattctagttctgattctgtcactcattggctttgagtgacatatttttatttcctgggcctgttttctcacattaaaaaagtagaagttagatgagtgatctctaaggttgaaggtaatttcagctctcacattcttttgagtttgtggctcttgaaagccctggtcctgatgctccctgtaaaggtggctgggagagaagccagccaggctgcacttgcagaacattccctgctctgtactgggtgtgtgaagccccagcagagaaggccggagggagggcttgggtgcctgggctgggtgtggggcagggcctggcacagctgcagagtgcacagggagggtcagaagtgccaagtcactggccgttaactcagcacccaggccaagcccccgcctcccacttgaagccccctcttacaactgttttgggggcttggagcagaagacacccttgtagacagacataagaggggcagaaggcttgaccagagttctcttgagcctcctcatgctctcagagcagggaacagcgggggaaaatgtttacactccatgcacaatctgtgcttccagtccctcaccctatgtggcccaatagctggctggatttcacacttaattggtatttttttctgccttcttcccctgcccccactgactcctctcctctccctttgattgtactcaaggttctggggcctgggccctgggtgggtaccaacagctgctcgctgttcccatgtcctctctccagctttgctgtgtttctctgctacctaatctcagtgactgtgaaaggacattgtgcctgagccatggccagccgctggctggccccctgatctgccccccttctattgtttggatggccatctcctgctgggcctccctgactgtaaaatctctgtactgtttgttaggtttttggtgggaggctgtgataagttccaatgagctgccacttccctggatatgtcaagaagctgatggcaacttggccaattctggcagatatcaggcccccagttcagccccagtcaccctcttttacacatgtgggtcaaccactgtgtgctcagagggtcagtcccttcctctgctgtgtttttcttgagtccttgcactcacttcccctgccccagtcacgatgacccctaaagcctcctttgcccttgctttctagggcatccctagtgaaggggcaaacctgagatttctccgtggacctgacagccaaggcagggcactgtctcctgaggccagtgccagcacgtgcatggttcacagaaaaggatcctgggctcagaatctcgagaaccgcctgctcctaacaattcagcaagtcaggggcttcctctctgttagtccccaaatccttacttattttaaaaagactagaccctctctaaagactgttccattttaacatgtcctgattctgcatccgtgggttttgtggaagagagctagctggcggttagagcctggaagaaggagggaagtggcacctcactagcatttatcacttttttccttctctttttaaaaataaaaccagactctgttctgaaaataaaaaacttgagacttgt

SEQ ID NO: 805 - DNA, 3688 bp, Homo sapiens
ccctttcttccctctctcctctctctctctccctccatccctctctttccttctcagtttgtgactgacccagcagccccgtcccccgtctgccacaagcagtccacctcctggtgctgtgtgctgcgtgccagccgctgcccccgctgagtggagactctggcaccagtgcccactgcgctctgcctgccggtggtgtctggatttctataggaatcccaggagggtcttactggagggttgagagccacctgattgaaggcatttgcagtcagaataaagacggctgccgcagcatgaacccctgagctgatgagtcttattatagcccggctggcggaagacagagtgctgctattcacctctgcgtgggcgtcggtggtgcagggggaagcagcaggccatccagcggctcacaccctacgcggctgcagctgccaagggcctggcccctgcctccctcgggccatggactgacaggcggcgcacccaggggctcctctctccccagagcgacagggcccggagagccgtgggcctcaccatgctggcgccgggcagcagccctgggcagaggggcaggctcgccctgcagtggaggcaagtctcctggatcacctgctggatcgccctgtatgctgtggaggccctccccacctgccctttctcctgcaagtgtgacagccgcagcctggaggtggactgcagtggccttggcctcaccacggtgcccccagacgtgcccgcagccacccgaaccctcttgctcttgaacaataagctgagtgccctgccaagctgggctttcgccaacctctccagcctgcagcggttggacctgtccaacaacttcctggaccggctgccccgctccattttcggggacctgacgaatctgactgagcttcagctgcgcaataacagcatcaggaccctggacagggacctgctgcggcactcgccgctgctccgccacctggacctgtccatcaacggcctggcccagttgccccctggtcttttcgacgggctcctggctctgcgctccctctcgcttcgctccaaccgtctgcagaatctggaccggctgacatttgaacccctagcaaacctgcagctgctgcaggtcggggataacccctgggagtgtgactgtaacctgcgtgagttcaaacactggatggagtggttctcctaccgagggggacgcttggaccagcttgcctgcaccctgcccaaggagctgagggggaaggacatgcggatggtccccatggagatgttcaactactgctcccagctggaggacgagaatagctcagctgggctggatattcctgggccaccctgcaccaaggccagtccagagcctgctaagcccaagcccggggctgagccggagccggagcccagcacagcctgcccacagaagcagaggcaccggccggcgagcgtgaggcgagccatgggcacggtgatcattgcaggggtcgtgtgcggcgtcgtctgcatcatgatggtggtggccgctgcctatggctgcatctacgcctccctcatggccaagtaccaccgggagctcaaaaagcgccagcccctgatgggggaccccgagggcgagcacgaggaccagaagcagatctcttctgtggcctgagcgcccatccccacccggccaggtaggaagggcggggagagcacacggcattgctcagccacagctcccaccttgacccggcgctggccactgcctccccgagtccaccctcctccccgccctccagcagacaagccacaccgggttctctccctgcactttcgaggctccctgaaagccaccgtgctgggggctcctgctgatgctcctgtctgggccagtaaatctttggaacatgtgggggatctccctaagctctggccacagcaaagcaaggaggtgtgtgcaagaggaggcttccggactgggcattcccctgtcgcccttcctgccctggggtggccatagctggtgactcttcctaccttgctggtcccacctcacctgcattgaggggacggggagggagggatctgagggatgaaggtagatttctgagactctctcctaagccagaaagacgttcttaacacccctgcagtgtgaaagctggtccagctctacaactgttggtaccaatgtgcaaacacaccagccctgccatctggacccagcactcagaaacaccatacacccctggccgacgccatcatgcccctggatctgctataggccacactgaccacatgctcctggattcgctaattcactcacacacccattgcatcaccagtgcggtcgcatggattgaaagaattaatacacacacacacacacacacactcacacggtcacacggagaccgaggctatgagcgctcgaacagcagagacatgctcttccccaggggtctccctgagaccacagagcctctcgcgtgctcactgcaatcttctcaagtcaacagcaggaaggaactcaaccagtaacaccaggatcctttgagatcctctaaagtgggccaaagtggtgcccctggaggagccctcctgtcaccatggtaaccctctcacacctctcctgctgggctttcccgggataccacccaggggcctggagcggctgcatgtgtgcatggcggcctcctgaggacccagccacacaccactggtgttgcctcggtcctgcccacgcatctcacagcaccaggccctgtggggcccccactgattcctccacagcctgcagcctggcaccgtgactctgtgcctctcgccctccatcttcagtactcctggcctgtgacttcagggctgggacttggtggtgctttgccattggtggcaccctctggggaaagcaggtggcaggcagagaacacggtggctcccctgaggctcattgcctgccagcttattgcagacagagcccaggagcaggagcgggtggccacgtgctgcccagaggctcccaggatggggcctctgttcccgggctttgtctgctcagtgtggctccctagagcacccagccggggccaaaccagagagtgggtggggagcctgtctgggacagagccacctgctgccaaggcagtgcaagttttccaggttacctgtccccctccctagctctgcccctcctcagagtgtgaagatggtgggtacctaggtgtcatgctcacaggctcaggaggcatcaggctcgtccctggctctgggatggaatctcaatgggggctcaggaagaggccagcaagaaccctgaagccaagggtctgagcagagggagttggcaggcctagctcctgtgccccactccgaccctccctgctcatgcggcagtgggtgggtgaggtgggctgggggcctggaggagtgcctttgaggaggtcagtcctggcaggtggacagaggacgcctggcatgggctgcttactgggaccccaggcggccctggccatggccacagtcttccttcttttggcgtgtgggctggtaccagatctggggattttctaaagggactggggggaggggagggcattgtcaatggtggtatctttagcctgagacagaagatttttaaaggcaaaattatatttctggtttgttgtttcagaagaccaataaagactgtattttcctatgt

SEQ ID NO: 806 - DNA, 3097 bp, Homo sapiens
ccttactcgctggcgcccaagtgggaagccagcagctgcccgctccctcctccccacatccccgctacttgcccagttcccgaagcgaagcgcaggctgcgagccagccgggccgagcccacaactttgcagcctcgggcagggcgagagccggcgtccggggctcctcttgtcggcgaccagagctcggaatgtaatcgaggatgctggccctgcggctgctcaacgtggtggcccccgcctacttcttgtgcatctccctggtgaccttcgtgctgcagctcttcctcttcctgcccagcatgcgcgaggaccccgcggccgcccggctcttctcgcccgccctgctccacggggcgctcttcctattcctctcggccaacgccctgggcaattacgtccttgtcatccagaactccccagacgacctgggggcctgccagggggcctcggccaggaagactccatgcccctcacctagcacccacttctgccgagtgtgcgccagagtcaccctgaggcacgaccatcactgtttcttcaccggcaactgcatcggcagcaggaacatgcgcaacttcgtcctgttctgcctctacacctccctggcgcaagaacttacaagaggtcttcggaaagaggtggctgctgggcctgctggtccccatgttcaatgtcggaagtgagagctccaagcagcaggataagtagtagacactcccgtcatttatctctctgtctctgtcttgactcctcctgagcataaaaccatggcagccttgtctccacccatgactcactacaaccttgtgctggtaaggtcctagcatcttcccctcaccttccacccatgagaacagcgtgagctggtggatcatgacaaggaggaaaaatgtccccccaggcatttctaggctcctcacgagccagccaggtggctgctagctgttaggctgcctctgctttctttccgtccccttgggatccctgctttccccctcttcctggctcatccattctccaccgtgtctcattcatcactgctgtctgctagagcccttcctctcagcccccatgttgggagaggggagtggattcttgctgctggtatgagactccctgggacctagaggctggcaaatgtttaaaatcaccacgtgtaagaggcagccaagtcagctctgccaactgctaggggagttgggaaagagtgggtgtgtgtccgcatcccctctgtaggaaaaagaacttagtagcttgctgctccctcaccaccccccaccaggttcaagaccctttttctgggagacagcaatcaatggcctgctttttccaaatgttattccctgtccgccctgccccatctggccggcccagcccagtccaggacctggctggatgcttcctgtccctggaactcttccagcctttctacttgatctccagcccccaggtctttgccagatgatgggaaggcaaggaagaagggacagggaaagataattactgataaatgaaggggatattcgactgtataaccatatggaagtgtgtgtgtgtgtgtgtgtgtgtgtgtgtgtgtgtgtgtgagagagagagagagagagagagagagatgggtggtggtgagaagtgttgttagaaacatataggaataatgcctaggggaaagggagaagtgagagggacaattgggttcatttatgccctatacaaagggcattccagcagctgaaactcttcaatgtttgaatggctgcctgtgaaggtagtgagtgccccatcactggaggtattccagcagagtctaggcagtcgtctgccaggcatgctgtggaagggatttctgtacagggtcattctaggtgagcttacacattccttccaaccccaaggttctgatgtcctggttgtgattgctggacccagaggcaagatctgcagagatgcctgtgagatatttgctttcctagaggggagtgtgggcatgggaggggtctgaaaatcaggacccaacccagccactgaagagagagtctctgcagagacagggctacctgggtggttgaggggactgacatttgaggacagggagatggagcagtgtcattgtcagtggcagggcatggggggcagtggtgagctaaggctgaggagtggagatgaccagaatataagggtgcaattcccagaccatccctgcgcatctgactgactccggtggaggcactgctgtgtgttttctgaaacctagaggaccagacccctcctgactgggtcccaaagccaatatgacatccatgcaggcagcagtgctgaatccatgccctgcaatgtccaacccccaactgcagtgacccgctgatagctgcgcaacagcctgggttcttgagcagagattgggaggactttactgtggttctgccttcacaccccctagagagctaatgtagtattggctccacctgctcacatttctccctcccatactcattccttcactcatccatcctacgtatatttattgagtgccaactacgttcccagcctcttccaggcactggcaatgcagtgatgaacaggatgacaagattcatgccatcaggggcaccttgtcactgccgtctgtgcactgattcacactccctgcaaaatggtcactctgccatcttggtggttggtggggcaggtcatttggaaataaagaatgtgatagagatggctgaagaggggaagcctaggctgcctcaatggaggagtcgctgggggcattttcacccacaattctggccatacttaagcaatgggagggagagggaggaggggaagatctgggcaattttggccttgactctttcctggctccagagctcaagcttagaagccagccctgctatttccagcctcctgaaggctcagcacggtgaggcctgacatcctggggaagggcaacagggagacctacaggatgttggctgctcgcagactggtcaatgggggatgacggtggggaggttgccagatgtgagacttgagtagcatttgtacacatggccctgtattgtccttgaagaacatcaataaaatatatggtttt

SEQ ID NO: 807 - DNA, 2648 bp, Homo sapiens
agattttctttgcttaaggagaacggacattgccttggtatgttttttttttttttttccctccacttttggagcttatcaggtaaaaatctcaagccacatgaattgttaacacctctgttgggaaaagcctttgtgagtttttatgtacttggtctttgtttttgttattcatcctgtgtcctccctcttcccgatgtgctgttttacctaggagttagtctgctttctgaggatcttttagagagaggctgtgaagtgctgaatcacctttaatgatacagcacttctgccatctcagcatctacataggacttacatagacttcctgaatgtgtcttcttcagatactaaagtacagttggatcattttcttatctccttttcttaagcagtactttgcaggtactcccctttgaaagccagaagcataaaccattggggaatcttaacttgtagacatgcagtaaaagaaatgcatttatgtaagatctgtgagtacttaaaaggaaagccctcagtgtgtgtgaagtgaatgtgaaatgtgtgtgaaatacatagaattcccaaatagtttagcaaaggcagggcgcaatatcaagtaatttaaaaatggtccaaggaactgtaagaaggaggaactaattctagaataaatgttaaaatgccattcaagaacaaaaccacagatgccatacagacctcctgtgcttaagttatagaagaataaaaatctgaatgaatggaaggccttacgtgtatacagtttacaaattcctatttctaaaatttaagtcccttatttaacagaagtatgtattttaatgcttaactgtctcgggaaacctcatttgtgacatcatctaaggggatgggaagactagggagccagtgccacgttgaacagaacagtggtttagtgaatgtgtgaggaaagacatgggcaactgattattaatgtttttgtaattcagtttataacttggaaccaatgaaaagcaacaaaactaaactggtttgacagcctgccacttctggcatttcctgtaagtcactagcagtaggtgtgaggtgggcttgcccatgaccaggaggggtgtgtgtgtgtgtgtgcatgtgtgtatatgcgtgttggtctgcagtcacagcatacctttatgtgcatgtgtcctcgcagcttgggactcagcagtattctgggagggtggaggtgaactgtcccatgtattgtattatatattttttgagatggggtcttgctctgttgcccaggctggagtgcagtggtgcgatctcagctcactgcaacttttgcctcctggttcaagcagttctcctgcctcagcctgccaaatagctgggattacaggtgtgtaccaccactcccagctaatttttgtatttttagtagagatggggttttaccatgttggccaggctggtctcgagctcctggcctcaggtgatccacctgctttggcctcccaaagtgctgagattacaggcgtgaactaccgcgcctggccccatgtattgtatttttttcaggttatattgaaatctactaccaggaatgtcggaatgggttttggtatgtataatggaaatagatagagtggttaagtctagaaacacatacattaattgtattgaaatgttatatcaatacatcatttatgatgtgtgtgtggtcccagacctcatggccaccagtttgtttaagcattgtgaatgctttttaatagcattcattagcattaatggaggaggacactgtgttttctcaattaatctcattgatttgtttggtataagtttgggtcagaaatgaaactgccaaaacatcgatcagtataaggaagggacacagggcttaaaatgtccacagtcttggcagtggacttggcagttctcccagtaagcagaagtacttgagcttaattctgaacttcaaagtaatattttatacttaattttaggagttttcatttacatattgaaaaatgccttgactgtattcacataaatggtgctaaaacattgtaccccttataagaactgcagcaatccacagtaatgttggttacttctgagtatttgataaaggaacaaagtcaaaatgaatgtatttaataagcttctttctcatttccattgtttttataaaaatattctggtattgttgcctgcattttagccacttctaactttttgtattatgaatttggagaggataacaagccaactttagaccctctgccagtggcgatggtgtttttcttccatgggtaagccattgtgaatggaggctggtggagcagcacactgtgtgaacctggcagcgctcatcttggcttgtttagcagtgcctctgtttacaccataagatgttccgcatgtgtccaaaatttcgcctgctctgaaaaacatgcccccgaggctctgtgcagtttggggccttggttcccacctgcagatgcggtcagttgcctggctcctggggccagagtttcctctgttacttgttgagtctcttgtcttcactgtcagaagctgaactgacttgggggctttgctgttgatccactttagcaaaccctgctgcagaggactgtaaaaacaaataactaaaaataaacttagaaaat

SEQ ID NO: 808 - DNA, 2505 bp, Homo sapiens
taaaataattcatacagaagagaaaccctacaaacgtgaagaatgtggcaaagcttttaaacgatcttcaacccttactaaacataggataattcatactgaagagaaaccctacaaatgtgaagaatgtggcaaagcttttaaccaatcttcaacccttagtatacataaaataattcatactggagaaaaaccctacaaatgtgaagaatgtggcaaagcttttaaacgatcttcaacccttactatacataaaatgattcacactggagaaaaaccctacaaatgtgaagaatgtggcaaagcttttaatcggtcctcacaccttactacacataagagaattcatactggacacaaaccctacaaatgtaaagaatgtggcaaatcctttagtgtattctcaacccttactaaacacaagataattcatactgataagaaaccctacaaatgtgaagaatgtggcaaagcttttaaccgatcttcaatccttagtatacataagaaaattcatactggagaaaaaccctacaaatgtgaagaatgtggcaaagcttttaagcggtcctcacacctcgctgggcacaagcaaattcatagtgtacaaaaaccctacaaatgtgaagaatgtggcaaagcctttagtatattctcaacccttactaaacataagataattcatactgaagagaaaccctacaaatgtgaaaaatgtggcaaaactttctaccgattctcaaaccttaatacgcataagataattcatactggagagaaaccttgcaaatgtgaagaatgtggcaaagcttttaaccattcctcaaaccttattaaacataagctaattcatactggagacaaaccctacaaatgtgaagcatgtggcaaagcttttaggcggtcttcacatcttagtagacataagataattcatattggaattcatactgaagagactgtacaaaagtgaagaatgtggcaaaggcctttactgctcctattcccttactaaagaatgtggcaaagcttttcaccagtactttacccttaatacacataagataatgctggagagaaaccctacaaatgtgaagaatgtggcaaagatttctattgattctcataccttactaaatataagataattcatattggagagaaattctacagatgtgaagaatgtggcaaaggctttaattagttctcatcccttactaaacataagagaattcataccatagagaaatcctacaaatatgaagaatgtgacaaagcttttaaccacttcttaaccctgcctacacgtaagataattcatactggaaggaaaccttacaaatatgaggaatgtctcaaagctttttactgattcttataccttactaaacataaaataattcataaaggagataaattatacaaatgtgaagaatgtggcaaagcctttagtatattctcaacccttactaaacataagataattcatactgaagagaaaccctacaaatgtgaggaatgtggcaaagcctttagcctgtccctccaatttactgcacataagataatttatactggagagaagccctacaaatgtgaaaaatgtggcaaaccttttaaccaatcctcaacccttactacacattagataattcatgctggagagaaaccctacaaatgtgaaaaatgtggcaaagcttttaaccaattttcaaaccttactaaacataagataactcatactggagaaaaatcttacaaatgtgaagaatgtggcaaagcctttatccagtcctcaactcctagtagacataattaatgatggagagaaaccatacaactgtgaagaatgtggcaaagcttttaaccagtcctcaaactttattgaacaaaataattcatacaggagagaaaccctacaaatgtgaagaatgtgacaaagcctttaaccagtcctcaatttttactaaacataagaaaattcatactggagagaaaccctatgattgtgaaaaatatggcaaaggctttaactagtcctcagttcttaacacacatacgataattcttactgcagagaaactctacaaaccagtaagatgtgacagtgcttctgacaacatctcaaacttttctaatcataaaagaaatcatattggtgagaaatcctagaaatgtggagaatgtaacaaagtatttaaatggttgtcacacttgattataggtaatattcatattggaaaaatttcctacaagtaagaacaatgtggcaaagtttttaactaatacaccttattgcacagaaaatcatttatatttgagaaaaattgtagaaatatagactgtgaaaaagacgtcaatatctgctcacatcttactaaacaccagagagttcatgcttaataaaagcatgataagtgcaattactgccaaaagatctttcagaaaatattatcctttaaagtgaaggagagtatttatattaaagatgaacattacaaccat

SEQ ID NO: 809 - DNA, 3481 bp, Homo sapiens
gttagaaaaatatcccctttctcccacagccatcagagcaggactctggctcacaggtgcctttagaagtaccatttcatgtgaaggctacaatgccccattttacaggtggggaaacaaaggccttgagggctagggaagagggcagcctccccaggtggggcaacgcaccagctcctcgaagccgctgtggggctcggcccgctgcttgtagagggcttcccaccccaactgcagcatcctctccagctcccgtagagtctcctgctgccacagcctctcatcctgctcccgaaaacctctcctgttccagcagctcctccaccttgtccagcagcctctcctgttcctcctgccacccctcctgttcctgcagcctctcctgtctcctgttcaggagactcaacatctgattgttttccacctcagcctggagctgtcttcccacactctccagctccttccttaggtggttggtctcatcttggagctgctccaccgtagagggccgtgctgggggctctggggccaggggttcagctgagaaaggaagcagacaataagggcctctggataaaaaaaaaaaaaaaaaaaaaaaatcctcccttcggtgcacagctcctcctctcaggcttcccaaacttggcctcactgctaatgactcctcacacccggatggtagccaatcttccaagtcactttcagatagcactgtgggtggctgacaacgggcactcctccctctttactgagagggacactgaggctcatggagatgacaagacttgccatctcctggcacagacctctttccctctgcctcaaagctcttccatctacccacctccccggggcattctaagtcaccctcacagccctctgatgccagtcctgctcctaggtcatggcagccccatcttacccgtctggtttttgagtttgaacaagctcctcccaagcttctgtacctgatgtatctcatgcttctcctctttcaatgtgtgaacctgcctaaagcagaggggaaagggccctgcagagaggggctgctgaacctctagagacagagtttgagaaaggcccaccccccttctgccagcttacgattgagaaaggtgcattcactcaacaaacatttactgagcacgtacaggccaggtacagttcttcatagcagagatataagacagcaaaggacagacaggagcccttggtcctgaggtttccattctaggagcctttaaatctctgagctaacagtgacctttgatactctctacctcctccagaaacacgagcctaaggaggagagatggcttgtccagactcaaaaagcaaattagggactgaggcagggcagaaatacgggcccctgaaaaccagtcaggctagtgctttcctgagaggtgacaaccccagggcatgtgtggcaaggactagagcaggggtgtctggagaagagagagtcagcaaagagggcagtgcagaagagccatgctgcatgttctgtgctctggggtccctccaggtgagacctgggtgcccagctccccatttgcccttggcatcaggggctcctagcccctttcttcagggccccaagaggaaactggagtccaggattcacaggctggaatcaggggaccccactggactcttaccagtgaattgatgttttcagtgagttgactgattattgtggagcttgaatccagggccactgctagttcttggtactggctctgaggtgcatgcagagaggaggagttggaggaagattgtggggaggggtagagagaataatcattagggctggtgggggtgtgtgggctgcctcagctggcagaggggcaacaagcccctgctgtgggaggaggttggagggctagcctgcagggtcactgcacctcggcccagggcctcttacctccagatcctccagggtagcagatgatgcacggccctccccgtagatacctgttgctgactgcaaacgatgagagtgcacatggagatgtcctgtcccccctcactgtctaagccctctgatttcctttcttccccatcaactggcaaaagcttcttttctgcctaccttggaccctttttcccataactcctttgtgccaacttctctcgtggttcttatctccccaccatcccaccctggggccctttcagtgactcctaaagggacagcctgatggcaagtggctcttctcattggcctggcttccccttgagactggggatgaggaaaatcaaacaacaaccattacctgggtgtcctgggtgtttgcagcaggccatgtactaaggattcacataaaagcaacaataacgaatctcatttacacttcacaaatggaagtcaaaaaataccacctctattatggagatgtgaaaagagagacccaaagacctcaaacaacttaccctaaatcataggctaatcaatccctaatcaatccttagcagacggagaggcaggattcaaacccagaattcttaaccagtacccaacagtccatctacaatcttaacaattaccctctactgccccttgggccccctgtccccaggaccctggccagccaagactcacatccccaggtgagtggtaaccaccagaagtggctgtgtcagggctactgccattgattttctttttcctgttagctccttctggaatgccagggctcttcctctgccaatattcttttaactgtgggaaagaagagtagtaacactcatgagaacaatcagcccctatagccacatcctcctttacagttttgacaaaatactcttatacaccatctggtttaatgccaccaacaactgtacaaggtgttgtcacaatcagttagtgactgagagggattgatatcatggatagaaaaaaaaaaaaggaggaaagaaaaaggcaatactggaacttaaactcagtcttctgactccaacctctggggttttgccatgaatcagcagcttccagggaccaaaaccagggacagaggtagaaaagtaaacattaagcaggcaggaactgtaggccgtgtggtttagagtcatacatcctcacaggtctgttagcgtgaagaagcgtaccagtacctctcactttcatatcaatgtgtcctcatggcagaaggcagcttttctgttaaatctgggaatttatcagaaagaggacaacccaagcctcgttttagagagaagtctgctatacacttagggatgatagacacagaagtttccaagcgtataccagacttctctctgaaatgaggcaaaagcaatggcaacaaaagccaaaattgacaaatgggatctaattaaactaaagagcttctgcacagcaaaagaaactaccatcagagtgaacaggcaacctacaaaatgggagaaaattttcgcaacctactcatctgacaaagggctaatatccagaatctacaatgaactcaaacaaatttac

SEQ ID NO: 810 - DNA, 2710 bp, Homo sapiens
ggacgcaaagcatcaacgaaatattatggatgtcttcaagaaagggggagagaaaatcctgactgaaggaatgtccacataaattatttttatttaaatgaattcaaaggatgggatgagggcaagtcagacggagtcgcgtggaaaacatgaataatattaatatgcataaagaattctcaccaacgaggagaagctcctcactacagctcttgggacaaacaggttcattaggaaacagctcagagcgactacagcattttgctatttcaattttttcccttattttaaatgaagagtcagacagatgtgttttctttgcatggcagcattgagatggatccaatctgcgaaatttgctgcccaaatagcatttctaatggaaactggaactaaacaagggcacggatatgggagggaggggagaagagagaatacacgaagaagagtatattcagagccactgcatggcattttgagtacaggaggttttcaggaacgatctttgcttcattagtctcccctgtgggctcctgatgtagggagctatcagggtataccaagatgagcactgagacaggcctttctaggtctgaggctgaggaaagcagcggcaacttggtgcctgtcccccagagctgtctacagttcagaagccaaaagcacagctacttctaatttggggatgcagtagagtgcctactgatccaggtggacaaaacaaatcttttttggaaaccaacgaaacaaaaataatctggagctgtcttggttgaagcagcgtgcgggattcagacacctcccactcagacccctgcccttccttcaacattggcatctaaagaatctctccagcgtttggaggaaatcaagttggaagttaagcaagaagcaacacaaaaaactgagtaactacaaagaagtaaaaagtaaaaactctgcaagttgaattgttagctggcaggctaccatgtgatattggctcagaattgtcttgtgttagtaaagatacaaacatttgaattctatttatgaactttgaattctgcttctgtaattagacttttttttttttttggacagagtctcactctgtcgcttaggctggactgcagcggaatgatctcagctcactgcaaactccgtctcccgggttcaaattattctcctgcctcagcctccccagtagctgtagctgggattacaggtgtggatcaccacgcgcagctgaatttttttttgtattttcagtacagacggggtttcaccgtgttggccaggctggtctcaaacttctgacctcaaatcatccacttgccttcgcttcccaatgtgctgggattacaggcatgagccagtgtgcccagcctgcatgttttttgtttgtttgtttgtttgtttgttttttgagatggagtattgctctgttgctcaggctggagcgcgcgatctcagctcaccgcaacctccgccttccagattcaagcaattctcctgcctcagcttcccaagtagctgggactgttacaggtgcatgctgccacgcccagctaatttttttgtattttagtagagaaggggtttcaccatgttgcccaggctggtcgggaactcctgagctcaggcaatccgcctgcctcagcgctttcggaggccgaggggggcggatcacgaggtcaggagatggagaccatcctggctaacacggtgagaccccgtctctactaaaaatacaaaaaattagccggggatggtggcgggcacctgttgtcccagctactcgggaggctgaggcaggagaatggcctgaacccgggaggcggagcttgcactgagccgagatcgcgccactgcactccagcctgggcgacacagtgagactctgtctcagaaaaaaaaaaaaaaaaagagagatgtagtcagggccaggtgcagtggctcacgcctgtaatcccagcactttgggatccgccaaggcgggcggatcacctgaggtcgggagttcgagaccagcctgaccaacatggagaaaccccgtctctactgaaaatacaaaattagccgggcgtgatggcgtgcgcctgtaattcaagctacttgggaggctgaggttgcagtcagctgagaatgggccactgcaccccagcctgggcaacagaatgagactctgtctcaaaaaaaaagaaaaaaaaaaaagatggagcctggagcccagaggcaaggtgacttactcctacaatctttgtagcagaacaggacctttgtagcagaaccaaaacctcccaactcccagttgacatggtagccaccttctctggtgagtgaagggattccacatccccagcagtgcagttggtgagaaggggcagtcagtcttcaaggatttgctccggtgtggcttcattcaatgctgcccacctctggtgcagcctcagctttgcctctgctctttgcaatgtagcctagaggtcttttttctccttaacaggttttattccctttgttcctcccatccttcatgtccttggcattgctttcttcaaaggaagcctcaaagaactgaaccttgagactgtttctccttttgagatattgtttccacattcattttatattaagttgtctaggagggttagttctcatttaaatgaatgttgtccttgtcaaggttaacattcccactggcaacatagcaagactccatctctac

SEQ ID NO: 811 - DNA, 3191 bp, Homo sapiens
ctcctaccttctcgggcagcccagtctttgccatccttgcccagccggtgtggtgcttgtgtgtcacagccttgtagccgggagtcgctgccgagtgggcgctcagttttcgggtcgtcatggctggctacgaatacgtgagcccggagcagctggctggctttgataagtacaagtacagtgctgtggataccaatccactttctctgtatgtcatgcatccattctggaacactatagtaaaggtatttcctacttggctggcgcccaatctgataactttttctggctttctgctggtcgtattcaattttctgctaatggcatactttgatcctgacttttatgcctcagcaccaggtcacaagcacgtgcctgactgggtttggattgtagtgggcatcctcaacttcgtagcctacactctagatggtgtggacggaaagcaagctcgcagaaccaattctagcactcccttaggggagctttttgatcatggcctggatagttggtcatgtgtttactttgttgtgactgtttattccatctttggaagaggatcaactggtgtcagtgtttttgttctttatctcctgctatgggtagttttgttttctttcatcctgtcccactgggaaaagtataacacagggattcttttcctgccatggggatatgacattagccaggtgactatttcttttgtctacatagtgactgcagttgtgggagttgaggcctggtatgaacctttcctgtttaatttcttatatagagacctattcactgcaatgattattggttgtgcattatgtgtgactcttccaatgagtttattaaactttttcagaagctataaaaataacaccttgaaactcaattcagtctatgaagctatggttcccttattttctccatgcttgctgttcattttgtctacagcgtggatcctttggtcaccttcagatattttagagctacatcctagagtattctactttatggttggaacagcctttgccaacagtacatgtcagctgattgtttgccaaatgagtagtacccggtgtccaactttgaattggttgctggttcctctcttcttggttgtcttagtggtaaacctaggagtagcctcttacgttgagagcattctcctgtatacattaacaactgcttttactctggcccacatccattatggagtacgagtggtaaagcagctgagcagccattttcagatttaccccttctcattgaggaaaccaaactcagattgactaggaatggaagaaaagaatattggcctgtaataatctttctttgggcacaaagaagtactgtaaataaatgcttgtaaatatttcctccatcaccattgaactagactgatctgcttgacagacgtgggatctcagtatggtacttggacagcaggaatgatacatataatctgaacttgggaaattttggacctactaactctaagcctattttattttttataaaactatgtgacattttggttgagcagaatgtacgttagaccagcaaaatgttcctaatggttctaacttcgtgagtttacaatgttgtgattcatgcagggttaaagatgctttgtttttattttttaagtaccaaaattggtttcagaacactgataacactcagaaaaccacagtgtgttttcatatttggaactttgtaatagcgggagtagcagtagtccaaacctagtatagggaaaggataaaaataagtcaccttcaccaagagatgccaatgattaccaaacaacagacagttgccaaatactggtttctctttcccctgaaaatggcttttgttctcaaatgataagagagctaatacatttagctaatattctagctctctttattatggaacagatcttgatagatggtttaattttctcctaaagagaaataatcagttgagaatttgagaatgggttgtaattatcgctcacccattgggatggttcattgtttaaatatggcattttccccccttcagctgcaggttcctgagatttggtgcctgtgagctctgattgtaggaatgcatgtgacagtcccagtcctatggtaatgacttaggaggaatgcagataaaagtaccttgtaagataaatataaattggagttaggaatttcatgaacctcactatgaccaaaattaattttttgattcagtttgtctgtctgtctgtccttcccctctcttcttttttcagggtgaggtgctgtgtttcttatttcatacgagataaaacagagagaagttctctcttctccagcttgtccatttccccacttgaagaaaacttttgatatatatgccttactgagtacatgccccctttaatgttaatatgacttggagtaatttctgaggtttactgacaaacataaaaatccctttaattgtagtgtagttgttctataaaccatattttttcatgatgtggatattttcttctatttctttgtcttcatttaatttggtggtggtgaactttacttgctgattttcttttatttttcactgaatgaagtttgtgcttgaatgaagagtgtatcttaaaccccctttttttggacaggctgcacttggataaaataggcaccactgtgttgatatgtaattaaattcataactatttatgaatgtgaccattgttaaatttaattatagtgtatttctttcttgaatttcagtctgctgctttgtaaaaaataactgtaattgatatttcatttttaaaatttataaattccaatcattgtcattcaagttattagaaatgagtcacggcactaactcatggttctatactcattttaagaaattgtaaaggttgaggtgtatttggtgactttctctgagacacagatgaacgttggaaatagatgagaaatggatgcagaataatgcagatagtgatcccatgtttgttaattgccatcatggaagtcagagaattaaccaattaagtgacggtaactattttttgtataccttgttctttgtgatctataaaattaaactggataaaatgttaattgggggtagggaaaaagctttgttttaagatttctaagctaattattttaccgttttgttgaccttgtacacaagaatgagattaatctgtattatataag

SEQ ID NO: 812 - DNA, 2948 bp, Homo sapiens
caaggggccagcttttctgtccttttttgtcttgcttcctccggccttggctccccagcctggccccccaccttgttgggctgaggcttcagaaagaaagaggcaggggtaggaggcaaggctgtgggaacggaagcggagggtgagggaggccgccatcttaggtaactggcgcctgtaagatggctgcctgaccaggtgtgcactgaaagcctcccctggttggtggacatggaacagactgaggccataagaaggacttcctggctgaccagaaatactgttgaatcttcctgttaatgtaattaggaagagaggatggagagagaaggaaggagggagagaccatgaatggcggcccccagaagagatgtaaggttgagcacaggagcaggggtggtagagaggcctcagcactgggcttagttcccagactacttagaggactgtgggtaataagaaaagtactggaggaatcagaatgggggaatatcagcatgaggagagagagagtaagatgtggccaggcagtatcatctgctagtttgagggtctctctggggcctgtgaaaggtgactgtgtacttgaggtgatgctccaccttctctcctcagcccagcactctggtgagactgcatcctctcagaggccactcacagccccctcaacaaagaccactggcccttcccaagcccagtcctccttgacctgtatggaaaatgttatgccattttctcagtcttttcctttggccttctgttcttctgttacatccatgatcatctgttcttggttccattcattcagtcctccggatggaccagttccttaactagaagtggtccccaggttctgctggtagcttgttttctcttccttctcactcttctcactccacttttatcactttaaccatcacctgaagttataaattctcctgtgtttcatttttcttttcttttctcttctctttctttctctctctctctctttcttctttctttttttttttttttttttttttttgagagtcttgctctctcacccaggctggagtgcagtggcgcaatctcggctcactgcagcctctgccgcccgggttcaggcggttcttctgcctcggcctcctgagtggctgggactgcaggcacccgccaccacgcccggctgattgtttgtgtttttagtggagacggggtttcgcagtgttggccaggatggtctcaatctcttgaccttgtgatccgcccgcctcggccccccaaggtgctgggattgcgggcatgggccaccgcgccgggcctagtcttgacctcttttaaactccaaattcgcacccccaactgccaactaccacctgtggtcctgccatttgtccccagatcagattggaatggtacatctgcttgaccaagcctggatcacatgcctaggctctagctgcaaggagagcccagaaagtacctgtgtttttagcttctgtagtagcatagaagtacaacctcccaccaaaacccaggaggtggtccagtccccaggcagttcggatgctccctccgcattgtgcttctgctgccttacctctatcggtggcctcattaaactcctaggcccccaggttcaactcctgaacattttcctggacttgtccccacatccaaatcagccacatcaaaacccatcacttcttcctgtgtagcacctctcatccattcccttccctctggtacccctgcctccatgtcagcacattcattcagcaggcactgagggtctcctgtgtgccaggagctatgctcaaggggagtgtggaatacaacgctgctctgaggaactggcagtctactgggtgaggcagacacatgaatgattagaagacggtctggaaagcattgtcctgcagacctgcacaaagtgctgtggaggcatggggaagggagccgggggccacctcggggagctcaggaaggcttcctggaggacgccaagagataagcgatacaagataaacaggcatttggcagtctacagtctggggaagtaggtggtggacagtccacagcattcgagaaggcaagtaggtaaggaagagcagggtatgtttggggactagcatggccatcgcagggagtctgctgggaggagaagggaaacagaggtaggaattcccctgtaaagcgccttatgtgctataccagggaggctggggcagttagctgacagcctcagaggtgccaggtgtagggcatggctggaaagcaatgccctacataaccactcctaggagggatggggactcctgcatctggctgtccattgagaccagccagacatttaactggctctcagctagttccaaacaaatgaaggacatatgaaagacctggaagccacttgaggaagggatgtctctaccacccaccttcagaatccctccttcccccacgacatgcgggggcagcaagcttatgggagctttctggggagagatgtggagaagcagaagttggtgtccctcagcacaatgagcaccctgatgtcggggcagggggatgggctgctgggggttgggggacagggatactggctctgactttgtggggcaacaagctagtctctgagctctcttatgaaaaaaaaaggaagggagggagggagggccggccgggcgcggtggcccaggcctgtagtctcagcgctttggggggccaaggcgggtggatcgcctggggtcgggagttcgggaccagcctggccggcatggtggggccctgtctctgctgagagtacaaaaattggccgggcgtgatggcccatgcctgtggtcccggctattcgggaggctgaggcgggagaatcgcttgggcctgggaggcagaggttgcagtgagctgaaatcaggccaatgccctccagtctgggcagcagagcaagactctgtctcaag

SEQ ID NO: 813 - DNA, 2752 bp, Homo sapiens
ggcagtccagccgcaggggccacccgaacagtctctcctcctcacagaagcctggagctgggcatccaagaagaagcagcctcatttgttttctggtgtcatcgtaggtggccacctatggcttttgggcttctcacctggggcgggtgggttctgcaccaccctcccaccctccttcctccgtgtggacgatagagccacatccagcaccacggacagctcccgggcgatcccatgggagtagaagaggtgtgagcaggttgcccagctggttagcggaaatgccaagatccaggctcctgaatttcagcctggccctttctatctgtctgatacctcctttacgagtctctctgcctgcgttgtgtggagcgggcctgctgctggttgggggagtttgcaggttgcccctatgcaaaaaaggacaggatgcatgactggcatgtaaggtgttcaggaaaaccaggaaaaggtggaacagactgctacctctgtctgaagtggtttggagggaaggcctcagggacagggcatacctagcagtagctggcaagcccatgggagaaaaggcaagggggcaaccatctgccagggcacagaggccaggggatggccacaaggagtctccagaggccagtgggagtcatgcaaactggaacggggcctgggaaaggcccttctgtgtgcccaggcctgcctccccaacaccgtgagcctagaaacaaaggggccattctctctaggatttgatgctgccatctccggctggcagtgccaggtggtgggggcatcgggggtgtcaatccattatcccccccaactcctaggtcctctgaggctggatgttggggaggtgggtgttctatgctatgttgctatggcaaccgcccccccacccccaaagtacaaagagaggcagctttcacccctacccccaggaagaacctgggtctggctgggaatcttcccttgagaatcctcctttctgatgcacaagccatggcatgcataagcgtcaccctcttttcagcactggaagctgagggttttgacagcggcaggccacataggcaaggaagctggtgcatgcagtgtctctgggcaaggttatgcaagtgagtaccagccccttatacttaaccccctctcttcccaagctcgcctgcccctcacctaccacagccaaggacatcccaggccttctcagctgaagcgatggggccttgaccttctactctttcccagaagtgagggacacccggctacctccagcaaacctccaggctgtgggaacagagaagaggagggggccattcctgccaccctccatctgcaccctccgccattactcattaggcattctgccccctccttccgctcgttaagcctgatttgcatgcatttgcataatacagttcatttacattccaggaggctcatggtagaagccaggaaaaaaggggaggggggctggagaagagaaaaagggggagagattttgttttcatcaaagtgttgggggagggactagggggaggtggcaggaagaggacagaaataaaaacttacactactttctttcttcctttctgccctccctccctgagctggactcaaatgccaaagagagatgccaaggggccagcttttctgtcctttttttgtcttgcttcctccggccttggctccccagcctggccccccaccttgttgggctgaggcttcagaaagaaagaggcaggggtaggaggcaaggctgtgggaacggaagcggagggtgagggaggccgccatcttaggtaactggcgcctgtaagatggctgcctgaccaggtgtgcactgaaagcctcccctggttggtggacatggaacagactgaggccataagaaggacttcctggctgaccagaaatactgttgaatcttcctgttaatggaattaggaagagaggatggagagagaaggaaggagggagagaccatgaatggcggcccccagaagagatgtaaggttgagcacaggagcaggggtggtagagaggcctcagcactgggcttagttcccagactacttagaggactgtgggtaataagaaaagtactggaggaatcagaatgggggaatatcagcatgaggagagagagagtaagatgtggccaggcagtatcatctgctagtttgagggtctctctggggcctgtgaaaggtgactgtgtacttgaggtgatgctccaccttctctcctcagcccagcactctggtgaaactgcatcctctcagaggccactcacagccccctcaacaaagaccactggcccttcccaagcccagtcctccttgacctgtatggaaaatgttatgccattttctcagtcttttcctttggccttctgttcttctgttacatccatgatcatctgttcttggttccattcattcagtcctccggatggaccagttccttaactagaagtggtccccaggttctgctggtagcttgttttctcttccttctcactcttctcactccacttttatcactttaaccatcacctgaagttataaattctcctgtgtttcatttttcttttcttttctcttctctttctttctctctctctctctttcttctttctttttttttttttttttttttttgagagtcttgctctctcacccaggctggagtgcagtgagctgaaatcaggccaatgccctccagtctgggcagcagagcgggactctgtctc

SEQ ID NO: 814 - DNA, 3810 bp, Homo sapiens
aggtacaacaaaactgtgacatatcagtgtgtccctggctatatgatggagtcacatagagtatctgtgctgagctgcaccaaggaccggacatggaatggaaccaagcccgtctgcaaagctctcatgtgcaagccacctccgctcatccccaatgggaaggtggtggggtctgacttcatgtggggctcaagtgtgacttatgcctgcctggaggggtaccagctctccctgcccgcggtgttcacctgtgagggaaatgggtcctggaccggagagctgcctcagtgtttccctgtgttctgcggggatcctggtgtcccgtcccgtgggaggagagaggaccgaggcttctcctacaggtcatctgtctccttctcctgccatccccctctggtgctggtgggctctccacgcaggttttgccagtcagatgggacatggagtggcacccagcccagctgcatagatccgaccctgaccacgtgtgcggaccctggtgtgccacagtttgggatacagaacaattctcagggctaccaggttggaagcacagtcctcttccgttgtcaaaaaggctacctgcttcagggctccaccaccaggacctgcctcccaaacctgacctggagtggaaccccacctgactgtgtcccccaccactgcaggcagccagagacgccaacgcatgccaacgtcggggccctggatttgccctccatgggctacacgctcatctactcctgccaggagggcttctccctcaagggtggctctgagcaccgcacctgcaaggcggatggcagctggacaggcaagccgcccatctgcctggaggtccggcccagtgggagacccatcaacactgcccgggagccaccgctcacccaagccttgattcctggggatgtttttgccaagaattccctgtggaaaggggcctatgaataccaggggaagaagcagccagccatgctcagagtgactggcttccaagttgccaacagcaaggtcaatgccaccatgatcgaccacagtggcgtggagctgcacttggctggaacttacaagaaagaagattttcatctcctactccaggtgtaccagattacagggcctgtggagatctttatgaataagttcaaagatgatcactgggctttagatggccatgtctcgtcagagtcctccggagccaccttcatctaccaaggctctgtcaagggccaaggctttgggcagttcggctttcaaagactggacctcaggctgctggagtcagaccccgagtccattggccgccactttgcttccaacagcagctcagtggcagccgcgatcctggtgcctttcatcgccctcattattgcgggcttcgtgctctatctctacaagcacaggagaagacccaaagttccttttaatggctatgctggccacgagaacaccaatgttcgggccacatttgagaacccaatgtacgaccgcaacatccagcccacagacatcatggccagcgaggcggagttcacagtcagcacagtgtgcacagcagtatagccacccggcctggccgccaccaccgccaccgagagccccgcctccagcagccgttccccagggggcaggaagtaggctcccctgagcacagtgcccagtgcccatcttcgttcgtctccttgcctgtgtctgctactgctgggactcaggccctcgccctgccgccatctatgccagttaccctggagaggactcctgccgtgtcctgaaaaggcagaaaaggaagaggggctgcagacagaggaagaaagtttatggatttaaaatagcaaagcaacttgtggatctgtgtgtgtgtgtgtgtgtgtgtgtatgggcctgatcacacacaaacacacacacctctccttcattcacgtcctatggaagagaccataaaggcttcaaaactagaagtgcgcatgaaggatgcttcatgccctgttccccacacagagaagagatgaagagggggaggtacggtcagctttcagaacaatatgccccccgcccatcccatgtgtgaggacatggtgactcggtgactgtaacagtaggacacatcccatcatgcggtcagagtgcagaaacccggtcagcgtgcagaaaccagctgtctgctgatgaacggcccatctgcacagcggcagcaaggattaccccaagggcaggaaaaaagtctttggaaatagattgaaaatcagtttctttatttttttcaaacactgttttattgagttctaaacccagtggattaaaaagtcatttgggtcctgggaagcactgggaaagaagggagagccggggaggatagggcaggagtctggccaggagcccaaggtcaagtctggctgtcaactgacaaagagaagagaagacaagtctgtggcccagacagggtgccaagtctgggggcagcagcagggtccttgagagaacaggggagcaagcctgccccagtacccaaaaaacaatggctatcatgtactggggttattctctgtgcctgacactttacctatagtatttctagtctgcacaataacaccaaaatgtaggatttgttattcccctttgacagatgagaaaacagaagcctgcaaaggtaaagacagagttaggaagtgtggagtcagaatgcaaacccagatcagtctgccccaaagtccactacaccagctgccagaaaccctgttctagaaggggcagctaagaagggaggagccgatgaaactctacagtagcactgtggccaggtctggaaagccaggcaagacacctgtgtgtcctatctgggttctgctgtctccgcgtaggcagcttcggggcaaggattcaactccccaggcctcccacggttggtgctggctccttggctcccagcagctgctgaccatagccagcaaaagacctggcaggtcctgaatcaaaacaacagagtggctgaaagtcacacctctccagctccttgcgagtgggtttgattgattttgacagctatatcatgcttgggtcgttcatgaattccatgagaattgttgggaagttcatgagtttaggaatcaaagtatagcatttagggccactttctctgtcctcgggaaggcccccacaagcttaagcccctgtatacgtgtgacatgctggcctcagagattcatgtcacatattgaaatagcaaatagaaatgtgcaggagcggagggacagcgacacctggttcttaagcaaattctagattggaacaattagaagatctgactgatgttaagagtggccagaggaaagtgagaggcgtccatttccagcagacacaatggaggctgacagaggcaggagcctacccctggccacaccacctctgggacacggcacccccctgggcctggagggagagggccaatccagacacactcacactctcatctctttccttggctggaaacaagtgcaggaagctcccctcccaatttcttatgctcccttcccccttacactcctctccttcgactgctcccttcccccttcttatgcccctctcagaccacccagcggatgcctattcccgccccccacccctcccctgcgtctccttgtaaagttccatgagatgctcgaggagcacctgctggtggggcacccagcactctgctgggcatcaccctccgcacccctgacatttctctccacctccagaggcttggaagggaacagggcagatgaggcccttcacccaccatctacgccatatacccatcaccatcccatgagg

SEQ ID NO: 815 - DNA, 2751 bp, Homo sapiens
ttagatcagttcttttgtactacttgtggtcagcactatcatggaatgtgcctggatatagcggttactccattaaaacgtgcaggttggcaatgtcctgagtgcaaagtgtgccagaactgcaaacaatcgggagaagatagcaagatgctagtgtgtgatacgtgtgacaaagggtatcatactttttgtcttcaaccagttatgaaatcagtaccaaccaatggctggaaatgcaaaaattgcagaatatgtatagagtgtggcacacggtctagttctcagtggcaccacaattgcctgatatgtgacaattgttaccaacagcaggataacttatgtcccttctgtgggaagtgttatcatccagaattgcagaaagacatgcttcattgtaatatgtgcaaaaggtgggttcacctagagtgtgacaaaccaacagatcatgaactggatactcagctcaaagaagagtatatctgcatgtattgtaaacacctgggagctgagatggatcgtttatagccaggtgaggaagtggagatagctgagctcactacagattataacaatgaaatggaagttgaaggccctgaagatcaaatggtattctcagagcaggcagctaataaagatgtcaacggtcaggagtccactcctggaattgttccagatgcggttcaagtccacactgaagagcaacagaagagtcatccctcagaaagtcttgacacagatagtcttcttattgctgtatcatcccaacatacagtgaatactgaattggaaaaacagatttctaatgaagttgatagtgaagacctgaaaatgtcttctgaagtgaagcatatttgtggcgaagatcaaattgaagataaaatggaagtgacagaaaacattgaagtcgttacacaccagatcactgtgcagcaagaacaactgcagttgttagaggaacctgaaacagtggtatccagagaagaatcaaggcctccaaaattagtcatggaatctgtcactcttccactagaaaccttagtgtccccacatgaggaaagtatttcattatgtcctgaggaacagttggttatagaaaggctacaaggagaaaaggaacagaaagaaaattctgaactttctactggattgatggactctgaaatgactcctacaattgagggttgtgtgaaagatgtttcataccaaggaggcaaatctataaagttatcatctgagacagagtcatcattttcatcatcagcagacataagcaaggcagatgtgtcttcctccccaacaccttcttcagacttgccttcgcatgacatgctgcataattacccttcagctcttagttcctctgctggaaacatcatgccaacgacttacatctcagtcactccaaaaattggcatgggtaaaccagctattactaagagaaaattttctcctggtagacctcggtccaaacagggggcttggagtacccataatacagtgagcccaccttcctggtccccagacatttcagaaggtcgggaaatttttaaacccaggcagcttcctggcagtgccatttggagcatcaaagtgggccgtgggtctggatttccaggaaagcggagacctcgaggtgcaggactgtcggggcgaggtggccgaggcaggtcaaagctgaaaagtggaatcggagctgttgtattacctggggtgtctactgcagatatttcatcaaataaggatgatgaagaaaactctatgcacaatacagttgtgttgttttctagcagtgacaagttcactttgaatcaggatatgtgtgtagtttgtggcagttttggccaaggagcagaaggaagattacttgcctgttctcagtgtggtcagtgttaccatccatactgtgtcagtattaagatcactaaagtggttcttagcaaaggttggaggtgtcttgagtgcactgtgtgtgaggcctgtgggaaggcaactgacccaggaagactcctgctgtgtgatgactgtgacataagttatcacacctactgcctagaccctccattgcagacagttcccaaaggaggctggaagtgcaaatggtgtgtttggtgcagacactgtggagcaacatctgcaggtctaagatgtgaatggcagaacaattacacacagtgcgctccttgtgcaagcttatcttcctgtccagtctgctatcgaaactatagagaagaagatcttattctgcaatgtagacaatgtgatagatggatgcatgcagtttgtcagaacttaaatactgaggaagaagtggaaaatgtagcagacattggttttgattgtggcatgtgcagaccctatatgcctgcgtctaatgtgccttcctcagactgctgtgaatcttcacttgtagcacaaattgtcacaaaagtaaaagagctagacccacccaagacttatacccaggatggtgtgtgtttgactgaatcagggatgactcagttacagagcctcacagttacagttccaagaagaaaacggtcaaaaccaaaattgaaattgaagattataaatcagaatagcgtggccgtccttcagacccctccagacatccagtcagagcattcaagggatggtgaaatggatgatagtcgagaaggagaacttatggattgtgatggaaaatcagaatctagtcctgagcgggaagctgtggatgatgaaactaagggagtggaaggaacagatggtgtc

SEQ ID NO: 816 - DNA, 3244 bp, Homo sapiens
acttactttaagttctttagcaaatgaaagtgtttttttaattttctttttaaattgtttattgttaatgtatggaaattcaactaatttttggtgctgttattctattcttcaaatccactgcatatgttttttagttccagttgcattttggttgactctttgtgattttctacacagaagatcatgtcatctacaaagaaatagttttacttctttctttctgatttggatgagtttgatttcttttgctatttcattgctctagctaggacagccagtattgattgaatagaaggggtgggagcattcttgcatcatgtgagatcctacaggaaaagcattccattttccctgactggttatttctgctgtggtcatttcatggatggtctttgtattgttgaggtaaatttccttctctttctattttgtttaggatttccatgatgactggatgttgaattttgtgaaatgctttttctccatgtattgagatgatgtggttttcatctttcattatgttcaagtggtatatcacattgatttgcttgactatgttgaaccattttgcatcccagaaataagtggcacttgcatatcaacaatcctttttataacctcttgaatacagttcgctagtacaaggggtcttcaggaagttcatggaaaaatacatattatgagaaaattgtgcatgatatcacattttttgcaccaagataaactggtacaaatccgttataacatgtctgaacagggtttggtttgaggcactcagatgggtaagacatgagtttgaaaagagactcaatcaaggcaatgtaaattctgctaaaactgaaacaagaagaaacatcaaatttgcgatgagaccagatgctgtggctcaggcctgtaatcccataattttcagaggctgagacagttgggtcacgtgggccccggtactcaagaccagcctgggcagaatggtgaaaccaccttctctacaaaaaatacataaattagctgggcattgtggcacatgtctgctggttcagctactcaggaggctgaggcaggagaatggcatgaaccgaggaggtggagcttgccatgagcagagatcatgctactgcactccagcctgggtgacagagcgagactccatctcaaaaaaaaaaaaaaaaaaaaaaaaagaaagtgatgcacagagtggcaggcagaccatccacataagttttataggtacaactgtcaaagacgacactggagaagagccaagctggatctataaggaattgcatatgagatggcacacatattcatgctgtctgaagattcagtcacgttaccatatcaagctgaaaatgtcaccactatctggagagttggacatgttttattgagaatgtattttttttctctggatctgttatgaacacctttgttggcttggttcagtaataaatatgtgagacttttcatttaaaaaaagtcaaatgacttaattctgtattttaaattctgttttgtttgttttgtttttttgagatggagtcttctgaaaattttctcatcttctctaacccggttcatgacagacccttggactttactgttgtggaaaaatctatataaaacagtatcagtgtgtcaaagcattatggctgtcacaagcttgtgaaaggaaaataaaaattactaagccaaagagaaaagtcaatctgggaactgcgtcagacaaacctgccttccattttattcctaaacaagatagttacaaagattttttaaaaagctacatatgcccctcccaaaccgggaacctcaagatctccaccctaaaatagttctgttgaatttcaccctggcgatgtaaactgagagcttatcttcacagatgtgggaaagagcccatccctctgcacacctgagtcaaatgtctatctgattgcttcccttgccctatttatgtaaaaatacagggtccctgagccagcctaaggcataagtgacttatccctcctccctgctcacatataaattgtgtatttagtgaaaggctgatcaaagattcaaagaatgttatttgttatctacccgtgacccagaaggtccccaattccagttattccacctttccagaccggaccaatgtatatatgtactgattgctgtctcgtgtgtctgtaaaatgtgtgaaaccaaactgcagcctcaacaccatggacacacgtcatcaggacctcctgaggttcgtgttaattggccttagactctccctgtccccagacccaggacgcatgtgtttcctttttcttcatttctattaaagatgggtctcattctgttggccaggcatgagagcggtgacaggatcagccctcactgaagcttcaatctcctgggttcaagggatcctcccacctcagcctccaaagttgctaggaccatagccaggtgccaccgcaccgggcaaatttttgtgttcctagtagagatgggctttcaccatgttgcccgagctggtcttgaattccagggctcaagcgatccagccgtattggcctcccaaggtgctgggattacagccatgagccaccatgaccaacgtgtttcttaatttaaaaaaaaaaaaatagaccaggtgctctggctcatgcctgtaatcccagcactttgggaggccaaggtgggcagatcacctgagatcaagtatttgagaacagcctggctaacatggcgaatcctcgttttgaccaaaatatagaaattagcctggtgtggtggcgagtgcctgtaatcccagctattcaggagggtgaggcagaagaatggcttgaattcgggaggcggaggttgcagtgagctgagatcctgcaactgcactctggctgggcaagagcgagactccatctctaaaataaaattaaagtaatataaaaaactgcttctcatgaaagctttggtataatcttacgaggtaacatcattgttttgcaactacggtatgtgttcaaaatgttcttctttgaccccacatttcattagatatatttttaagccattttaaaattgtttttctctgaaatttattgtgtttagtttacattgaggactgcatgctttctagtctgtatcatacattggaaacattttctagtacctgataaatgattttaggttgtttcgatgtgtacttgataaagatatcaaggaactttttctttatgctaacattaaaatttagttgaagtag

SEQ ID NO: 817 - DNA, 3229 bp, Homo sapiens
tgtatgtgtttgtatatgtgtgtttgtatgtttgtgtgtttatgtgggtatatgtgtgttgtgtatgtatgtgtagatggtgtttgtgtgtgtgtatatatatgtgcgtgtgtgtgcctgtgtgtatgtgtgtatatgtatgtgtgtatgtgcgtatttgtgttatttgtgtatgtgtctgtgtatttgtgtgtgcgcatatgtgttcatgtgtatttgtgtatgtgtgtatttgtgtgtgtttgtatgtttgtgtatttgtgtgtgtgtgtatgtatgtgtatttgtgtgtgtttgtgtgtatgtgtttgtgtgtgtgcatatgtgtttgtgtgtgtgtgtgtgtgtgtgtatcctctcatttagtcctcacaatgacctgccgaggaagttctgttattaaccccactctgctcagcacgcggcccaggccatgccaacgctaaggcactgagccaggctgctgacgtggagcccacacgtgcgaccactgtcctaccctaaatcccaaagtgggaaggccgtggtctagaccttgatcccagaggcccaagttcaatttccatccctgccactgggtgtcttgtgtatctttggacaagacacaccccctctttggtcttctgtctcttcagtgaaaataagagatgggaccctgaggctctcccaggcttatttgactgctagtgttccaagagctgggggatccagcacccctctgtgccagagagcaaacagccagctacctgagtttacattttttggcttctgcaattacagctgcttccccactggacctggggaattccgcctccaggtggagcagaggggccattcatgagggcatttcctgacccaccactgagcaaggccctccctgttatgtggaagcctgtggaacccaagagtttgagaacgtagctcatttgccattcaatcagtgctgtctcctacacaccactcccctcccttgaactttctcagcaaaatttgccccagaagaagaacttctctgaggcagcttaaaagatgctagaaggttctgttgttgttgttgttgttgttgttgttgttgttgttgttgttgttgttttaaacagagtcttgtgctggagtgcagtggtacgatctcggctcactgcaacctccacctcccaggttcaagtgattctcctgaggttcaatcttagcctccgagtaactgggattacaggtgtgcaccaccatgcccagctaattctttttgtacttttagtagagatgggttttgccatgttggtcaggctggtctcgaactcctggcctcaagtgatccacacgccttggcctcccacagtgctgggattacaggcgtgagccaccatgcccggcctagaagtttcatttctttcaatgagtctacctccgtggtgacttctggctccaggccgggcctcttgccccaaatctgtttatccacagcattgatatgcagactttttctgtataaggccagatagtgaatatgttacgatctgggagccatatgatctctgtcaaaagtctacaactctgtccttatagcaacaagacagcagccatagacaacacataagcaaatgggcactgctgagttccaataaaactttatttataaaatcagtcggccagctggatttgacctgcaggcaggctgtagttggccaaatcctaacagaagcttccatgcttttgcacaaagaagggagtcatgggggcagcttcaggcagaaagccaggtgggggacacagattgcaaattcagagcaggggagactcctcatgcttctccaagcacaactaattagctaccatgctgagattctcatctggagtctgttgcagtaaggttcacagtacactgaagagttaagactttggagtgtcagaagcctgagttcagatcttgattctgccgctaacagctgtgtcgtcttgggcaaattgcttgctgtctctggcctcctttccctgtaatgctgggctggcagtcccaagccccaggcatgttgtgagaatcacgcttataaagtgctgagcacaaggatggcacgtgggaggtaatcagtcggtctcagcagctgtggtcattgtcaccaatgtgtgtgtgtgtgtgtgtgtgtgtgtgtgtgtgtgtgtgtctggggagctgactgagcctcccctgctgactcaaaatggtcctctcttcagctccacaggcatccgggaggctgagcgttttggaacgccccctggcagggcctccagcgtcacgcggacaggaaaggaggagaacagcagcggtctcaagtacaaggctggccgggtaagtctctcaatggatttacctgtgagtcctgcagacccgggaaaggtcttttttttctcctcccgggagctctgtggctcctgtgctggcctgtgaaggtggagtgccaggccgggtcacgggggcatccaggacagatgccctggatgtaccttcaaggaaccttcacgatgctttgggtacagtgcacaaagcccccgcagggcttcgagtagcacctggatctcaaagtgcaggtctcacctgcctgcatgagaatcacctggggctattactgaacttgcagattctgggacccaccttggtctcctggaaaaggagttctctggggcgagggggatcctgcattcagctaggctgcccagagggttccagcgcagccccaaactctgagccccaatcactgatttcaatttgcgacttcagtgacctgaccaatagcaaagatgaacctctggtgactccaaccaaacagtatgaaaacatgtgcagttcaggtctgattgcacagactccaactgacacagattcctcaatggaaatgcacagacagagacggcagaactgggtaatccaaaatgtcttccatttgaagaaggcatgatccccattcattcataaacatgaatacattgccactttacccttaagaagctccattctagaacgtgcattctagtaattggggctgatattgccccccaaaggagtgaaaatttgttttggcgctggtggggggtgggggcggtggcaaaaattcttattctttctatgtaaaagcacaaatgtacatatggtacggaagcagaggcgtagtatgtctgtggcattacaatttcacagcaggggtgcaattaggaaaaaactgtctaaaaagtctccttagggagcaataataat

SEQ ID NO: 818 - DNA, 4149 bp, Homo sapiens
aaggcgctggcggccggcggctgccccagttctccgccgaggcggtgaggcgcctggccgggctgctccgcagggcactgatccgcgtggcccgcgaggcgcagcgcctgagcgtgctgcacgccaagtgcacccgctttgaggtgcagagcgccgtgcgcctggtgcacagctgggcgctggccgagagctgcgcgctggcagccgtcaaggcgctgtccctgtacagcatgagcgccggcgacgggctgcgccggggcaagtccgcgcgctgcggcctcaccttctcagtgggtcgctttttccgctggatggtggacacccgaatctccgtgcgcatccacgagtacgcagccatctccctcaccgcctgcatggagaacctggtggaggagatccgggccagggtgatggccagccacagccctgatggcggaggggccggaggcggggaggtgtctgctgaggccctggagatggtcatcaacaacgacgccgagctctggggcgtcttgcagccctatgagcatctcatctgcggcaagaacgccaatggtgtcctctccctccccgcatacttcagcccctacaacggcgggtccctgggccatgacgagcgagccgatgcctatgcccagctggagctccgaaccctggagcagtccctcctggccacctgcgtgggcagcatctcggagctgagtgacttggtctcccgtgccatgcaccacatgcaggggcgtcaccccctgtgcccgggtgccagccctgcccgccaggcccgccagccgccacagcccatcacttggtcccccgacgccctccacacgctctactactttctgcggtgtccacagatggagtccatggagaaccccaacctggaccccccgagaatgaccttgaacaatgaacggcccttcatgctgctgccgcccctcatggagtggatgcgcgtggccatcacctacgcagagcaccgccgcagcctcaccgtggacagcggcgacatccggcaggcagcccggctgctgctgcctggtctggactgtgaacctcggcagctcaaacccgaacactgtttcagttccttccggaggctggatgcccgagcagctactgaaaaattcaaccaggacctgggtttccgcatgctcaactgtgggaggacggacctcatcaaccaagccatcgaggccttgggtccggatggggttaacaccatggatgaccagggtatgacgccactgatgtacgcctgcgctgctggggacgaagcgatggtccagatgctgattgatgctggggcaaacttggacatccaggttccaagcaactcccccaggcacccttccatccaccccgacagccggcactggacctcactgacattcgctgtgctgcatggacacatctctgtggtccagttgctgctggatgctggtgcccatgtcgagggctcggcagtgaacggcggcgaggacagctatgcggagacgcccctgcagctggcctctgcggcagggaactatgagctggtcagtttgttgctgagccgaggcgccgaccccctcctcagcatgctggaggcccacggcatgggctcctccctccacgaggacatgaactgcttcagccactcagctgcccacggccacaggaacgtcctgaggaagctcctgacgcagccacagcaggctaaagcggacgtgctgtccctggaggagatcctggccgagggtgtggaggaaagtgatgcgtcgagccagggcagtggcagcgaggggcccgtgcggctgagccggacccgcaccaaggccctacaggaggccatgtactacagcgctgagcacggctacgtggacatcaccatggagctgagggcactgggagtcccctggaagctgcacatctggatcgagtctctgaggacctcgttctcgcagtcgcggtactcggtggtgcagagcctcctgcgggacttcagctccatcagagaggaggagtacaacgaggagctggtgaccgagggcttgcagctcatgttcgacatcctcaagaccagcaaaaacgactccgtcatccagcaactggctaccatcttcacccactgctatggcagcagtcccatccccagcatcccagagatccggaagaccctgccggccaggctagatccacactttttgaacaataaggagatgtcagatgtgaccttcctggtggaaggaaagctgttttatgcacataaagtcctgctggtgacagcttctaacaggttcaagacactaatgaccaataaatcagaacaggatggggacagcagcaagaccatcgagatcagcgacatgaagtaccacatttttcagatgatgatgcagtatctgtactacggaggaacagaatccatggagatccccaccactgacatcctggagctgctgtcagctgccagcctgttccagctggatgccctgcagaggcactgcgagatcctgtgctcccagaccctcagcatggagagtgccgtgaacacctacaaatatgccaagatccacaatgccccagaactggccctgttctgtgagggcttcttcctcaagcacatgaaggccctactggagcaggatgccttccggcagctcatctacggccgcagcagcaaagtgcagggcctggatccactgcaggacctgcagaacaccctggcagagcgcgtgcactctgtctacatcacctcccgggtgtgaggcagggggcggaggctgccgaggccagggcctgtggaggtgccagggcccaccatgtcggggtatggttgtaggccctcttggagccaggttcacggggctgtttcctcctcctcccccagatgtcccccctgtcaccgggcagctcaccctcatctcctctgccctagagctgtttgttcaatcactgatgggcaaaggggagatgtagctaactggtggccctcctccccatctcagtttgcaactcaagggcagccatgcactccccctgggtgtcgctctcccctcctgcaggtcagcagctgatcctgatccacctccgcccaggccctccaagctctactcacccctagggcctcagtaaactcagaccatcccaactggggctcctgggggtacaggaatccttatgaatgtatagaatgcatactgcctaggcccccagtcgtctgcagtaattcaaaagctggtatttttcttcctaaatgtcacatagcaaaggctgcccaaatccccaaacttgttcttcaaaggtttgacaggcttaatgtgggcatccagtggcctgtggacccccccctgccaccacgactgctgccacccggagttcccccattgtctttggtgcctgggcttccagagtccctcccatcaggactaccagcttgctcagttagcagcagagggcagttccccagcttgatggtttctgagctaagtctggcatggaggggcaaggggtaggggatggggtgctgtgtaggaatggcctcagctcttgttttgctgctggttttaggggccaaagtaaatgggtggattctggaacctcaggcctagactaggttgcctttgtgggggcgatgaagcagagtcccctggtcaagtctctcggctcctttaatgtaggattgagagctgggcaaacaggtcccactggggactgtgactcttggagattaaaggacagggcattgatggaaggtaagggccaggagaagaggcctttctgctgtgtcccctcacggccttgccctcgaattctgcaggccctgggctcccctgacacctgtcatatttatggaccagacactggggcagcatcaggcacagtctgtctgggtgcaacttcttcagctgtctggccgcaccttaaaaactatttattcaccaaaagccccaggcatttcagaaggtggcactcaggtcaccctgaaaagcccccaggggcttgcaattctggaaaatattttgactagctgcttggctggatgtacaaagaaataggcattattttattgctgtaatattgtatgatactttaactgtacaataatgttgtcacttactgtaaatgtactatggttttattaacaataaacactcattaacaatg

SEQ ID NO: 819 - DNA, 4395 bp, Homo sapiens
gtgtttgcacaaacatttcagcaaactatgctgccttcaataaggaaagcaagtcttgctctaattcgaaaaatgattcatttttgctctgaagcactgttaaaagaagtttgtgattctgatgttggtcacaatttgcctacaatactagtggaaatcactgcaactgtcctggatcaagaggatgatgatgatggccacttgctggctttgcagatcataagggatttagtagataaaggtggtgatatatttttggatcagctagccagacttggtgtaattagcaaagtgtcaacgttggcaggtccttcctctgatgatgagaatgaagaggaatcaaaaccagaaaaagaagatgaaccacaggaagatgctaaagaattgcaacaaggtaaaccatatcattggagagactggtcaatcattaggggaagggactgcttatatatttggagtgatgcagcagccttggaattatctaatggcagtaatggatggttcagatttatcttggatggaaaacttgccaccatgtattcaagtggtagtccggaaggtggatctgacagttcagaaagccgaagtgaattcttagagaagttacaaagagctcgaggccaagtaaagccatctacttcaagtcaacctatactgtcagcaccaggacccactaaacttactgtaggaaattggtcactgacatgtttgaaagaaggagaaattgctattcataattcagatggtcagcaagctacaatattgaaagaagatttacctggttttgtatttgaatctaatagaggaaccaaacattcatttactgcagaaacttccctgggttcagaatttgtgactggctggactggcaaaagaggcagaaaactgaaatctaagttagaaaaaacaaagcaaaaggtacgaactatggctcgagatttatacgatgaccattttaaagctgttgaaagcatgcctcgtggagtagtggtaacactcagaaacatagcaactcagttagagtcatcttgggaacttcatacaaatagacaatgtattgagagtgagaacacttggagagatttaatgaagacagctttagaaaacctaattgtacttttgaaggatgaaaacacaatttcaccatatgaaatgtgtagcagtggcttggtacaagcacttcttactgtgttaaacaatagcatggatttggatatgaaacaagattgtagtcaactggtagaaagaataaatgtttttaaaactgcctttagtgaaaatgaagatgatgaaagtcgaccagcagttgcgttaattcgaaagttaatagctgtactagaatctattgaacgtctacctctccatttgtatgatacaccaggatccacatataacctccagatacttacaaggagattacgatttcggttggaacgtgcacctggtgaaactgcattgattgacaggactggcagaatgttgaagatggaacctttggctacagttgaatctctggaacagtaccttttgaaaatggtagcaaaacagtggtatgattttgaccgatcttcatttgtttttgttcgaaaattaagagaaggacaaaattttatatttcggcaccagcatgattttgatgaaaatggaatcatttactggattggaacaaatgcaaaaactgcttatgaatgggtaaatccagctgcctatggacttgtagtagtaacgtcatcagaaggaagaaatctaccttatggccgcttagaagacatactaagtcgtgataattcagctttaaattgtcatagcaatgatgataagaatgcctggtttgccatagatctgggtctctgggtgataccatcagcatatacacttcgtcatgctcgtggttatggaaggtctgcactgagaaattgggttttccaggtatccaaagatggacagaactggacttctttgtatacccatgttgatgactgcagtctcaatgaaccagggtcaactgcaacttggcctcttgatccaccaaaggatgagaaacaagggtggagacatgtgagaattaaacagatggggaaaaatgccagtggacaaacacactacctctcattatctggattcgaactttatggcactgtaaatggagtatgtgaagatcagctagggaaagcagctaaagaagcagaagctaatcttagacggcagagacgtctagtacgttcccaggttctgaaatacatggttccaggagctcgtgttatcagaggcctggattggaaatggcgagatcaggatggcagcccacagggagaaggcactgtcacaggagaactacacaatggcacaacgcaatcatggagcagcttggtgaaaaacaactgtccagacaagacatctgctgctgcaggctcctcaagtagaaaaggaagcagcagttctgtgtgtagcgtggccagtagcagcgacatcagcttgggttcgaccaaaacggaacggagatcagaaattgtaatggaacacagtatagtttcaggagctgatgtccatgaaccaattgttgttctttcatctgctgaaaacgtccctcaaacagaagtagggtcatcttccagtgcaagcaccagcaccttaacagcggaaacgggaagtgaaaatgctgaaaggaagttaggccctgatagttctgttcgtactcctggggagtctagtgcaatatccatgggaattgtcagtgttagttctcctgatgttagttcagtatctgaattaactaataaagaagcagcttcacaacgacctcttagctcttcagcaagtaacagactgtcagtgagttctttgttggctgctggggcccctatgagctctagtgcaagtgtacctaacctgtcctcaagagaaacatctagcttggagagttttgtaaggagagtggcaaacatagcacggactaatgccacgaacaacatgaatctaagccgaagcagcagtgataacaacactaatactttggggaggaatgtgatgagcacagcaacttctcctcttatgggtgctcagagtttccctaatttgaccacacctggtactacatcaacagtgactatgtcaacatccagtgttactagcagcagcaatgtagctacagcaacaacagttttatcagttggtcaatctttaagtaacactttaaccaccagcctcacatcaacttccagtgagagtgacacaggtcaggaagcagaatattccttatatgatttccttgatagctgccgtgccagtactctattggctgagctcgatgatgatgaggacttacctgagccagatgaagaagatgatgagaatgaagatgacaatcaggaggaccaagaatgcgaggaggttatgattctgagacgcccatccctgcaacgtcgagctagctcccgctctgatgtaacgcatcatgctgttacctcgcagctaccacaggtacctgctggagcagggagccgacctattggggagcaggaagaagaagagtacgaaactaaaggaggacgccggagaacatgggatgatgattatgtgctaaagagacagttttctgcattggttcctgcttttgatcctagacctggtcgtactaatgtccagcagacaactgatctagaaataccacccccagggacccctcattcagagctcttggaagaagtcgaatgtactccgtcacctcgattagctctcactttgaaagtaacaggtcttggaacgactcgtgaagttgaattaccactcaccaatttcagatcaaccatcttttactatgtacaaaaattgcttcaattgtcctgtaatggcaatgtgaaatcagataaacttaggcgtatttgggagcccacatacacaatcatgtacagagaaatgaaggattctgataaagaaaaggaaaatggaaaaatgggttgctggtctatagagcatgtggagcagtaccttggcgctgatgaattaccaaagaatgacttgataacctacctgcagaagaatgcagacgctgctttcctgcgccactggaaattaactggcactaataaaagtattaggaaaaacagaaattgttctcagctcatagctgcatataaggatttttgtgagcatggaacaaagtctgggttaaaccagggggccatttctactcttcaaagtagtgatattcttaatttaacaaaagaacaacctcaggccaaagcaggcaatggacagaactcttgtggagtagaagatgtccttcagcttctgcgtattctatatatagttgcaagtgacccttattcaagaatatcccaggaagatggtgatgaacagcctcagtttacttttccaccagatgaattcactagc

SEQ ID NO: 820 - DNA, 3532 bp, Homo sapiens
gctcagttccccttgccttctgctgtatgctggtcccagagagcccgagtccgggtctccacgctttatttggcagggggcgcgcgggttccggagctgtccagcacctcctggccaagttctctgcgctctccgcgcccgggaagctctccgcgccggggaagctctccagcgccccgcccccggcagggaacctctccaccaggacacccggggctccccaggctcgccatccgtccccaccagtctctacctactttgcccagctccacctcagcagtgcagcgtgttttggtggccttcctccgcacgccctggagggggagtgccctgcaccccggggctgctccggagcccagtgcacgagtgcacatgggcttccctcctttgcttaaagggcaggcgagcgctactcgctccagccttgcctcctgcagctgggtggtcttttttctctcctgtctttcaagacacgcgcccgaaatcgaggggtgagagcaaagaccgcccatcaacttagcaccttggatttagagctttcaatcccgaaaggagagggagacgatggactgagctgatccgcaccatggagtctcgggtcttactgagaacattctgtttgatcttcggtctcggagcagtttgggggcttggtgtggacccttccctacagattgacgtcttaacagagttagaacttggggagtccacgaccggagtgcgtcaggtcccggggctgcataatgggacgaaagcctttcactttcaggatactcccagaagcataaaagcatccactgctacagctgaacagttttttcagaagctgagaaataaacatgaatttactattttggtgaccctaaaacagacccacttaaattcaggagttattctctcaattcaccacttggatcacaggtacctggaactggaaagtagtggccatcggaatgaagtcagactgcattaccgctcaggcagtcaccgccctcacacagaagtgtttccttacattttggctgatgacaagtggcacaagctctccttagccatcagtgcttcccatttgattttacacattgactgcaataaaatttatgaaagggtagtagaaaagccctccacagacttgcctctaggcacaacattttggctaggacagagaaataatgcgcatggatattttaagggtataatgcaagatgtccaattacttgtcatgccccagggatttattgctcagtgcccagatcttaatcgcacctgtccaacttgcaatgacttccatggacttgtgcagaaaatcatggagctacaggatattttagccaaaacatcagccaagctgtctcgagctgaacagcgaatgaatagattggatcagtgctattgtgaaaggacttgcaccatgaagggaaccacctaccgagaatttgagtcctggatagacggctgtaagaactgcacatgcctgaatggaaccatccagtgtgaaactctaatctgcccaaatcctgactgcccacttaagtcggctcttgcgtatgtggatggcaaatgctgtaaggaatgcaaatcgatatgccaatttcaaggacgaacctactttgaaggagaaagaaatacagtctattcctcttctggagtatgtgttctctatgagtgcaaggaccagaccatgaaacttgttgagagttcaggctgtccagctttggattgtccagagtctcatcagataaccttgtctcacagctgttgcaaagtttgtaaaggttatgacttttgttctgaaaggcataactgcatggagaattccatctgcagaaatctgaatgacagggctgtttgtagctgtcgagatggttttagggctcttcgagaggataatgcctactgtgaagacatcgatgagtgtgctgaagggcgccattactgtcgtgaaaatacaatgtgtgtcaacaccccgggttcttttatgtgcatctgcaaaactggatacatcagaattgatgattattcatgtacagaacatgatgagtgtatcacaaatcagcacaactgtgatgaaaatgctttatgcttcagcactgttggaggacacaactgtgtttgcaagccgggctatacagggaatggaacgacatgcaaagcattttgcaaagatggctgtaggaatggaggagcctgtattgccgctaatgtgtgtgcctgcccacaaggcttcactggacccagctgtgaaacggacattgatgaatgctctgatggttttgttcaatgtgacagtcgtgctaattgcattaacctgcctggatggtaccactgtgagtgcagagatggctaccatgacaatgggatgttttcaccaagtggagaatcgtgtgaagatattgatgagtgtgggaccgggaggcacagctgtgccaatgataccatttgcttcaatttggatggcggatatgattgtcgatgtcctcatggaaagaattgcacaggggactgcatccaaggcttagtagtcagtgcctccatcaaaatggggaaactttgtataacagtggtgacacctgggtccagaattgtcaacagtgccgctgcttgcaaggggaagttgattgttggcccctgccttgcccagatgtggagtgtgaattcagcattctcccagagaatgagtgctgcccgcgctgtgtcacagacccttgccaggctgacaccatccgcaatgacatcaccaagacttgcctggacgaaatgaatgtggttcgcttcaccgggtcctcttggatcaaacatggcactgagtgtactctctgccagtgcaagaatggccacatctgttgctcagtggatccacagtgccttcaggaactgtgaagttaactgtctcatgggagatttctgttaaaagaatgttctttcattaaaagaccaaaaagaagttaaaacttaagttgggtgatttgtgggcagctaaatgcagctttgttaatagctgagtgaactttcaattatgaaatttgtggagcttgacaaaatcacaaaaggaaaattactggggcaaaattagacctcaagtctgcctctactgtgtctcacatcaccatgtagaagaatgggcgtacagtatataccgtgacatcctgaaccctggatagaaagcctgagcccattggatctgtgaaagcctctagcttcactggtgcagaaaattttcctctagatcagaatcttcaagaatcagttaggttcctcactgcaagaaataaaatgtcaggcagtgaatgaattatattttcagaagtaaagcaaagaagctataacatgttatgtacagtacactctgaaaagaaatctgaaacaagttattgtaatgataaaaataatgcacaggcatggttacttaatattttctaacaggaaaagtcatccctatttccttgttttactgcacttaatattatttggttgaatttgttcagtataagctcgttcttgtgcaaaactaaataaatatttctcttacctt

SEQ ID NO: 821 - DNA, 3585 bp, Homo sapiens
actattgggcgttacgcgagggcggggccggttgccaggacgacgcctgcgaagatggccgctgcgtcctcatcggattccgacgcctgcggagctgagagcaatgaggccaattcgaagtggttggatgcgcactacgacccaatggccaatatccacaccttttctgcctgcctagctggtggtaggggaccttggccctggtgggcagcagccccgcctgaaggtgctcaaaggaccactggtgatgaccgaaagcccgctacctgctctgccagctgctgctgccaccttcctcatggagcaacatgagccccggaccccagctctggcacttgcttcaggcccttgtgtctatgtgtataagaatctcagaccctacttcaagttcagcctgccccaattgcctccaaatcctctggaacaagacctttggaaccaggccaaagaggaccgaatcgaccccttaaccctgaaggagatgctggagagcatccgggagacggcagaggagcctttgtccatccagtcactcaggtttctgcagctggagctaagtgaaatggaggcatttgtaaaccaacacaagtccaactccatcaagcggcagacagtcatcaccaccatgaccaccttgaagaagaacctggctgacgaggatgctgtgtcttgcctggtgctgggcaccgagaacaaggagctcctggtgcttgaccccgaggccttcaccattttagccaagatgagccttcccagcgtccccgtcttcctagaggtttctggccagtttgatgttgagttccggcttgccgcggcctgccgcaatggaaacatctatattctgagaagagactccaagcaccccaagtactgcatcgagctgagcgcccagcctgtgggacttatccgggtacacaaggtcctagtggtgggcagcacccaagacagcctgcatggcttcacccacaaggggaagaagctgtggacagtgcagatgcccgcagccatcctgaccatgaacctcctggagcagcattcccggggcctgcaggccgtcatggctgggctggccaatggagaggtccgcatttatcgtgacaaggccctgctcaatgtcatccacaccccggatgcagtgaccagcctttgctttggccggtacgggcgggaggacaacaccctcatcatgaccactcgaggtggtggcctgatcatcaagatcctgaagcgtacagcagtgtttgtagagggaggaagtgaggtgggtcccccaccagcccaggccatgaaactcaatgtgccccgaaagacccggctttacgtggatcagacactgcgagagcgggaggctggcaccgccatgcaccgggccttccagacagacctatacctgctgcgcctacgtgctgcccgcgcctacctgcaggccctcgagtccagcctgagccccctgtccacgacagcccgagagccactcaagctgcacgccgtggttcagggccttggccccacctttaagctcacacttcacctgcagaacacctcaacaacccgtcctgtcctggggctgctggtctgcttcctgtacaacgaggcgctctattccctgccccgggccttcttcaaggtacccttgctggtgccagggctcaactaccccctggagacctttgtggagagtctcagtaacaagggcatctcagacatcatcaaggtaggccccgcacttgtaccacgtggaaggtgagcaggaccctggggaggacagtaagggtgagtgccaacaaagaccttagggggctcctgggtgggggtgggggtatctgcacagtggagccctgtggcctgtcattagggccagcgcagaccaggcaaggggtcaggggtgtatgccccctgctgccatggccactcctccataggtgctggtgcttcgagaaggccaaagtgcacccctgctgagtgcccacgtcaacatgcctgggagcgaggggctggcggccgcctgagacctgagctgctgtgaaagcccctgcacaatcagccagggagaactgggcgggtttagtggccccaggcccactcctcatgcagcagtgtgctggggcgacagctcgtctcccctctcttaagcacccgcttcctcaccacccccactgttgggcctatagtagcaggttagtgagtacctagggcggctcaactcctcccacagcaccaacccagcatggtcccactgaagtcctactacgccctcccctccccagccttttccagaaaccatactgggctcagatcagagctccgaagcggtcaaagtgagctgagcaggacaggcccagcctttctccactgccacgtccctcatgcacatcactcatctcctgctgcaggccaaggccaaaattgggctagtcctggccagggaaatcagaagctcttcttgggtgagattgagcctcctgttgctccctggagttccggaggctgggctgcagcccactcagcttgcgggcaaaatacgtgctctcctctctccttgtcagctgagcaaacccagggaatagccctcctctccccaggaaacttctctgaaatcttagacttagccagtcttaggcctacgatgccacacaaaggttgttcagggagaagggggtgcaggaggcagagggtgccccgcagggagctggtggctccagccccactagagctcctaaagatcacacagcagctgctcctgacagggatgctcatgcccagaaagcaagcccaggagaggaaggcagagtgtgacagagcagagccagggccaggcgcaccaggagaggcgtttctggggctccagagaagtgccacgggaggcagaagtccagaactgcccatatagatgcccttctacatcctggagcccaaatcagtcatgtgggtgggaagttcccagggcagtggtcacatcgtgaaaattagcaggaaaggcggggcctttcttgtcatagctatttctgaggatgaaatgggagacatatgcccagcacctgatgtaagtttatataatgtaatattatgtacctaccactaagaaatacatgaaccgtgccatgaggacagtaagtgttcataaagcaacatgaagcaagaaacagtgcagggtgcccagtgcacacactagagagaaattgtgaacattaaggacaaggagaattggtgtctttctaaaacatacttatttaaaaacacatacccacttactaatgtggaattacacagtttgtaacaagaaaacagtctctcccattctctagtactgctcccctacccagcagtcacttccagttcattcagctatttttaaaatgtgcttatatgactcttgcttgatatatcaatcttaaacattacctgttgactccctgttgtcatacatgaggctttagctctcttttgtcagcaaccctcccccatccctagttattaggttaaaaaatactcagattactatttctattactatgtgaaagttaactgcggagccaagagttggactataattaaattaccttccttgtactttctttttaatgg

SEQ ID NO: 822 - DNA, 2755 bp, Homo sapiens
gtttctggcgaccgtccccacccgggctcgcgtctccgtttctccgagaggcccaaggtgtctccgccgcagcctctgtcgcgccgtgacctgtacaggtcgcgggagtcgtagggaggacgccgggacacctggaagccgagaaatggattcagtggcctttgaggatgtggctgtgaacttcaccctggaggagtgggctttgctggatccttcccagaagaatctctacagggatgtgatgcgggaaaccttcaggaacctggcttctgtaggaaaacaatgggaagaccagaacattgaagacccattcaaaattcccaggagaaatataagagagactctgtgaaagtaaagaaggtggtcaaggtgaagaaaccttcagccagattccagatggtattctgaacaagaaaactcctggagtaaaaccgtgtgaaagcagtgtgtgtggagaagttggcatgggtccttcatcacttaataggcacatcagagatcacactggacgtgaaccaaatgaatatcaggaatatggaaagaagtcatatacacgtaaccagtgtggacgagccttgagttatcatcgctcttttccagtacgtgaaaggactcatcctggaggaaagccctatgattgtaaggaatgtggagaaacctttatttctcttgtaagcattcgaagacacatgttaacgcataggggaggtgtaccttacaaatgtaaggtgtgtgggaaagcctttgattatcccagtttatttcgtatacatgaaagaagtcacactggagagaaaccttatgaatgcaagcaatgtgggaaagccttcagttgttccagttacattagaatacatgaaaggactcacactggagataaaccctatgaatgcaagcagtgtgggaaagctttcagttgttccaagtacattcgaatccatgaacgaactcacacaggagagaaaccctacgaatgtaaacagtgcggtaaagcctttaggtgcgccagttctgttcgaagtcacgagaggactcacaccggagagaaactttttgaatgtaaggaatgcgggaaggctttgacttgtcttgcaagtgttagaagacacatgataaagcacactggcaatggaccttataaatgtaaggtgtgtgggaaagcctttgatttccccagttcatttcgaatccatgaaaggacccacactggagaggaaccctatgattgtaagcaatgtgggaaagccttcagttgttccagttcgtttcgaaaacatgaaagaattcacactggagagaaaccctataaatgtacaaaatgtgggaaagccttcagtcgttccagttacttccgaatccatgaaagaactcacactggagagaaaccctatgaatgtaagcaatgtgggaaagccttcagtcgatccacttactttcgagtacatgaaaaaattcatactggagagaaaccctatgagaaccctaaccctaacgcttcagttgtcccagttctttcatgagcatgaaaggagtcacatagagaaaccccatgaaagtaagaaatttgggaaagccttcagtcctttctgtttctttcaactacgtgaaaggattcacagtggagaaagaccctgtaagataattggctttaaattacgagagacttgtgataggacagtaaaacctagagttggagttggatctctggattgtgttatatcagtgttggtaggttaggaactagatttcccagaatccattccatttgtgattccatgatacaattcaccagtaacctatcttacatgagattcggaagtaagttaaaaaggcattagtcatggtttggaagcaccatacagggagacagctgtgtgaatacaggctgtatggacacttgcttccatcccattttcctgcttctttgggttgccaatcaagagtatcctcaaaacgacttgactttaattttctcggaggtgataggcttccacacaggtctccagaagccctgcattgaatatccatccacactttggttttccttcagacattattatgtctgtactaggcaactaattcagactgtcctggttgggaatattctgtgatgctctgactcccctagtctgtagacggaattggcatacggtctaatttgtgtagtaagcacctttgttcatactagtagtgactgtattcttgattcagcctgatagctaccatgctgctgtcaaaaccaaccagaggggagcttgttcttctactgtagtgtgcagtgactggcctcacccaggactttgatgtgagaatgagcactttcctctatcaggaaatttcaagtgtttcctgttattcgtagctcaatgtaatgcctcagttcattttcagttgtttgattatatgtgactaatatgtattttttattcaaacaagacttctgtacatgtttcttcaaaacagtttattaactgtcttcagtcttggattacatcaagtttataattttggcaaattgttaagacactgtgaagtcagcgttaaccatgtgcatacaacttaaggaattttttcctcctcatgtaaattttacttttcatgcttatatagtttcaacttttatcttcatagtaatttctcatctactcataataccaaaagttaagtcatgctgttttgtgtgctctcttgctaaagaccgcagagaccatacctgttgtcaaagagggtgtaataaactgtaataataatcatg

SEQ ID NO: 823 - DNA, 2723 bp, Homo sapiens
acggggcggacctcgcgcggacggacggacggagacggcgccgccacattcctatgcccgggagcggcggcggcggcggcggcggctcccgcgggaggcggcaggcgcgcggcgcggacagctgagcttctcctccgtcggcgcccgggcggacatcgcccgggccccgatggtttgagcttgcttctccctccctcccgacccccgtggtggcgaggccacgccatgtgaaggttagggccgggacatcccgaggagccgcggtgaaagatgggggatgctgcagaccccagggagatgagaaagacgttcattgttccagccatcaagccttttgaccactatgatttctccagggccaaaatcgcctgcaatctggcctggctggtggccaaagcctttgggacagaaaatgtgccagaggaacttcaagaaccattttacacagatcagtatgaccaggaacacatcaaaccacctgttgttaatttgcttctatcggctgaactatactgtcgtgctgggagtctctttctcaagagtgatgctgcaaaaccccttttgggccatgatgctgtaatccaggctttagcacagaaaggtctttatgtcactgaccaggaaaaattggtaactgaacgagatctccacaagaaacccatacagatgagtgcacatttggccatgatcgataccctcatgatggcttatactgtagaaatggtcagtatagaaaaagtaattgcgtgtgctcagcagtattcagctttttttcaagccacagatctgccctatgatattgaggacgctgtcatgtactggataaataaggtaaatgaacatttgaaagacataatggaacaagaacaaaaactgaaagaacatcacacagttgaagctccaggaggtcaaaaggctcgttatcggaaagagcaaacattgcttaagcaactgccttgcattccattggtagaaaatttgttgaaggatgggacagatggctgtgcattagctgcccttattcatttttactgtcctgatgttgtcagattagaggatatttgtttgaaagaaactatgtctttggctgatagcctgtataatctgcagctgattcaagaattttgccaagaatacttgaaccagtgttgccatttcactctggaagatatgctctatgctgcttcatccataaagagtaattattcggtgttcatggcggaactgttctggtggtttgaagtggtgaagccgtcttttgtacagcctcgtgttgttcgtccacaaggagctgaacctgtaaaagatatgccttcaattcctgtcttgaatgctgccaaaagaaatgtcttagatagtagttctgacttcccttcaagtggggaaggagctacatttacacagtctcatcatcatttgccttctaggtattcacgtccccaggctcattcttcagcctcaggaggaattagaaggtcttcatctatgtcttatgttgatggcttcatagggacatggcccaaagagaaaagatcatcagtgcatggcgtatcatttgatatttcttttgataaagaagatagtgtacagagatccactccaaaccgaggaatcactcgttctattagtaatgaaggacttactctgaacaacagtcatgtatctaaacacattaggaaaaatttgtccttcaagccaataaatggagaagaggaagcagagagcattgaagaagaacttaatatagattctcacagtgacctcaaatcttgtgtgccccttaacacaaatgaactaaattctaatgagaatattcattacaagcttccaaatggagctttacaaaatagaatacttcttgacgagtttggcaatcagatcgagacaccaagcattgaagaagcattacaaataattcatgatactgaaaaatctcctcatacacctcagccagaccaaattgctaatggcttctttcttcatagtcaagaaatgagtatcttaaattcaaatatcaagttaaatcaatctagtcctgataatgtaactgatacgaaaggtgccttgagtcccataactgacaatactgaagtagacactggaattcacgttccttcagaagatattcctgaaactatggacgaagattcttcgttgagagattatactgtaagcttggactctgacatggatgatgcatctaaatttcttcaggattatgatattcgaactggcaacaccagggaagctttgagtccttgtccaagtactgtaagtaccaagtctcagccaggcagcagtgcttcttctagttctggagttaaaatgaccagctttgctgaacaaaaattcaggaaactgaatcataccgatggaaaaagtagtggaagcagttctcaaaaaactacaccagaaggctctgaacttaatattcctcatgtggttgcttgggcacaaattccagaagaaacagggcttccacagggacgggacactacccagctgttggcctctgaaatggtgcatcttaggatgaaactagaagaaaagaggcgtgctatagaagcccagaaaaagaaaatggaagctgcttttaccaaacagagacagaaaatgggaaggacagcattccttactgtagtgaaaaagaaaggggatgggatatctcctctacgagaggaagcggcgggtgcagaagatgagaaagtatatactgatcgagc

SEQ ID NO: 824 - DNA, 2443 bp, Homo sapiens
cggcaacacttcagggctctttcaaaatctggtagctacgagctcttccgtgactgagatgggacaagagtgaagatttgtccttgcttttagctctgctccagttcatagttctaatgggaaattatgtgacttaaacccaggctgtgagatgcatcagtgacgtgtgggcataaaataaaccctcgagatgttctcttgcatggtacactggcctacgcaggaatattcttgaggctaaaactgtagaactgtcagactagtgttatgaatgtggtggtgagaggcctgtgcagccgcggggcctgtgatgtgtctcctgtgtgtctttcactcctatgcagtttgagttcatgatcgagtccatcctgtatgcccgggatgcctggctgaaggaggacggggtcatttggcccaccatggctgcgttgcaccttgtgccctgcagtgctgataaggattatcgtagcaaggtgctcttctgggacaacgcgtacgagttcaacctcagcgctctgaaatctttagcagttaaggagtttttttcaaagcccaagtataaccacattttgaaaccagaagactgtctctctgaaccgtgcactatattgcagttggacatgagaaccgtgcaaatttctgatctagaggtgagaaaaagatgaattgctccttacattcgataatcagtgaccacgaaacactcagaccagagcctggcttatcaaaaaccttcagtgagtgctgggggtgtgagtgaataactaattattttattatgcaaataagtgaatttataaaacgtttgctactgattttttccagtcttttttcttttttacgttctattttgattctttcatattgtacaccattttatgtctccagcgtcttcattttagatttatgtttaatattctcagcatcttcaaaatcaaataaattatatttcgtttcattatggtatttgcattacagtttttttcaagtattttaagccactcttcatgacagaatcgttagaattccctccgtgaatccctgtctgtggccgcgcggtggcgctcgtgggctctgggcggtttccccgcgcccccgccctgcctggcgccccagctggcgccgcgtctggagatggggcgggcgcggtggcgccggcgcgctttggtttttagttcgttctgctgtggaaaggcccagcctggagctctccaactccttaactggaagagctgagcgccgaaaagattccgcaggaatctggggtagaaaattgggcgcaagaagctcagatgcttgaaacgtttctgactgaagcctctgaactcacgatgcgggttttgggggtggtttccccaggctggggggcttttctacggttcctgacgcattcagcgtctgcgcggggcgcgtggagggggccgccccaacccgggccctgcggtgccacgcggtgcccacgcgtgccttgtcatctgcttgacccagaccctgaggggcgagctgcgcttcgacatcaggaaggcggggaccctgcacggcttcacggcctggtttagcgtccacttccagagcctgcaggaggggcagccgccgcaggtgctcagcaccgggcccttccaccccaccacacactggaagcagacgctgttcatgatggacgacccagtccctgtccatacaggagacgtggtcacgggttcagttgtgttgcagagaaacccagtgtggagaaggcacatgtctgtggctctgagctgggctgtcacttccagacaagaccccacatctcaaaaagttggagaaaaagtcttccccatctggagatgacagttgatgctttatttggaaagcagtgtgcatatcttgaggggtgatgaacacaagcaaaccaagttgcacctggcttctgcacactcctgcgaaagtcggtgaacattcactccacattgacccctccctagcctggcaggtgacgtcagggtccttcacagacaaacacgcttgggctcggcaggagctgccgtggccacccccgctgcccagtgtctgccctctagaagtaggctgtgtttccaggtgttcacccgtggtgcccacagtgccgacccgtggctgggtcggagctccatgttcctaagctaggtctaggtctacactcctaggacgcacgcatatcagcccgtgtaccctgtgacggtgactgtccccacctcctgtgttagtggtgcccttactgccgtcgctcatccactcgtgtgggacgtaggattgcacagggctgtgccagtggcgtgtagggaacactgccctggctcagcgtgcgagctaaggtggcgatgtatgcgatgggactctgcatgggatagtacagttgtgtagacgtcttccaaataaattatgtgttggtgcatcgcacatgctcaataaatatttttaaatg

SEQ ID NO: 825 - DNA, 4005 bp, Homo sapiens
tattatacaaaactaggtgtggatgtagttgtgcacattatagcagaaattatgagaatgatcatttcagattgaacaggaatttactattacaggggttagtatcattcaaggatgtggctgtggatttcacccaggaggagtggcagcaacttgacccttctcagaggaccctgtacagggatgtgatgctggagaactacagccacctggtctcaatggggtatccagtttccaaaccagatgtcatctccaagttggaacaaggagaagagccatggatcataaagggagacatatcaaattggatctatccagatgaatatcaggcagatgggagacaagggaagtgaaatatcaatttatgtttttttaattgattggtgcctgaggtttatgtttctatccttatcaaaatctcctattctttgcttctatgctgagaatttagtagtcactcaacaagtaattgtgaagcctttcagaggagttctatttgttgttgatcctgtctcttgtgtgtatatatatatgtttatatttgttgtctttcctgaaagggttttaaaggcaatagaaggcaaattcctttcaagaacacaagctgtgctttaaaaggcaatattcccagataaatgactgtattaaattaaatgtcaaatacagttactgttttagaagttcagagaaaattaagagtctaaagagatgtgagcgtatttgagaaacatttttcagagcatgcaactgtaactgctctgaatgacataaatgctgatgaggctgaaggaggagggtgaaggcaagcagtgttggagagagagtatatgaacaaaaccttagggtcaggaagatacagcttttctgggagaactttactagttttactcgacatgtatagaaagtagtttattgggagtagtggaatttacgtctgtattctcagtttgactctgatactgaatctgtagcaggatattggatttttctattatttgttagttgttaggaaaatagatggaggagagttaaagtattttgcatacagaagataccttgttttttagagtgatggtaggataataagaatgtgtagcacatgatttataatataaatgaaattaaaaggtgaaaaggggtttctattcagaaagcagaagtgaaatattctagaagaataatcaaaaattagtgatgagaccccactttttcatctcttttaagtttagtttttacatgaatatttctgtttaacattcttgtctgtctattcacctgataacactatatgctgtactgtcttctgagatgacctgtttccatcctttttttgtgagttcatctactatgttggatcatccatttgttctacttctttaccctcttaattgactcttgtgatgactcttaaattgtatcttttcttcttttagacaggaagagtaaccttcacaactcccagtcatgtattttggggacagtttccttccatcataagatactgaaaggagtcacaagggatggttcattgtgctccattttaaaagtctgtcaaggtgatggtcagctgcagagatttctagagaatcaagacaaactcttcaggcaggtcacatttgttaacagcaaaacagtgactgaggcatcagggcttaaatataatccactggggaaaatatttcaagagtgcatagaaacagatatatcaatacagagattccataaatatgatgcttttaaaaagaacttaaaaccaaatattgacctaccgagttgttataagagcaattcaagaaaaaaacctgatcagagttttggaggtggaaaatcatctagccagagtgagcccaattctaatcttgagaagattcacaatggagtaataccttttgatgataatcagtgtggaaacgtttttagaaatacacaatcccttattcaatatcagaatgtggaaactaaagagaaaagctgtgtatgtgttacatgtggaaaagcctttgctaagaagtcacaactcattgtacatcaaagaattcatactggaaagaaaccatatgattgtggtgcatgcggaaaagccttcagtgagaagtttcatcttgttgtacatcagagaactcatactggggagaaaccttatgattgttctgaatgtggaaaagccttctctcagaaatcgtcccttattatacatcagagagttcacactggggaaaaaccctatgaatgtagtgaatgcgggaaggccttctcccagaaatcacccctcattatacatcagagaatacatactggggaaaaaccctatgaatgtagagagtgtgggaaggccttttcccagaagtcacagctgattatacaccacagagctcatactggagagaagccgtatgagtgtaccgaatgtgggaaagccttctgtgagaagtcccacctcattatacataaaagaattcacactggtgagaaaccctacaaatgtgctcaatgtgaggaagccttcagcaggaagacagaactcattacacatcagttagttcatactggggaaaaaccttatgaatgtactgaatgtggaaagacattctcccgcaagtcacagctcatcatacatcagagaacacatactggagaaaaaccctataaatgtagtgaatgtggcaaagccttctgccagaagtcacatctcattggacatcagagaattcacacaggagaaaaaccttatatatgtactgaatgtgggaaagccttctctcagaagtcccaccttccgggacaccagcgaattcatacaggagagaaaccttacatatgtgctgaatgtggaaaggccttttctcagaagtcagaccttgttttacatcagaggattcatactggggaaagaccctatcaatgtgctatatgtgggaaggccttcatccagaagtcacaactaactgtacaccagagaattcacacagtggtaaaatcataatgaactggccacagaaaagccttagtattagctcaagccttaataattactagaaacccaattaatttgataagcttggggacaacatcccaatagataaaaatttttaagggaatttgtttctagtttggtgatgcctaacttttccagcaaagatgatggaaaatagttatataaatgaagaacatttttaatatggcatgtaaagcttttaaagttatgaactcagtgatcagcacagcaagttaagcatacagaatattgtcaagttgcatattccttatactacaaaatgataatcagccattgtgaaactgctaatattagcttgtcataattatggccataaactaatttttctataaaagacgtggaagaaagcttaagtaaacaataaaataaaacctatacactattttaagaaggggcttgagcatgacccctaaagctacatgtaaagttcttgtacaaaaaatggaatgataggttgatcagattcagtaaagttgatctgtatgcattttcccatctcaagcatataagttgacctgcatctctggaaggaccttgagattgatgcattttgagcaggtctcccttttactcttcccaactgggaacttggagctgaaaaacattggcactgaggccagatggccttgggtttaatcctggctcagtgcctcacagattgtgtgactttaggcaaacatacttctcctagctgagtattttttatcagtaagtacaaatacaatgcagagctcattttcagttaatattagtactttttaaatctttactctctatcttgaagcattagatgttaagactaatgtgtaaaaaccacgtctgagcttgcttttccctctggacactctgcttttgattgcctatccctataagtggctcattttactgtcttctgatcctggtggccttatttttgctatgttaaggttgtgttttttaatacttggatttattttcatatacttacataaaccgtggtgattgcacat

SEQ ID NO: 826 - DNA, 3732 bp, Homo sapiens
gatcgactgcttcggaccatggcttttcatggtctattgaatgatggaactgtgggtatttttaggggcaaccagatgcgcttaaagcgagcctgcattcgcaaagcaaagatctctgctgttgctttccggaaagctttctgccaccacaagttagtggaacttgatgccacaggtgtgaatgctgatatcacgattacagacattatcagtgggcttggcagtaacaaatggatccagcagaatctccagtgcctggtgctgaattcattaactctctccctcgaggatccttacgagcgctgcttcagccggctttctggccttcgagctttaagcatcacgaatgttctcttttacaatgaagacctggctgaagttgcctcattgccaagattagagagcttggatatttctaacacctcaatcacagacatcactgctctactggcctgcaaagaccgactcaagtctctaaccatgcaccacttgaaatgtttaaaaatgacaactacccagatactggatgtagttcgggaactcaaacatctgaatcatcttgatatctcagatgataaacagtttacatcagacatagctcttcgcttactagaacaaaaagacatcctacctaaccttgtttctctggatgtttctgggagaaagcacgtgacagataaagccgttgaagcctttatacaacaacgtccaagcatgcaatttgtaggtttgctggctactgatgctggttactctgaattcctcacaggcgaaggacatttgaaggtgtctggggaagccaatgaaactcagattgcagaagcactgaagcgttacagtgaacgggcattctttgttcgggaagctctatttcatctttttagtctgactcatgtgatggaaaaaacaaagccagaaattttaaagcttgtggttactgggatgagaaaccaccctatgaatttgccagtgcaactggctgcaagcgcctgtgtatttaacttaaccaagcaggatcttgctgcaggaatgcctgtccgactcctggctgatgtgacccatttgctgctcaaagccatggaacattttcccaatcaccagcagttacagaagaattgcctcctttcactttgcagtgaccggatccttcaagatgttccatttaacaggtttgaagcagccaagcttgtcatgcagtggctttgcaaccatgaggatcaaaacatgcaaaggatggcagttgctatcatttctatcctggctgccaagctttctacagaacaaactgcacagcttggtactgagctcttcattgtcaggcaacttcttcaaatagtgaagcagaaaaccaatcaaaattcagtggacactacattgaaatttactttgagtgcactttggaacctcacagatgaatctccaaccacttgtagacactttattgaaaaccaagggttagaactcttcatgagggttctagagtctttcccaactgagtcatccattcagcagaaagttctaggacttttgaacaatatagctgaagtacaagaattacattctgaattaatgtggaaagattttatagaccacatcagtagtctcctacacagtgtggaagtggaagtcagttactttgcagctggaattattgcccatttaatatccagaggtgaacaagcttggacattgagtcgtagccagaggaattctctgctggatgatttgcattcagctattttgaaatggccaactccagagtgtgagatggtagcatacaggccctttaatccatttttcccattacttggctgtttcacaacaccaggagttcagctatgggcagtttgggccatgcaacatgtctgcagcaagaatccttcaaggtattgcagcatgctgattgaagaaggaggattgcagcatttatacaacatcaaagatcatgaacatactgatccccatgtccaacagattgctgtggccattctggatagcttagaaaaacacattgtgcgccatgggaggccacctccctgtaaaaaacagccccaagccagactaaattgatagccataagtattggatagttgaatcacaggaatcctttttgtgattggtccatttggaatatcttaccctccctgatgttttgggggtttctatgacaagagtcataaaatcagtttgggattgataatgtgtagtactgcccatgtgaacagtctctaatttgtcttgtgattttaaacttatgagtcaagaagggtctcttcctttatcattgccttttaggaaattttccacatctttcagtgtttgaacttacttgtgcttgagattctacagttttatggtaaagtttgcacgaacccttaggccagacttttctgatctcagagtcccttccaatcaatttgcagcttcacataagctgttgacctgatttctgacactgcttcagttgtaaattttatactgcttctgtataaaatgcctttcttctctatctgtgtatattttataagatgtccttcttagtgtgaaagaagggaaatgtggatcatcttgtggaagctaatcactggcaggagcctggatggctggcggaaagatatatgagaaagaaaaattatgaaggtagaacagagtgtaggaactgggaattggtttcatggtataggttttaaaatgagacaggctacccttcgggagtccacctctcttgaggcggtgagcagaagcttgtcctccatatttatacctagaagtgtggactgctggttcctgcacagactgccggttattcactaggaatatttccccaagcaccacagtataaaatactacagcactctgtgttaaagactaactgtctacatctccatatgttgtagtgttgtgaaaatgtgattttaaaaaattatcgccagttaaaactggctattcttttcctctatttcaaagtcatttttgttcagtggaatagagacagcaacatggtgttaacctctcaattaaaatacaattgacaccagtaaattttgccataaaaagttaaaatctcttgttcaaaatatgtgtatcttcttaatgtgttcatgttagagaaagtgtccccatctcactgccaaaaatgaaagaaaataattaaactctttaaatgattaaatgtaatgattctactcgcagtgcataacagcacatatttttgacagattattttttaggcaattacctttccttaaggtatctgatacagtatagtaaagaatcacttatatcagtaatagcacttgagagatagcaagtcaccaagaaacttaattttcatttaaaattttattttgtgaataaggtcaatctacaatcccagataactacattttttttcatagatggccagtgttttcaacagagatttaaaatggaatattaaaattatagtgattattcagaagcattttaatttagaaaggagctggtttgttagttcactgatgacattttttgacaaacattttataccattatcacaataatcagacttgaattttttttggagttccttcatgtgaatgaaaactgagttaaaagaaagtaggcatttaggtctggatgcagtggctcatgcttgtgatcccagcactttgggaagctgaagcaggaggattgcttgagcccagaagttcgagactagcctgggcaacacagtgagactcggtctctacc

SEQ ID NO: 827 - DNA, 2655 bp, Homo sapiens
ttgtgcaacatggggaaacccagtctttacacacacacacacctgggcaacatggcgaaacccagtctctacacacacaaacacacacctgggcaacatggtgaaacccagtccctacacacacacacacacacacatgcacacacctgggcaacatggtgaaacccagtccctacacacacagacacacacacacacacacacacacacacacacgggcaacatggcgaaacccagtctctacacacatacacacacacatacagacacacagacacacacacacactagctgggtgtggtggcgcacatctgtggtcccagctactcaagaggctgaggtggaaggatcacttgagcccaggaatttgagttgcagtgaaccgagattgtgccattgcactccagcctgagagacagagcgagactctgtctcaaaaaaaaaaaaaaaagtttatgtccttaaataaaaattcataggctctagattagattagaagatacagcttagatcaaaagggctcttttggatactttaatttactcgtgtgccctgccatgtggatgagaagtgattacatgtggaaattcatagtgttatctttttatagcattcatttaaaaaggttggatttatgtaggccttttccttttgttctttattgcagatattcaagagaagcttatgtggagttagttcaccatattagagaatctattccaggtgtgagcctcagcagcgatttcattgctggcttttgtggtgagacggaggaagatcacgtccagacagtctctttgctccgggaagttcagtacaacatgggcttcctctttgcctacagcatgagacagaagacacgggcatatcataggctgaaggatgatgtcccggaagaggtaaaattaaggcgtttggaggaactcatcactatcttccgagaagaagcaacaaaagccaatcagacctctgtgggctgtacccagttggtgctagtggaagggctcagtaaacgctctgccactgacctgtgtggcaggaatgatggaaaccttaaggtgatcttccctgatgcagagatggaggatgtcaataaccctgggctcagggtcagagcccagcctggggactatgtgctggtgaaggtgaggagtccttttgggcttttggcttgcactgtgaaatgagtgttggtttggatatttgtggtaataaagttttttcctagagacacattttagtaaaataaaaatcccctctcaaccagtacaatggaagggcactttggattggattttagactgctccttactaatgccttcttattcttcttacctattctcctgccctggaagcgttctttgtgggaatttggtgagtttggagtatgcagtggcatgtagtttctcgctgcagagaggccaggaggtggagtgatttcgagtgagtagagagtgttccctgttggagatcaacattttctttgtgatctctgacggctcaggcctctttaacttacatgtgctcgagtttcttgggtctcttccctggactcacagatcagctatatggctgtgggattttctctccctttctttctctctttctttctccctttcactggcgatatgcttctcttattgtctccttccatttcttcctttcttctgccttctcttctcacactgcccagttctgctactgccaccttccctgtcttgttctcatatctgcttcgcctcagaaccagaagctggcaggacacagactgatgccctagagcatccacagaagttcctttaagggcagggaaaatgcctgttttgtttctgtttgtttatctttgtttatcttctagcacctagggcaattccgggtacaaaatatgtacttagtaaggatttactaatggactgacttgctcttatgataagacatgtgaccacagataactttggggtcacattcttttagctctcaattggaggagagagaacatttctcaccaaatgttggctgtaaatatcctaaggaaggatttgactggatcagccttggagttaggagggcagggcctgtgatgggcagtttcacctgaattttatggttagagctgaggaggagccatcttccaagagaaaagggagaagtggctgggactgacctgctttgacttcttaaattatatccattgccattccatgagacctcgcttcctgccaggatcgggggcacacaggagccatgtggtctctgccagccggtcgcctccatcagattccttttgggggcttctcctctagaggctccacatgaagtcccagtgctacagtcctagttattttgccttcttctgcctggttttctttcagatcacctcagccagttctcagacacttaggggacatgttctctgcaggaccactctgagggactcttctgcatattgctgacctgagaggatggcctcagagctgacttgggcaatcctccccaacaggaaggggagacattgcctgccactgaggaaacaggtcatgaaggtggagataagctgcaaggggcgaagcaactttatgtcagtggaaaacgtgtctctttaaagctgctatgtgaacagcttttacagtcattaaatttacctaaactaaggtt

SEQ ID NO: 828 - DNA, 2647 bp, Homo sapiens
gttttacagcagtagtgcgcttgcgcagctggtcccacaccaagtcgcccgcctctcctcgtccggctagcagagggcgctgtgaggtcggcatttccccaaacgtccaaagcatatgcttgtagtggaagcaaagtttgatggagaacagttggctactgatcctgtggaccacactgaccagccagaatttgctactgagttagcttgggaaattgacaggaaagcgcttcatcagcacaggctacagcgtactcctatcaaactccaatgttttgccttggatcctgtaacttcagccaaggaaaccataggttacatcgttctggatttaagaaccgctcaagaaacaaagcaggcaccaaaatggtaccagttgctgagtaataaatacaccaaattcaagtctgagatacagataagtattgctttggaaaccgatacaaagccaccagtggatagctttaaagcaaagggggctccccctcgagatggaaaagtacctgccatcctggctggacttgaccccagggacattgtggctgtgctgaatgaagagggaggctaccatcagattggaccagcagaatactgtactgactcctttattatgtcagtgaccatagcatttgctacccagttggaacagttaattccatgtaccatgaaatttccagaaagacagcctgagtttttcttttactactctttactgggaaatgatgttacaaatgaacccttcaatgatttaatcaacccaaactttgagccagggagagcatcagttcgcatccgtagcagtgtagaaattcttcgtgtttacctggctcttcagtctaaactgcagattcatctctgctgtggagaccagtcacttggaagtacagaaatacctttaactggattacttaaaaagggcagtacagaaatcaaccagcacccagtcacagtcgaaggtgcttttacccttgaccctccaaacagagccaaacagaagcttgcacctattcctgtggagctagccccaactgtgggagtgtctgtggctctgcagagagaaggcatagactcccagtctttaattgaattaaagacccagaatgaacatgagccagagcattcaaagaagaaagttttaacccccataaaggagaagacacttactgggccaaaatcaccaacagtgtcccctgttccatctcacaaccagtcacctccaacaaaagatgatgcaacagaaagtgaagtggaaagtttacagtatgataaggacaccaaaccaaatccaaaagccagttcttctgtacctgcttcactggcccagctagtgactacatccaatgcttcagaagtagcttcaggacagaagattgctgtaccagcaacatcacatcatttttgcttttcaatagacttaaggagtatacatgccttggagattggttttccaatcaactgtatattaaggtactcatatccattctttggaagtgcagctcctattatgactaatcctcctgtagaagttcggaaaaacatggaagtttttcttccccagtcttactgtgcatttgattttgcaactatgcctcatcagctgcaagacaccttcttaaggattccattactggttgaactatggcacaaggataaaatgagtaaagatttacttctgggaattgcgagaatccagctttctaacatcttgtcttcagaaaaaactcgttttttaggttctaatggtgaacagtgttggcgtcaaacttacagtgaaagtgtgcctgttatagcagcacaaggatcaaataacaggatagcagatctttcttacacagtgactgtagaagattatggactagtaaaaatgcgtgagatttttatctctgattcatctcagggtgtatctgccgtacagcaaaagccgtcttctcttcctccagcaccttgtccttcagagatccagacagagcctcgtgaaacgttagaatacaaagcagcacttgagctagaaatgtggaaggagatgcaagaagatatatttgaaaatcagctgaagcagaaagaactggctcatatgcaggctcttgcagaggaatggaagaaaagggaccgagaaagagaatcactagtaaagaaaaaggtggctgaatatactattctagaaggaaaacttcaaaaaactctaattgacttggagaagcgagagcagcagcttgctagtgtggaatcagagcttcaaagagaaaaaaaggaactgcaatcagaacgtcagcggaacctgcaagaactgcaggactctatccgtagggccaaagaggactgtattcaccaagtagaactagaaaggttaaaaatcaaacagctcgaagaggataaacaccgccttcagctacagcttaatgatgctgaaaataagtataagattttggaaaaagagttccaacagttcaaggaccagcaaaacaacaaaccagaaatccgtctacagtctgaaataaatcttctcaccttggaaaaggttgaacttgaaagaaagttggaatctgcaactaagtctaaactgcattacaagcagcagtggggacgagctttgaaagaacttgccagacttaaacagagggagcaagaaagtcaaatggctcgtctt

SEQ ID NO: 829 - DNA, 3901 bp, Homo sapiens
tgtgttccctcgttttctaaactttccttcaattctgatgctaaatgctaatgacaagctctgaaatccctggtctaccctcagggttttatttttgttgtcatttcattttgcttttgtttttaatttttggtcaattgctaggggctagatcatttccccactttttaccctttgttacttggcaaagagataaggaggcaagaggagaattactgttctctgttttatttgagcctcggctttgtccaggtgtttggtgctatgaggccaggtgtgttgacaagtatctacacaggatgccagtaacacccaagggctgctgactgttccatgaaatgtttacatgattttgtcctttagttcttaaatatatggttgcacttcacttgggttgtaacatttaagtgcacctcagtgtttgcatgataaatgtcatcaagcatgacacaaaagcccagaaaactgtaccaaggttgcatgcacggagtcctgctctgcgtggtgcgtgcaggtgctcactcctccatgctgcttggagctgccagccttgcttgcaatttgaaagtctgcacaagagttctgggagataggaggattatttacaattttcccttgataaacacctttgcatcagcagaatctctgcctcaagaaaaagttgcttaacatattgtaaaggatgtgtgccttctgctccttgaccgtgagaccagacaggagaactcaggcatgtgggacagagggaaaacagattttaggttcatgactcattctgcaactgccaacaataaaatagtgacccaaccacatcacttattctcacaagttctggagacctttcagatcaaaacaaggctctcatacttgctcagaactaacttcaagatcagctaagaagctacttgattgagccaaagaggactttagtttcacagaattttaggtcatatttattctgaaatataactgagctattcatgagctccctggaccatttcccacacagccatatttccatggctttgtggcaaaggggaccatcaaaggttttagttcggttagagtagtgtttacaggcttgaactttgagccttttagagagaccaccaggatttcatggatacagaaggattggagagagaggtcgaggtggacttaatggaagggaataagttattgaacattaaattttaaattagtggcagacctccaagagagtcatgccaaaaaaaagtttttatatttgctgtattaaactcaatggtaattacttttagtcattttccttagcactgaatctaaaccctgaattaccgagagcagttaagccacagtcccaggattttattataaactcaaagaaaagcacaaaatctgagcccaggtaatgatccatcttaggaatcctagttctttttacatgatctcatattcatccaaaaaaattgtttcttctcaataagacaacgtagtagagtattctggaattaaatgcagttttatggcgtggcgggactttccatctctcgttttgagaatcttgccatgagaaagtgcttcccaatgagacattactacctcccagctaggaggcttagcacaatgctaaaggtggagcaacagaagaaattcagatggaaatgaaactacttcttcctgggaagtaaaagagctacatgaaaccagtccatcctgcagatttagttcatgccacagttgaagtttgtgtgatgtttcttagtagctaatttcaaatttttactgttagattctaagaaacagagtgggctaatgattggagcacagccatgagactccgctccgttagctgagcatgtgatcctgtgctaaatctttcttggttccttcatctttgaagatgctgtctgctactttagtgctgactgatttgcaaatcttggttgattagctccccaatcataaggtccctaatgattagattaaatgccttatactcagggggtgtgcagatatgctattcttccttctgtggcttgggtggaaaagctgcttgggcttatttcccaacagtgtgatgtaggatggcagaacttatctaggaatggcacctttgatgatccatataatgaaatgtgtagagctcaaagaaatctgccaacatgtatgtggactcttgagaggtgggctttcccagtacatgctaaacagacttgttatgccaagaggaagtgaatagaaatgatagcatcaaatatccaaactgacaggaagtttcttttgcatagcatagaacatggttgtcttctgagttccactaatgttccaggatatcttggccctctgcctctggctgctccctggtgtttggcaccatagcgttgtcacttacaaccattgccttgggacacacagagtgaactgtttgagtgataagtaatttaggtagaaactttacccttaatttcaaatgataccaaacagctcattactaccccaagggacgctctccgtagcttctggattccccagtttccttctagaaacaaggactccaatagcactataaccctaaacaggccctaacccagaagaatacaccacaaaatgcgattgattttctcaaaatatcacagtcttagacactatacaaataattcaagaaaattctttctaccctgcagtggatatagtattctattatattctccagcaaaacttttaggacttttcaaactcatttctaagccaaatagtttagataaatatttacccttatatttggggggaattcaggctcaccatttgccgaggcaagcccatcaacagtctagaggcatattctgtgtcattccttcccgtctccttcatagaatactactttttccttttgtctcctggccattctccatcatctgctgattattgctaaccacaggatgctggcaaagcttacagtgataggcacatgtgttcagtgatgtccaatacactcttatcacagtggttattgcttcttactcttttcaaatgcattattctacccctcaacctacatccaatcattagaactatacctgactggagcccagaacttgggaccaatacttaattcaaatagcaggggcttgctcacaaacattaagcccaacaagaagcacagcactttgaaaagtcaaataggcctttggtagctctgtacatttgcaattttacatttgttattagtttatagcactaataacacttcagtcgtgaatctacagtctcaatatgataagtcttagaacatgttctagaaatagtggtaccttgctgctattatacttagtaacttataccccaatataataataagtattaaatacagattgtgtatgcattctttgtgtgtatatgccaactgtactacttaacctcactgatgagcaattagaaaaatacacaaattgtcatagtgaaaataagtcttggtcaattcagatgatacgtgaacctgataaatgctctaatagatatgctattttgtcctgtattgcttgttttacagtatggtgcatgttgtttgctaagtaaaatgataataataataaagtataccaattttaaggttagaattaaaattttgcacatatgcttcttgatattctgaaatgtattctgtggcttaattatcttattcatacacatttcacttggctttttacccctaggaaataattgtccaagtatatatctcgtcttctttcttgtaactttgattaaactgcttacttcaacttacaacattgtaaagccagaatacctcattttaacagtgaaaaaaaatatgatgacctgatgtgttctcttgtatttgatttgaactacctaaataggcttaactgtaataataaatatacaattttggcaggcattt

SEQ ID NO: 830 - DNA, 3449 bp, Homo sapiens
agaacaaatatgaaaatgaaaaagcaatggtgactgaaaccatgacgaagcttagaaatgaactgaaggctttgaaagaagatgctgcaaccttctcatccctgagagcaatgtttgcaacaagatgtgatgaatatgtcacccagttggatgagatgcagagacagttagcagctgcagaggatgagaagaagactctgaacactttgttacgaatggctatccagcaaaaactcgccctgacccagaggctggaggacttagagtttgaccatgagcagtcccgacgcagcaaaggcaaacttggaaagagcaagatcggcagccctaaaattgtcagcagcctgctgcctccgtaccgccacagtgctcacaactagccgggaggcaagactgcccaactgtcagtcctgacacagctctccctgaggagcagccacattccagctcccagtgcgcccctctccactgtctctccaagcctcctcacccctagtcttcatctcctgtggacgaacatctggggtggaagttttgtagccacacacaggatactgcccaagatccagcgggtgttttcttctcggttgttagatgtacaattggattaatgtccatcgttttggaagacgagagaaagttgagaagaacacgaagcacagaccctgatgtgataaaacattttgtggtttctctgagtcacagataaacttctgccatcaaatggctacagttcatttaaatttaaaaaaaagaaaaaagaaacagaaaacgtgtctcagatggctggctttacctcgatagcataagagagacctaagacatgtaaaatacgtatattgcagtatcatctttcctcacactccaaattcagctagggaagttgattccaatatgtttgtcattgatatttattttgtactttatttgctacatgatttatgtctatacaaataatttctctgaggtgaatttaattcatttattttcaaataagcataatttgctcaattaagtatgagtttgaatttagtttgaaatctggaattggccagactgtggtcatttttcttgcacaaaatgataaatgaggtgcatcagaatgttaacaataactgtattttgctgctacgctggtattgtttatgcacttattttctaatcagtagctcattaactgctgggttttgtttttgtatttttaactagagttcttcactggacattactaagtaaatctaagaaagagactaagttatgatttattgacttattcaagttttgatggcatctttacttttattttttcattgcagttgagtagatgtactggtgctgctcctttgtatgtgtgtatgtgtgtgataacgttaaagaaggctcaataacttgaagggaaaaaaatggtgtgtttatttaatgaccagaattttttttacttctcccaaaatcagggtcctactgagtctttcctgataaaaggtatcaagtacaaatgggaaaatatatacatatatagatgtaagatagcctttaattaattaatttacccagagagtgttcaaagtttgattaaaattgtatgttttgttgttgttagtttttttcataacgaatcttccttgccaaaaaaacaatagataataaaccttagctcattgtctacttttgacaaacactcaagtgcctacaaacattctattatcttgagataatacatgttcctggttaatttacagattctgctgggtaacttttatgacttgatttaaggcagtggattttcatagcaaaatttattttgcacataatctgacaaacaaggaaaacagctaactgagctgaaaggtctaacactctcgggctccttaaccatcaagtgctgcccacacaattgctcctagccctgattccttgtctttgtcaggtagccttaacttatttaaaaccataagggtttgaccttttcatataaagacatctgtaacttctcttcaaaacaaaaatgaccctcactgttaacacaaaggacagttaccagtgtagggcactgagaaaggagatccaggagccactcagcttattgagcggacatgggtggcacagaaatggagtggtccatcagagaccaaatggtaagtcgtaaagcacattgcaggagctttcgttagtcatacgcctattaagtagtggtcgctattaccaaagcaaccaggacgttttgtgttctttatatgagtgctattttccacagtgtcatttattatgcaacgtggagtaaagagttgaaatcttcaccaaaataagggttcaggttaaagtacagaaacagaaacaaaacgattcgacatgaagttcccaaccatagcagcctaaccttctgctcttttctacctgcatggccttgctgttcctaaacattgtcttcatttctctggcgttgtatctgcctagtaccagtattagtgagactgtggattttatcagagttcaatgaaagaaagcttacccctgccctcactttgtgttttttatttttccccctttctcaagcaccacgtatttggacctgagaagtggcatagctgctaagttgacttttaataaaaaactgtttgtgcctgagggaaatatatgcctttttaaaaagtacctcagaacatgttcctagatcgtctcatcggttttgtttggtgggactgggagttcagcaggaagtattgtctgtgtgtgatgacggggcagtattgccagtcggcaatgttgtatttgcattctttatccctaactctgaatctaggactccatgaaaagccgggtcacccacaaaacatttcttccaatacaaagtgtattattacgtctattataaactagtttcatttcagttatttatcttcatagagtgggaaagtctttttctgaaatactaattctatgaaaataataattttagtgaatctttgccaagaagttatagaaacttggaaataaatttctcattttcagcacaaaattaagtgatagtccctaagcagtaagagagaataccatgtatttacactgtggcatcatttagtatagtttacactgagccatatttatttataggcatttaaagtgaatcagtatgtgtagtgttgataaaaatcagtatctgtaaagataacatcaggaattcaaaaggaaattgaaaaggggcagaactagtgagaaccaaaaagaatgaactccagtaagactaattgaagacatacttggagaggaaaaataaacagcagaaatgcactaaaaaatactggctaattattgcaaacagagtgagcaaagattaatgctaactagtaaaagtagttagcaaagtaaacaggtagttttttaaaagtaagcacaattacaatattgaatagtatggagaaatgcttttctcctgaggattttccttaatc

SEQ ID NO: 831 - DNA, 2816 bp, Homo sapiens
aaaacctcgcctggctcccagctggtgctgaagctcgtcagttcaccatccgccctcggcttccgcggggcgctgggccgccagcctcggcaccgtcctttcctttctccctcgcgttaggcaggtgacagcagggacatgtctcgggagatgcaggatgtagacctcgctgaggtgaagcctttggtggagaaaggggagaccatcaccggcctcctgcaagagtttgatgtccaggagcaggacatcgagactttacatggctctgttcacgtcacgctgtgtgggactcccaagggaaaccggcctgtcatcctcacctaccatgacatcggcatgaaccacaaaacctgctacatcctaactcgatttgctctaaacaaccctgagatggtggagggccttgtccttatcaacgtgaacccttgtgcggaaggctggatggactgggccgcctccaagatctcaggatggacccaagctctgccggacatggtggtgtcccacctttttgggaaggaagaaatgcagagtaacgtggaagtggtccacacctatcgccagcacattgtgaatgacatgaaccccggcaacctgcacctgttcatcaatgcctacaacagccggcgcgacctggagattgagcgaccaatgccgggaacccacacagtcaccctgcagtgccctgctctgttggtggttggggacagctcgcctgcagtggatgccgtggtggagtgcaactcaaaattggacccaacaaagaccactctcctcaagatggcggactgtggcggcctcccgcagatctcccagccggccaagctcgctgaggccttcaagtacttcgtgcagggcatgggatacatgccctcggctagcatgacccgcctgatgcggtcccgcacagcctctggttccagcgtcacttctctggatggcacccgcagccgctcccacaccagcgagggcacccgaagccgctcccacaccagcgagggcacccgcagccgctcgcacaccagcgagggggcccacctggacatcacccccaactcgggtgctgctgggaacagcgccgggcccaagtccatggaggtctcctgctaggtggcctgcccagctgccgcccccggactctgatctctgtagtggccccctcctccccggccccttttcgccccctgcctgccatactgcgcctaactcggtattaatccaaagcttattttgtaagagtgagctctggtggagacaaatgaggtctattacgtgggtgccctctccaaaggcggggtggcggtggaccaaaggaaggaagcaagcatctccgcatcgcatcctcttccattaaccagtggccggttgccactctcctcccctccctcagagacaccaaactgccaaaaacaagacgcgtagcagcacacacttcacaaagccaagcctaggccgccctgagcatcctggttcaaacgggtgcctggtcagaaggccagccgcccacttcccgtttcctctttaactgaggagaagctgatccagtttccggaaacaaaatccttttctcatttggggaggggggtaatagtgacatgcaggcacctcttttaaacaggcaaaacaggaagggggaaaaggtgggattcatgtcgaggctagaggcatttggaacaacaaatctacgtagttaacttgaagaaaccgatttttaaagttggtgcatctagaaagctttgaatgcagaagcaaacaagcttgatttttctagcatcctcttaatgtgcagcaaaagcaggcgacaaaatctcctggctttacagacaaaaatatttcagcaaacgttgggcatcatggtttttgaaggctttagttctgctttctgcctctcctccacagccccaacctcccacccctgatacatgagccagtgattattcttgttcagggagaagatcatttagatttgttttgcattccttagaatggagggcaacattccacagctgccctggctgtgatgagtgtccttgcaggggccggagtaggagcactggggtgggggtggaattggggttactcgatgtaagggattccttgttgttgtgttgagatccagtgcagttgtgatttctgtggatcccagcttggttccaggaattttgtgtgattggcttaaatccagttttcaatcttcgacagctgggctggaacgtgaactcagtagctgaacctgtctgacccggtcacgttcttggatcctcagaactctttgctcttgtcggggtgggggtgggaactcacgtggggagcggtggctgagaaaatgtaaggattctggaatacatattccatgggactttccttccctctcctgcttcctcttttcctgctccctaacctttcgccgaatggggcagcaccactgacgtttctgggcggccagtgcggctgccaggttcctgtactactgccttgtacttttcattttggctcaccgtggattttctcataggaagtttggtcagagtgaattgaatattgtaagtcagccactgggacccgaggatttctgggaccccgcagttgggaggaggaagtagtccagccttccaggtggcgtgagaggcaatgactcgttacctgccgcccatcaccttggaggccttccctggccttgagtagaaaagtcggggatcggggcaagagaggctgagtacggatgggaaactattgtgcacaagtctttccagaggagtttcttaatgagatatttgtatttatttccagaccaataaatttgtaactttgcagcg

SEQ ID NO: 832 - DNA, 3547 bp, Homo sapiens
tactctcgcggctggcagcggagagctccgtgcgcgggctgcagatgtctgacctgcaggcggctgaggggccgggctcctggagccccacagcccgcccagggtcggctggcggcgtcggggactgccagggagtggaggggagccaggcggccgcctcagagaatgaagatctagaaaacaaggatacctctttattggcttctgccaccgatccagaaccctgctcctcaccccacaggccacagatggtatctccagtgagtaaggatgccacggaagatctgcggaaagcaactggtcctttggaggctcaggccttggtgaaacaggatttgctgcctgcagaccaggcccaggtcctcaatgagatggctaagtatcaagttccacagaggtctggggacatcgttatgatccagtctgaacatacaggagctatagatgttctttcagctgatttggaatctgcagatcttctgggggaccacaggaaagtctccccacctctgatggctcctccatgcatctggacctttgccaaggtgaaggaattcaaaagcaagctgggcaaagagaagaacagccgtctggtggtgaagcgtggtgaggtggtgaccatccgggtacctactcatccagaggggaagcgtgtctgctgggagtttgcgaccgatgactatgacattggctttggagtttattttgactggacccctgtaactagcactgacataactgtgcaggtcagtgattccagtgacgatgaggatgaagaagaggaagaggaggaagagattgaagaacccgttccagctggagatgtggagagaggctccaggagctccttgcggggtcgctatggggaggtcatgcctgtgtaccggcgggacagccaccgagacgtgcaggctggcagccatgactaccctggtgagggcatctacctgctcaagttcgacaactcctactccctgctgcgcaacaagactctctacttccacatctactacaccagctgaaggactgctgggacaggggcaggctgtatttgctggctgaagcaggctgccagctggtgcctcttgtttgggataggcaagagccaaaggttcatggggggctgctgagcctcacaccctgtctggcatgcctgactgttggcccacgtagctttttccccttcttggcttctgcaggtggtggtgtagtgcccctgttctgtagtccctgactcatacccttcttgcttcagactccagcaaattccctcttgaaggcacctatggggcacaagcctaaaaggaagcagggcgatgttttttaaaaatagattcatcttggcacaggtttatcattcagattgctgccctctcctctcccacagcccttattgccagtgcatttagtggcacccactctcttcagttgttgaggtgccagaagagggaaaagcacattgcccatgaaggagccccatcttttggttggagaaagctctatccagcctgtcaccactgccatattcctgcctgctggttattcttggtctctgcatagctgggagaccacactgcctttggagggctattactattcctgatggtagacaccccctcctttctctttcctaagtctatgtttttgccattacagcaagaacattcatgcaatctcaagtgatgatcaatgtaacctaagatcttgtgggaagaaaaactgcccccattatttcctattccaagagctggtttcccttactatgggcactggcagtcaaagtggagagagtggaaattaggtactgaattgatgtcagaacccacatatttgaaagtcgtgttacaccgttttgtgctgcttgagaactgtcttttaaaattgatcacaacgagggaaaacaaaataaaattagggggcaaagggtaggagtatggggggaggggagagcaaacctatcgaatatatcttagaattttgctcagaaatcactgctgcctctcaagtgttgcattgtccctgcctaaaccaagaaggctaaacaaagcccctcctgtttgaattcttaaggtaagaaatttctaagctaagaaaacactattgcctaaaaccaatgatagtggagctcatttacaaataggcatgcctcacacacacagtccaaaggcaagacattggctttgaaattaggctcatgatgtgattcctattatatgtacctgatttttttaggccccaggtatgtggaccagagttaatgtcatgactcttcaaagatatgatgaaaagttgccctagaaatctagagatgcatgtttatttaattccatagtttaaaaaaaaatttaagcaggtagttgtggcttatctgggggcaaaataatatatgtgaaattgcttccagaggacaaagtatattttctaaagtcctgaaataggatcatgaacccttctgaagttttggtttgaaatattatagtatatgatattaccaaagagcccttaattcagagtttaaggggctctcttcctgaactctcttcatcactcagggttgaatgtgtaatgttccttgctattgattgttattgttgattcttaggatcaggccaagaatcatctggaaaacattatcttaattccgtctctcatatcctaaacagtacattttactaagaaattccatatgaaaaactccactcatgtctcctgagattatcctgtaagtgaagtagctttcatttaaccaagctaaattatttccatttagccatgttaaagagaagccaagtctagagaaagcaatcctgtaacccatgaatctggtgtacccattttcccttaacgtaacgggaagtgttttgaaattcccagaagagagctgttttgtaatcaaagtgatggattataagaaagccagactttggaaaaggataattggaataaagggaggtgcttgaagattttccaaactactttatgtcatttagcttctattttctgaagggctttctttggtgccatgtactcagatcagtcagttgactgaaagatgatcatgttttcttcgtaaagatttaagcaattggcaactacaaagacattattttcttactgttctatatcatgtactgttgctgacattacaaaaagggtctggaagggaaaccgtgtcactgttttatcttttttctttaaaatacaaaagtatcccaactaatcatttattatggtcagcttgttttacatgtcccctatgatgagaaatgctatcaacatctgtgatttctaagagtcttaccaaattgttactttaattcttgtgtcctgctgagtggtttttcttttaaaataccatttttatcaccctgtggcactgggtgtgttactgcgattacactgatgattctgagctgtgcttcttcaagtagctcagttcttgcgttttatattaggtaacagttttgtgatgcttttgtgcgttctttgtcatctcttctgagttttcgaatctgtcataaataaactttttcactatgcacctggt

SEQ ID NO: 833 - DNA, 2721 bp, Homo sapiens
aataaggctcaagaaagatgcaaaaccaaggatagctagaaagaaaacacatgtatgaccatgggtatgatacctccagaaatgttaacaacttattcttctgccatgagtacccctcatcagggttggtttcaatgacaggttttggtgatgttcctgaccatatgaagtggtttatgtttagaaacattcaaattgagggacatcatttacagcatcgagtgtgtcagttatacatgcattcatcattaaatatcctaggttttatgacagacattgaaattatcactcagatgtgtttaacagcaaaaaattcccagcacatcctggcaaaggcttttatttccaaccgttgcattcttcatctctgcctcccattgcccactgaatgctttgctttctgtgcatcaagacagagttctaaaaccagaaaacatccatcttgaaaggtccatgaaaaagccaaattccatatagcaccacagaggaggccctttgtttccctgcagtatttcaaccaggaacattagtatcacatccaccaggaggcacatcactggcaagtaacatagaatcacagggctgcaggtgcccctggacactccccggttctggcttttctgccttgtacctcctcacctgcagatctaccctgcagcttttgcatagtcagtgacacacttgacaattggcacagctgtgctggggaagacgggagacaccttgctccttccaaactagaaggaaagattttggagccatcaccctgtgcttctagggatgcacgcctgtctttattatacaggtttcttgcaggtttttatcagccagtgggaactccacagtgatgagcactgaatcttcactaaatcttcctacagacatttaggaatccagtccttgcttttgcagatatgttttatgtcagcagcatgacaaagccatataattaaataatttatgtgaaagcattgcttattaacaaggaaaatatgtagatgcttcagagggaaaggcagctagagggaaattttcatcccaatatgttagctatattcagggttgattttttctttaatctcaactgtcactgatacattgaaaaatttttgctatgaatatagtgaaacagaaacattctgtaataccttaattaaacatgctattatttcaatgtataaccaaaacatatctccatggtacagttaagacttgttgcaatgacaatagcagcttaattgaatgcgttctcccttgcaaaatgtatgaatgtcaggagagtttagtggaaaagttttctttgtttcaggattggtttcttctagactgttctcaggactactttcttgagcaagaatggcttacagagactgaaggcttctgtttggttagtctattcagcagatatggagctggaaaacaagacatctcctatagcttgctataatagtgaaggagaaattggaaagttttaatcacaataatatccaataaaagcccattttgagagttttgttattaagtcaatgagaagggataggtaactttgtcctatatattaacttatgtctaaatagacatggttaagccatgttcctttctaatttcttttcttttcttttcttttttttttttttgagacagcctctcgctctgtcgcccaggctagagtgcagtggtgcgatcttggttcactgccagctctgcctcccacgttcacaccattctcctgcctcagcctcctgagtagctggggactacaggcacccgccaccacgcccagctaattttttgtatttttagtagagacagggtttcaccgtgttagccagggtggtctcgatctcctgaccttgtgatctgcctgcctcggcctcccaaagtgatgggattataggcgtgagccaccaccgcgcccggtcattcctttctaatttcttgaaaaaactttgtcttgtccttatgtttacatgtgtgtaataatttcagcaactctggaatgtgggtgaggtggctgtggtggatgaatattactccctaccctccttggatctttctagatcttccagaccattaaatgcccctgaagctccttttatagttttgcaagtggatttacttgtagacatccttactatccagcataatcccccttggctgacatgagaacttggttagaggagaatttattggggtcagtgtaaatattcaagttcaaaagcctcagaacccaacactttaaagatttttaaatggagttttgtcgtagtcattgtacttttaaaatagtactttcagtttcattgaggttacaagaaagactgaagagtacaaaggaaatttagttacaatttttgcatttattatggccttaaagactcttgggaatcaggctctgttcaacagtcaataaatgtaatacacacattaatatagtactgactgggcgttcttctataaaagtttaagttctttggcttctaagaaaatgttgggcagttacagttaacttgatgactacttctagtattagccaaatgggtcctaagtggcagcattttgccagacattgactaaatccttacatgccacatttactgaattccaataaacatatagttcttctgtggagtagttaacagtaagtggcagctcactgaatttctcccaggttctgtctcttccaaaatcctccatcctctcttatgaagggaagctgat

SEQ ID NO: 834 - DNA, 2426 bp, Homo sapiens
ctttttcaactcaagagctcagtcctgtgtctctcatggaggcgtctctaaccaggaggctactctttaaagacaggcattttacttgcagcaaaataataggaaggagattcgcttgctttgcacagaggctgagccacaggagaaagcaaagccaatgtgatttattgaatgaaagcactggacaattaccaacaacttgttcctctgctgcctcgaacagcataaactggaattgtcgtgtgaaaatgacgcaacaaatgcaaaatttacatctctgtcagtcaaaaaaacatagtgctccctcatctcccaacgcagccaaacgcctgtacaggaacctctctgagaaactgaaagggagccactcttccttcgatgaggcctattttaggacaagaactgatcggctgagtctcaggaagacctcggtgaatttccagggcaatgaagccatgtttgaggcagtcgaacagcaggacatggatgctgtgcagatcctcctgtatcagtacacaccagaagaacttgacctcaacacacctaacagcgagggcttgacacccctggatattgccatcatgaccaacaatgtgcccattgcaaggattcttctgaggacaggggcccgagaaagtccacactttgtcagcctggaaagccgagcaatgcacctaaacacactggtccaggaagcccaggagagggtgagtgaactgtctgcccaggtggagaatgaaggattcactctggacaacacagagaaagagaaacagctgaaagcttgggagtggaggtatcggctctacagacgcatgaaaacaggctttgagcatgccagagcccctgagatgccaaccaatgtctgtctcatggtaaccagcagcacatcactcactgtcagcttccaagagcctcttagcgtcaatgcagctgtagtaaccaggtataaagtggaatggagtatgtccgaagacttttctcctttggctggagaaatcatcatggataatctgcagactctgagatgcacaatcacaggacttacaatgggccaacagtattttgttcaagtctcggcttacaatatgaaaggatggggacctgctcagaccacgacaccggcatgtgcctctccttctaactggaaagactatgacgacagagagcccagacacaagggacagagtgaagttttggaaggtctgctgcagcaggtccgagcccttcatcagcattacagttgccgggaaagcacaaaattacaaaccacaggccgcaagcagtcagtctcaagaagcctgaaacacctgttccattcctcgaacaagtttgtgaagaccttaaaacggggactctacatagccattatattttattacaaagacaatatcttagtcaccaatgaagatcaagtaccaattgttgaaatagatgactctcacaccagttctattacacaagattttctgtggttcacgaagctgtcttgtatgtgggaagatataaggtggctgaggcaaagcataccaatatcctcatcctcatccacagtgctgcaaactcggcagaagatgctcgcagcaacagcacagctacagaatttacttgggacacacaacttgggaagagtttactatgagcccattaaagatcgacatggaaacatactcatagtcaccatcagggaggtggagatgctttattcattttttaatggcaaatggatgcagatctcaaagctgcaaagccagagaaagtctctatcaacacctgaggagccaacagctttagacattctactgataaccatccaggatattctatcctatcacaaaaggagtcatcagcgtctctttcctggattatatctgggttacctaaagctctgtagctctgtggatcaaatcaaagttcttgttacccaaaagttgcccaacattctctgccacgtgaagatccgtgaaaacaataatatttctagagaggaatgggaatggatccaaaagctttctggctctgaatctatggaaagtgtggatcatacttctgactgccccatgcaattgttcttctacgagctccagatggcagtgaaagctctccttcagcagatcaatatacctctacaccaggcaaggaacttccgcctctacacacaggaggtgttggaaatgggtcacaatgtgtcctttcttctcctgctccctgcctcagacgacgtctgtacagccccaggacagaataatccttacaccccacactcagggtttcttaacctccctcttcagatgtttgaacttggtatagtagcttgtttcacctagaaatattaacccagcctccttataataaaatcacaaagttatatctgttcccccttgtcccagtggagggtcaataaatcacatgatggctttggcaac

SEQ ID NO: 835 - DNA, 3030 bp, Homo sapiens
aaaaaaaaagggtcccctgtctaccagagcagagcctccctctccaaggctctgttgctccccctctctagctccctcaccctctccctttctctacttccctctccaccttgctctctctctctctcgcagtttccccgtccctctctgtctctctctctatcgctgtttctctctctccttccgtttctatctctccatccctctgtcccttgctcttcttcaagctgtctgtgtctttgtgtgtctgcgtgtatgcttgtgttcccgcgcgtgcgcccgtatgtgtctgtttgggagtgggtttgctagtgattgtggtggggtgtgtctggatgtccgtcagtacctttgtcctgggatcaggctgccaactctattgccagcgcgtgggtgtcatagttgccgtgatagtctcacacacgcaggtgtgtggatctcgttcattttcatgtagacaatgagagcgaaagcacagagaaaaagaaacgtcccgtgcatcacggcctgaggatggattcctgttttctgcaaaatggggagtcttcgatatagcctgtttgaaaactggaaaggagagcaccgacacgatgctggtcttccacgcattcctggaagtttctgggtccccacagagctcgggaaacagtcaacatggtcacgctttccgggggcggcagagacttgagtaacaggcacctttgcagagagcaaagaaacgtggaatccagaatcacgcttcacttggcctgagcgtgacttctgtgtggatgggactatccgcctcgcgctctgttgcagggctaaacgtggggatatgtcatctgtgaaccatgtggatgaaaaacagacaaccacccgagtctccgctcattgctctctggggaattcgctcattccttcggaaacggaattcgtctgaatcgctctgggatgaagtaacccaggctggcgatccggagggccgctgagctccccaccggccaacggggctgtgggcccagcacttagcccgcactgggcacccaacattttcccggattgctgggtcctgttggttctggaggcagaagaccgtttttctgtctgccttcggttctctgtttcttgctccttttgtccctcggtccatcctgccctctgttcttccctccctgccctggttttttcctccctttctccctctctccctcttcctctcccttccagggtccctccgtccatccatcctttcctagctccatccttccgtcccactctgtctccgttcctgtcctcatctctgcctgccttccctcttgcctggaaagggcagcaccccggtttgcgcggggtctcgggtctacatttagttgcaaggcgctccatggtgctggcgaggaggctggtgggacacgggttggcaagtgatagtgagagaagaggcagaggaatcgagccgcagaaaggagaactggcctggcttctgccccgacccagtgtttcgcggactgaggtctccgccaacccgactgaagaacgcggggggaaaagggatgcgagctccgcctgggctggttagaaaacctaagctgttgcctgcaaacccccgcatgagcagtagacagtccacctcccggtacgtggacgggccctgggatccccgggatgctcaggaaagaatgacagccctcctctgtgtggagtctctcgccggacctggaacccagggatcctagacaggtcaactggaagggaagacacgcctctccataccgagccagaggttcaccgccaaagagaggccgccgccctgcccccgccccgccccaacccggcgtcctaaagctcctccagcagagccccgtgttcttcctggctgaggagtggttccagcggagcaggctcttccacctccttcagctcccccagtgacaccggatctaggaaaggttgtgccttttgctgaaagtctggggttgacgggagctcatctaacaggctggagttttcaggcagaaaccaccctgaagggtggagtgtggaactgtacttccatgacagtcttgagttttccatgccctctccgtgaaggcggcaatgcctgtgggtgtcgccgttgccgtgatagtctcacacacgcagtggtgtggaactcgttcattttcatgtagaaaacgagagcgaaactacagagaaaagaaacgtcccgtgcatcacggcctgaccacggattcctgtttcctgcaacaagggaagtctccactgtggcctgtttggaaactggaaaggagagcgaagacaggatgctgcttttccacgcttcgctggaggtttctgggtccccacagagctcgggaaacagtcaacatggtcacgcttttgggggccggagacacgtgaacaacaggcccccttgcagagggcaaaggaacgtggaacccagaatcatggttcactcggtctgagtgtgactcttgaatggacgggactatccacctcgcgctctgttgcaggctcaacgtggggctatgtcatctgtgaaccatgtggatgaaaaacggacaatcacccgagtctcagctcactgctctctgggcaattcgctcattccttgggaggcggaattcgtctgaatcgctccgggatgaagtgacccaggctggcgatccggagggcccgtgagcgccccgcaggcagacgtggctgtgggccgagcactcagcctgcactgggcacccaacattttcccggagtgcgaggtcctgctggtcctggaggcagaagaccgcttttctctctgccttcttctctctgtctcttgctccctttctctctctgtccttcccttcctccctccccccccacctcccttcctccccctccctactttctcctttccaatatccctctgtccatctgtccttttctcgctccattcctccctttctctctgtttctgttcctctccccatctctatttttcaacattatatgatcccattgtgtgtatctgtgttaacatttttagcaataaagttcattttcatt

SEQ ID NO: 836 - DNA, 1593 bp, Homo sapiens
agccatggagcgctctgggcccagcgaagtgacaggctcagacgcatcgggaccggacccgcagcttgcggtcaccatgggcttcacggggttcggtaaaaaagctcgcacatttgacttggaagcaatgtttgaacaaactcgaagaacagctgtggaaagaagttgcaaaacactgggatccaccttgatgttcagtgaagagtaccagaaaagtctgctagagcagtaccatctgggtctcaatcaaaaatgcagaaaatacgtggttggagagctcatctggaattttgccgatttcatgactaaccagtaaagaagatggaagaagaaggaaagaaaaggcataatgtaaatataaacgctgtctttatttctggatctagcaaagagttagtttgaaagagcaattgcttataagactacaaggctgatttctcccatccctgcaatgctgaaagtctgtgcccttctaagcaaattctagtttccctgacaattagtctaatggaatgcctggatgtaggaatattgattccgatgacagtacttttacagatggacctgagatatttctgctggttcttcactgacaacacacaacatatggatgatcataactttcccatataccccactagggcaaaaccagaaactgagaaagctagatggaagaataatgatgtggaaggggagttctccactaggaaggatccgatgagtagatagacacaaggacaaagagggcctaactttgggctgtggaagcggagttgcactcataggagccatagtgagtcattgcatcagaaccactaagcatcagtcatgaagagcaaacgggcttgctgttacaggagctaaaccctgaacccttccatcgtggttacagagagcttctgggggacagcatgagacagcttagcacttccccaatattatgaggaaacccaaaggcccagatgccacttgggaaaggagaaccaagaaggaaggacttcagaaaaggaagaaaccatgaaacattaagtaatttacaaactagactcttctttattctcttattttatttatttctttatttttgagacagagtctcactttttgcccttgatgaaatggactggcccaatcatggctcactgcagcctcaaaatcctggcctcaagaaatcctccagactcagcctcctaaagtgctgggattacaggcatgagccacagcacctgacctagactgttttaaactagatttccctgagaaaactttcactggaaaaatcaaaattatcctgctgtcattaagagaaaactatctgttgtagaaaattacattcttttttttttcagacatgtcatataaatatttggacccctctctgagaacaaactacttaaaagtcatttcaatcattaacgaatatcataattgagggcctgtgctgggtgccagaaatctaccagtgagcaaaacagcacggatctttgtccacagtaaatttacagatcagaggaaacagaaaaacaatcagttaaataaaacaggtctgaaaattgcgtatgagaacccaaagcagaggtacctaatcaggtc

(The sequence listing continues in the following parts.)

What is claimed is:

1. A polynucleotide selected from the group consisting of the following (a) to (g):
(a) a polynucleotide comprising a protein-coding region of the nucleotide sequence of any one of SEQ ID NOs: 1 to 2443;
(b) a polynucleotide encoding a polypeptide comprising the amino acid sequence of any one of SEQ ID NOs: 2444 to 4886;
(c) a polynucleotide comprising a nucleotide sequence encoding a polypeptide comprising the amino acid sequence of any one of SEQ ID NOs: 2444 to 4886, wherein, in said amino acid sequence, one or more amino acids have been substituted, deleted, inserted, and/or added, and wherein said nucleotide sequence encodes a polypeptide functionally equivalent to a polypeptide comprising the selected amino acid sequence;
(d) a polynucleotide hybridizing to a polynucleotide comprising the nucleotide sequence of any one of SEQ ID NOs: 1 to 2443, wherein said nucleotide sequence encodes a polypeptide functionally equivalent to a polypeptide encoded by the selected nucleotide sequence;
(e) a polynucleotide comprising a nucleotide sequence encoding a partial amino acid sequence of a polypeptide encoded by the polynucleotide according to any one of (a) to (d);
(f) a polynucleotide comprising a nucleotide sequence having at least 70% identity to the nucleotide sequence of any one of SEQ ID NOs: 1 to 2443; and
(g) a polynucleotide comprising a nucleotide sequence having at least 90% identity to the nucleotide sequence of any one of SEQ ID NOs: 1 to 2443.

2. A polypeptide encoded by the polynucleotide of claim 1, or a partial peptide thereof.

3. An antibody binding to the polypeptide or the peptide of claim 2.

4. A method for immunologically assaying the polypeptide or the peptide of claim 2, said method comprising the steps of contacting the polypeptide or the peptide of claim 2 with the antibody of claim 3, and observing the binding between the two.

5. A vector comprising the polynucleotide of claim 1.

6. A transformant carrying the polynucleotide of claim 1 or the vector of claim 5.

7. A transformant carrying the polynucleotide of claim 1 or the vector of claim 5 in an expressible manner.

8. A method for producing the polypeptide or the peptide of claim 2, said method comprising the steps of culturing the transformant of claim 7 and recovering an expression product.

9. An oligonucleotide comprising at least 15 nucleotides, said oligonucleotide comprising a nucleotide sequence complementary to the nucleotide sequence of any one of SEQ ID NOs: 1 to 2443 or to a complementary strand thereof.

10. A method for synthesizing the polynucleotide of claim 1, said method comprising utilizing the oligonucleotide of claim 9.

11. A method for detecting the polynucleotide of claim 1, said method comprising utilizing the oligonucleotide of claim 9.

12. An antisense polynucleotide against the polynucleotide of claim 1 or a part thereof.

13. A method for detecting the polynucleotide of claim 1, said method comprising the following steps of:
a) incubating a target polynucleotide with the oligonucleotide of claim 9 under hybridizable conditions, and
b) detecting hybridization of the target polynucleotide with the oligonucleotide of claim 9.

14. A database of polynucleotides and/or polypeptides, said database comprising information on at least one of the nucleotide sequences of SEQ ID NOs: 1 to 2443 and/or on at least one of the amino acid sequences of SEQ ID NOs: 2444 to 4886.
